United States Patent Application Publication US 2020/0377945 A1 - sequence listing, part 41

SEQ ID NO: 8053 - DNA, 24175 bp, Unknown
  gut microbiota DNA sequence
tacagtttccacggcaggaaacgagagtttctaaggcgggacactacagtttctacgtaaggatactgtcgtttccccgtagagacaccacaaattatccatagagtcaccccaattatcccatagctttgcacaaaggaatcaaggctttttctttgattatataacgtgttgcagatactttatctgcaacctatctgccacaggtatctgcaacgttccaactatttattaactagtgtattacatgcttttcgttgcaggtggcagatgtttttatgtttttcaactttatagtaggaaaaactttagcacttgaatgatattctaccaacaaaaagaaaaccctcataagtacttaacttacaagggtttttgttgggtggaagaccggactcgaaccggcgacattcagaaccacaatctgacgctctaaccaactgaactacatccaccatgtctgcgtttctctaacgcggtgcaaagatagatattatcttctaatctccaaaagattctgctattttttttcgaaaaaagtatattcttttattccctgattgtgcttgttgaagagggttcgcgcgtcattcgtgaagattttcagagagttacgtgcttgtaaaggaattgaatcaattgggaaattgacggggagtaattgatgatttttttttccggactgaatggggcgggctgtccagactaaactatactcgcaattattgagacggactgtgctgtcttttactaattccattcttaccatcagtccaccatcggtgcggcgggcggacatattggaaatataatttcccagtgaatagactacaagatgtttgtcgtttgtcacgctgtctgtgcgaacttcgatggattgaactacgtgaggatgggagccgatgacatgatttactcctttttgaatcagccagtcagcaaggaatttctgctctttgtccgggagcgactggtattcgattccccaatgcatacaagctatgattgcgtccggtttcattgctttgctctcttcaatatctttggcgataactgttgtatcaatatagttcacgatattgggaggagtaacggggataccgtttgtgccatacgtatagttgagcagggcgatgcggaacccgttcttttccaataaaagaggatatttcttgtcgcgttcttcggtgttgatatacgtgcctgcatgtggaattttcaacgagtcgataagttgaatggtacgctctagtccggatttgccacggtcgagactatgattgttggcagtcactaaaacattgaaacctgcgtcatgaattgcggtcagaaattcgtccggtgcgctgaaagcaggataacctttgtagggtttgcctcctaacgtaacttccagattggcgatagcgagatcggctctccctatttcttctttaacgtacgtaaaacaggtggaataatcatagccggttgaggttcgtgcagcgttgatttgtccttgatgctgcatgaggtcacctacgaaaaggagtcgtagggtatcagtgggggaaatactgtcggttgcggaaaggctgtccgacagggtatcgatgatagaatctctctttgcctgcgaccgggaggtgcaggacaaagagagaagtaaaatcatcagaaacaagctatgtttcattgataaatggctttcttgccagctaagagtgtatttttcattaacgatacaatcgtcatcggtccaacaccgcccggtacgggagtgataaaggaacattttggggcaacttcgtcaaacttcacgtcaccagtcagtttgaagcctgatttcttggttgcatccggcacacgcgtagtacctacatcgataactaccgcaccttctttcaccatttcggcttttacaaagttgggttgtcctagggcagcgatgataatatcagcttcctgacattcttttatcaggtctttgctgcggctgtggcataccgtcactgtggcatcgcccggataggctttctgcatcatcagggcagccatcggtttgccgacgatattgctacgtccgagtacaacacattttttgccggaagtctctatttcgtaacgtttcaacaattcgaggataccgttgggagtagcggatacatagcacggaagtccgatggacatacggcctacgttgatcgggtggaagccgtctacatctttacggtaatcaatcgtttcgattactttctgttcggagatatgtttaggtaagggaagttgtacgataaagccgtctacatcgtcgtcttcattcagttcgcgtactttggcaagcagttcttcttcggtcacgtcactttcataacggatgagggaggacttgaatccacatacttcacaggcttttactttggcagctacatacgtttcgctaccaccatcgtgtccaacaaggatagccgccagatgcgggcgttttccgccacgagccacaatttcggctacttcggctgcaatctcttgtttcacttgttcggaaatggcttttccgtctatcagagtcatattttcagagtatttattggtgatgggcaaaagtaaaataaataactgaactctccaaaaggattggaatttttgtcaggagatgagcagtatattatcagtttgttagtggagaaactactttctaccgtaggcttccggatacaaaaaaagaggaagtcgaaacttcctctttttttgttataatcagtttggatctattgaatgattatcttttcattttaggcatcatcttacccatcttgctgctagttaccatcttcatcattttgcgagtctggtcgaactgtttcagcaggcggtttacttcctgaatagtcgttccgctaccttttgcgatacgtgtacgacgtgatccgttcagtatttccgggttggaacgttctgccggagtcatagaatagatgatagcttcgatgcttttgaaagcattgtcgtcaatatcaatatctttgattgcctttcctactcccggaatcatggaggcaaggtctttcagattacccattttcttgatttgtgcaatctggctaaggaagtcattgaagtcgaattggttcttggcaattttcttctgtaaacgtttagcctcttcttcatcatattgttcctgtgcacgttctaccaatgaaacgatgtcacccataccgagaatacggtcggccatacgggcagggtggaattggtcgattgcttccagcttttcacctgtaccaacaaatttgatcggtttgttcactaccgaacggatagaaagagccgcaccaccgcgggtatcaccatcaagtttggtcagtaccacaccgttgaagtccagacgttcgttgaattctttagccgtgtttacagcatcctgaccggtcatggagtctaccacgaacagaatttcgttcgggttgattgcttctttgatagcggcgatctcgttcatcatctgttcgtctactgccagacgtccggctgtatcgacgataacgaggtcatatcctttggctttagcttcctgaatagcgtgttgtgcgatttctaccggattcttgctgtccagttcgcagtacatcggtacttcgatttgttctgccaatacgcgcaactgttcgatagctgccggacggtaaacgtcacaagcaaccagtaatggcttacggtttttcttggttttcagcatccgtgccaacttaccggagaaggtggtcttacccgaaccttgcaaacctgacatcaggatgactgccggacgggcgtcgatattgatctcggctgtctctccacccatcaactgtgtaagttcatcatgtacgatcttcaccatcaactggcttggcttcacagccgtaagcacgttctggccaagagctttttctttcactgtatccgtgaaattctttgccaccttgtagtttacgtcggcgtcgagaagtgctttacgtacgtctttcagcgtctccgccacgttgatttcggtgattttgccttcacctttcagaatcttgaatgaccgttctagtctttcacttaaattatcgaacatagttatttaattacgaattactaattacaatttacttgggcgaaagagggacttttccgtctactctttatttgagcttgcaaatgtacaaaaatctcttgtatttatatctttttattctgccattttgcttttttgagataaatataacttgttatcaacagcaagctataatacacaatctcaatcgtaaagcaaatttcgatcggtgctttcagccacattccgatgaaaatgatgtatgatccgtagatgataattgtaatcgtttcgagcaacagggctgcctgtgtatttcctgttccggagataccgttgaacaccacgttggctacggatgcgataagcatggcgcaacaaattacatataccgaaggtacggactccgtaatgagcgcagcttcactggtgtagatagagagcaggaactgcggaaacagtgccgataccgctactaaccccagcatgatgaaaaaggagaaacgcgcaattttattaatgagcggcatcacgtgctggatgcctcctgcaccaatagcattgctgacaagactgttggtagtcgtagccagtgcgttgaccggaatcagcaatacgacataaatactccggacgatattggcaatcgccagttcccgttgtcctaaccgttctacggctacgaagaaaacaaaccaggtagccatcgacaggaaatattgcagcatggtgaagcaggagatactaaggatccgcatcagcaatgcagggtcgaatgtgcgcaggcggttcataccgtatttctttaaatcgaccgtggcatacgtatagatgacgaaaaagagaatggaggaggcttctgccaatacggaagcaatagcagcccctttgatacccatttccggcaaaccgaactttccgaagattaatgcatagtccagtacgacattggttaatgccatgacaatggcattgatggttagcactttagtgcgtgtaatgccgatgtacaatgcccggaacatgacattgataaaagagaaaaagaatccgtaaatacgccagtccagaaactccattgttccttcgtagatggattctgaagaaactagcaaacgcatgatgtttccaccgaatgccttggtgaatccaaatagcagcagtgccatcacgaacaggaacatgactccctgaatcatgacagggccgacatctgaatagcggccttcgccattgcgtcgcgctatgacaatctgcgaaccggtactgaatccgaatgcgatggtgaatacacatatataaaataacccgcccatagccgatgctccaagagctacctcactcacgtgtccgaggaatgctgtgtcggtgacattgatgacattttgtgccagcaagcttagtagtatcgggtaactgacactccaaatctgtttgttggtatacataattaagcgtttaagtttacactttgcaaagatagtgctttatttcgattcggaagcgatggggtagatgaaaactatttccggaccttcgggagttttatcgttagttgattcggaatgaagcatgtctcccttacggcttaatatgaaccggatgattcgtgtttgccggtgttcttgggctatactagtgcgctgcttgcttgtaagtttgccagcgaaagaactaaaaagagtgaagatttctttgtcgtcttcactcttttttattatttattttcttttgagtatttctcgaactccaggaccttcgtggttggggtagccgggagtatggtttctgcatcgtggatcagcatctactttcaagcttcggtagtcatcttttgtgcgggtgatgtaatcatcaagcatggcacggtgttctgccagaactttactgtatttcggatctttggcgagattcttgcgttctcccggatcttttttcatatcatatagttcttctccgttgccttccagatagtgcgtgtatttgtatctcggtccgcgtaccatacgtccgggggtaacgacatattcatattcgctgtgccattcggaaactacataagggtgagtctttttctgtttctctccttttaatgtgggtgcgagactgattccctgtttttcgaccggaacggaaattcctgccaaatcacaaagggtaggcaaaagatccagcgtaggctgtgtcaatagttgatctaccggttttttctgttgtttgatgccgggacctgcaaagataaacggaacgtttgtcatttcatcatagaaactgatatgcttggtcaccatacggtgtgaagccattccgtcgccatgatcggccatgataacaacgatggtgtttcttccggcaggagtggagtaaagagcttttaatacactgtctacttgcttggacaccattttagtatagtgctggaaagcggcaatgtaatgacggtaattctcttcattccaatgagaggcctgggtcatgcggcgatggctgcaacagatgtattgcaccggtttggggatattgttccagtcttccacgtcgaagttggctggtagttcaggaagagttccgctgatggggcggtcggtatgtactccttcatttgctcctacgaatccgcaaatgttgtgagggttctgaaaatcggcaatacagatgaatggttctttgggagggttgcttaaataagcaacagcatcttcgcaggttcctacgtccaggaagctgtcgttattaaccgggaactccggatcagtgaatggtttggctaccggttctttgtgtttgaatcctcttagggagcccatgtcgtgtgtttttccgaagtgtacggcttcgtaaccgttttcggaaaaaaggcttcctagtgtcggtacattttcgggaatacgtgggttgataggttcgctggagttcgaacgtacattcgtttgatgaggcatcatgccgctccataaagctgcgcgtgaaggttggctgagagggcagcctacataagcattggagaagataactcctcgtgaagcgacttcgtcaatagggagggtgcagccttgtgtttgcccgtaagctccgacgacgcgttgtgtcaaatggtcgcactggataatcaggaaattgggcttttcttgagcttgggctgctacgccgcatagggctaatcccatgaatggataaatagttttcattactggttagaattaagtaatagttgattttgaaacaaaagtaggaaaaaaggaaacgcaaaaaagggtgaagtagtagttttggacgcaagtgaaagtattttgtacaaaaatgtaatgtgtgatggatgattagggggaactattgctgatgaacgttggattgtgaaggatgaacggcaagtggttattgattaacggggtggctaaaaaagagaacggtgaacaaactgcaattattaggacgcagtttgttcaccgttcatcatttatcgtttaccgctaattagctgttcatgctcatcaggaattcatcgttatctctggtcttttccaaacggtctttaacgaagtccattgcttcgatcggattcatgtctgcaagatatttacgtaatatccacatgcggtcaagagttgtcttatcaagcaacaggtcgtcgcgacgagtgctggatgcagtaatgttgactgccgggaagatacgtttgttggacaggttgcggtcgagctgcaactccatgttgccggtacccttaaattcttcgaagataacttcgtccattttagaaccggtatcgatcaatgcggtagcgatgatggtcaacgagccgccgttttcaatattacgggcagcaccgaagaaacgtttaggtttgtgaagtgcgtttgcatccacaccaccggaaagaactttaccggatgcaggagatactgtattgtatgcacgagccagacgggtgatagaatcaaggaagatcactacgtcgtgaccacattctaccaaacgttttgccttttccaatacgatacctgcaatttttacgtgacgttctgccggttcgtcgaaagtagaagcgataacttctgcattaacgctgcgtgccatatcggttacttcttccggacgttcgtcaatcagcagcataatcatgtaaacttccgggtgattggctgcaatagcgttagcgatatctttcattaagatagtcttacctgtctttggctgggcaacgatcaaggcacgttgtcctttaccgataggagcgaaaaggtcaacaacgcgtgcagacatggagtctgaataaccgcctttgcaaagtttgaacttttcatccgggaaaagaggtgtcagatgttcgaaaggaacacggtcgcgaacgaaagctgcgtcacgtccgttaattttcgacacttttaccaacgggaaatatttttctccttctttgggtggacggataacaccttccactacatcaccggttttcaaaccaaagagtttgatttgagattgtgatacataaatgtcgtccggagaagaaaggtagttgtaatcggaagaacggaggaatccgtatccatcctgcatgatttccagaacgcctactccgttgagaatatcatcgaattcgtaaggcttttcgcgttcaataaccttgcgctcctgctgttgttgctgttgtgccggaagattctcgttcgcatggttttgctgagtggcacgtggcatcggtaagcgttgttggttttgattctgaacctgattttgattattgttattacgttggaaattattattgttgttattagcgttattgctattattgttcacattgttattaccgttgttattgtcgcgtggacgaacaatacgcgggcgttgctgctgtgcttgctgctgttgagattgttgttgctgttgaggatgagatggctgttcaggtgctgtttgcacaggttctgttttagttgcctcgaatttgccgaagagttcggtaggaagctctattttttcagaaggcagatcttcgattggaataaaatcatcatcgtcaacgctggataagatattgctttcctcgtcgataacgggtgcggctttcttttgtggtttatctataacttttttctctgcaacaggcttgtttggctctgcggctggtttatttgtttctgcagccggtttgctttttgctttcttttcagcagtcggctgttgtgctggagcagctttttcttttgtttcagtagttttctctgcaacaacaggcttagtttccaccactttgggagcagccggtgttacattttctacttcttttttctcttctgcgtcagcgctcttgcgtggacgtcccactttacgcttgggagcagtagtagcgttttctgctttagcttctacaacaggagcttctttttctttgtttgtactttcttctttcttggaaggttgtggtgcttttacaggagtggcttcttttgttttattaacctctccactctttggtgtggaaactaccttgtcttcttttttggtaggagctacccgtgaacgctttttcttttgttcttcatttttgcgttcttctttgagcttatctgcggcaactttcttagtagctcctacaatagcctgttcatcgagtatcttataaacaaggtcttcttttttgtatgagtctgctttttttatgcctaactctttggcaataacttgaagttccgacagatttttgtcgtttaattggataatgttatacatatagtatggtaagttattaatatttctttttttgctgaattacggacagcattactacagcttatggctacagatatgcaagcatacgttttgttttttattctgaattagggatgtatatgttgaatcgtagaatgtttcaacggggcaaagataataattttttttggtttcatgaacaatcaaacatttttttccacgtaaaagtgtatctttgctacataaaagaaaatagtatgacagtaaatgaagctcatttaatttatttttcgcctacacacacatctaaacaagttgcggaagcgattgttcacggtacgggcataaaaaatatccttcctattaatgtaacgcagcaaattgcagatgaaatcgtgattcctgcatctgctttggccattattgtagtgcctgtgtatggaggtcatgtcgctcctctggcaatggagcgtttgcagtacatccggggagtggatactccgaccgttttggtggtggtgtatggaaaccgtgcttatgaaaaagctttaatggaactggatgcttttgctattcctcatggattgaaagtgattgctggggcaacttttattggagaacattcatatagtactgataaacatccgattgcggtgggacgtcccgatgagtcggatttagcctttgctacggaatttgggaagaaaatcatggaaaaaatacaggctgctgatagcatggataccctttatccggtagacgtacgtgctattaaacgtccgagccagccattttttcctttgtttcgctttttgaggaaagttatcaagttacgtaaaagtggaacaccgcttccccgcactccttgggtggaggatgaaaatttgtgcacccattgtggattgtgtgtggtccgttgcccggcaggggctataacgaaaggggatgaactgcatacagatgaagctaaatgtatcaagtgttgtgcctgtgtaaaagcttgcgttaagaaagcacgggtgtatgatactccttttgcggctttgttgtcagattgcttcaagaaacagaaattgcctcaaactattttgtagattacgacacgcttagttgtttcatcaatacgaaagcggttgtctgttcgttcgcctatcagccacgcaatgtgttcaccacagcagagtacccactggcgttctttttgactgatagaaaatttgcggtcggtcagataatcgcttatttttttctttcctttcattccgaaaggaataaaagtgtctcctgtctgccatttccggtaatgaatatctccattcagtttgtcggcatcaaaacaggctattcctttgtcgcgtggaattaggaaatcaggggtgtattctttttcttctttgatgatttgaaaaggaggaagaatttcatttcccgattcaatagcttctattaataagaattctctgtcttttatcactctccattttttactgcaaaattgtttgcccggttggctgtgaagcgaaaaggcaatatctttgatttgtgcagaattgaagcctagaggatgcaagatttcgaatagaatagcttcgggtgccggttcctttactaactcactgattcggataccttctgtcgttacaatattatttttgctttcctctatgcatttattatatatggtagctacatcattcagataattgctcgtgtctatcagattctttttgactgacggattgatttcctgtataagaggaaggagattgagccggattttgttacgggtatattcgtcttccagattggtactgtctgttacataatcttgtccgatgctctccagataatgaatgatgtcttcccggttgacgcaaagcagaggccgcacgattgctccgttgcgggggcggatccctaataaaccggtaattcctgtacctcgaatcagattgagtagtatggtttctacgctatcatcctgatgatgtgctacggcgatcacatctgcctggcattcttttctcgttttctcgaaccagtcatagcgtaattcccgtgcagccatttcaatcgaaatctgtttttcctttgcgtattgtgtcgtgttaaaatcaattgtatgcaaatggattccggttcttttgcaaagttggcggacaaacagttcatcccggtctgattcttcgcctcgcaggtggaaattacagtgtgcggcttcgcaatgataacctgctgtgtgcagaatacatagcagtgccaccgagtcggcaccgccactcaatgcaatcaggactttggcatccagtgagaacaaatgttctttttctatatattttgtaacgcgttgttgtatcatatctgcaaagatacgagtttatcaataagtttttttatttttcctaaatcttttggaggaagaaaatggctgctatttaaaaacattctaaataatttgcgtgctccgaagttatgaattatctttgccgaaaattttgagagttatgcgtttgtccgaattaaaaacaggagaaaaaggtgttattgtaaaggtattggggcacggtggttttcgtaaacgtattgtggagatgggcttcattaaaggtaaaacggttgaagtgctgttgaacgctcccctaaaagatcccataaaatataaagtcttaggttatgaaatatctcttcgtcgtcaggaagctgaaatgatcgaagtaatcagcgaggaggaggcaaaagaactggctgaaaagactgtttatcatgaaggattacccgaagacctttcagtaaaagaagaagatatgaaacgattggcgttaggtaaacgtcgcaccatcaatgttgccttggtcggaaatccgaacagtggcaagacttctttgtttaatcttgcgtccggtgctcatgagcatgtaggcaattacagcggtgtgaccgtggatgccaaagaaggttattttgacttcgaaggttatcatttccgtattgtcgatctgccgggaacttattctttatctgcttatacgccggaagaaatctatgttcgccatcatattatcgatgaaactcctgacgtgattattaatgtcgtcgattcttctaatctggagcgaaacttatatctgactactcaattgatagacatgaatgtccgcatggtagtggctctgaatatctatgatgaattggaagccagtggaaatacattggattaccatttgttgagcaagttgttcggggtgccgatgctgcctactgccagtaagaaaaatcgtggattggatacgttgtttcatgtagttatcaatctgtatgaaggagtagacttcttcgataaacagggaaacatgaatccggaagttctcaaagacttgactgaatggcatgactctttggaagaccgtaagaaccatgaggaagagcatctggaagattatgtgcgtgaacataaaaagacggggcgtgtcttccggcatattcatataaatcacggtcctgatatagaaaaagcgattgaggctgtaaaaagtgaagtgtccaagaacgagtttatccggcataaatattctacccgtttcctctccattaaattgttggagaatgatcctgacattgagcgtattgtacgcacattgccgaatgcggatgaaattttccatgtccgcgacaagatgtcgaagcgtgttcaggagacaatgaatgaggattgtgaatcggctattactgatgctaaatatggatttatcagtggtgcgttgaaagaaacgttcacggataatcatctggaacaggcgcagacaacaaaggtactggattcgattgtaactcatcgtgtctggggatttcctattttctttctttttatgtatctgatgtttgaaggtacatttgtcattggcgaatatccgatgatgggaattgaatggatggtagagcagcttggtgaattgctgcgcaataatatgtcggaaggtccatttaaagatctgctgattgatggaattatcggtggggtaggagctgtcattgttttcttaccgaatatcctgattctgtatttctgtatttctatcatggaggattctggttatatggctcgtgcggcttttatcatggataagatcatgcataaaatggggttgcacggaaagtcgtttattcctctgattatgggattcggatgtaatgtgcctgcgattatagcgtcccgtactattgagaaccggaagagtcgtctcattaccatgttggtgaatccattgatgtcttgtagtgcgcgtctgccgatttatttattgttggtgggtgctttcttcccgaacaatgcaagtttggtgctgttaagtatctatgtgattggtattgtgctggctgtggtaatggctcgcttgtttagcaagtttctgataaagggtgatgatacgccgtttgtgatggagcttcctccttaccgaatgccgacagcgaagtctatcttccgtcatacatgggaaaagggagcgcagtatctgaaaaagatgggcggaattattatgattgcttctattattatctggtttctgggatattatccgaatcatgatgcttatgaaacggttgccgaacagcaggaaaattcttatatcggtcagttggggcgcggaatagagccggtaataaagccattgggatttgattggaaattaggtattggcttgctttccggtgtaggggcgaaagaattggtggtaagtacgttaggcgttttgtatgcagatgatccggatgctgactcggtgagtttggcagaacgtattccgattactccattggtcgctttttgttatatgctgtttgtattgatttacttcccgtgtattgcggcgttggcggctatcaaacaggaatcgggtagttggaaatgggcgctttttgctgcctgctatacaacggcattagcttggcttgtatcatttgctgtttatcagattggaggattgtttgtatgaataattggcaagagtgggtagtcggagtactcgttgtgctctgcattgcccgtgtcgtatatggaatatttcttttttttcgtcgtacgcgggaaaatcagaatccttgtgacagctgcgtaagtggctgtgaactaaaggatatgatggagaagaaacgcagagagtgtgatgtaaagaaaaaaagtacaaagaaaaattgctgcggatagttggtagtttcaaaatttgtactacctttgcaaccgcaaacgagaaataatggttccttggatgagtggcttagtcagcggtctgcaaaaccgtgtacggcggttcgaatccgccaggaacctcaactatcactttaaagcccttgaaagtcaagcactttcaagggcttattttttacggagaccgtttcggggaccacttggaaattattgttcctgctgggtgctctcgtcaattcctgcattatggtatggtacaataggtactgtgtttaattctttattttaggcttttccctatcgacaattatagtattcactagttttttatgattttcctgcgttacttttgttataaaccaaaagaaaaacgccatgaaaaagattttatttatcctatttgctacccaatttattttggctccttatataataaagagctatggtgcaaatcttattgaagacaattatgagtattctggagttaatcaagagagaaagactgtcgaaaaggatatctttggaaatatcatcattcgtgatgataaaggcaatagaaagaccattgaaaaagatatttttgggaatatcaccattcgtgatgataaaggcaatagaaagactattgaagaggatatttttggaaataccatcattcgtgatgataaaggtaatagaaagacgattaaaaaagatatctttgggaatactattatcgaagatggcaaaggcaatagaacaaccattaaaaaagatatttttgggaacgaaataattgaaagtagtgatggtcatagaaaaattatcaaaaagggtatttttggaaatacagttattgaggattattaaaaggttatatttataaggaggaaatgtatcagacttatcttcttgtactgatttagggggtagatcgattaactgataatgtgaaattaatggtgatattaaagaaatatttatgatctttgtacccatgaatatcggaaattagttgaatagattgatgaatcgtataaaaggtatactttatgcagcggtgtcttcctctacttttggactggctccgttcttttccctcactttattgttggcaggtttttcagctttcgaagtgctttcctatcgttggggagtggcgacaattgcgttgactctgttcggatggtgttcgggatgtagttttcgattggaaaagaaagattttttagttgttcttttattaagtttgttgagggcagttacttcattcagtttgcttatagcatatcagaatatagctaccggggtggcgtcaaccattcattttatgtatccgttggcggtatctctagttatgatgtacttctttcaggaaaagaaatccctttgggtgatgtttgcggtctccatgtccttgttaggagcggccttgctttcatcgggggaactggaggcgaaaaatggtgatacgatagtcggactggtagcagcttgtgtttctgtgttttcctatgcggggtatattgttggcgtacgaatgacacgcgctgttcgaatcaattccactgtactgacttgttatgttatggggttaggaaccgttctttattttataggtgctttgactacttccgggcttcagctggtagctgacggttatacctggttgattattttgggacttgcattaccggctacagccatttctaatataacattggtacgggctattaaatatgcagggcctacgttgacatctattttaggtgcgatggaaccattgacagctgtggtgatcggagtttttgtgtttaaagaattatttactctgaatagcgctattgggattattttaattctgttggctgtgagtgtggtaatatttcgtaaacaaaaaaatgaaagagtataaataaaaaaaatgctgttttacctgatcggataaacaacatttttataggagagcctcttgtcggattcgaaccaacgaccccgagattacaaatcacgtgctctggccaactgagctaaagaggcgtttttcttttgcgggtgcaaaggtatgaatttcttttaaaaatgcaaatacatcgcatactttttttatatttgcaaagttaccaatgattagatgaaaatgaaaattatgaatgtatgtggtatggcgattttagccataggtatatgggcttgttccggacagaaaaaggggacggcaaatgtagaagttgcaacagatagtgtagaagtagctgcagatgctatatctgttcaggcagatagtacaggatatattgttcgggtaggagagatggctccggactttacgattaccctgacagatggtaaacaagtgagtctatcttcccttcgtggtaaggttgtcatgttgcagtttactgcaagttggtgcggagtttgtcgtaaagaaatgccatttattgagaaggatatttggttaaagcataaaaataatgcagactttgctttaattggcattgaccgtgacgaaccacttgataaagtattggcttttgctaaatctaccggagtgacttatccgttaggactggatccgggagctgatatttttgcgaaatatgcattgcgtgaatccggaataacaagaaatgtgttagttgataaggaaggaagaattgtaaaactgactcgtttgtataatgaagaagagtttgcttctcttgtacagaagattaatgagatgctgaaatgaaagaaagccttcattaggcatttctgacggagcatttatgagcatataaaaatagtgacgctatcctgatgtgatggcgtcactatttgggttatatagtgacgctatccggaacgcataccgtcactatataataatgagcttttcaagcaatactaagtttgactaggtaatcgtaatgttttccttctttcaccagttctgccttaaaaccacattcggaagcgtataagctaagagtctggaaatctacatataaccagtcgaatgtgtctccttttacatttttatattgcatttggaagtcgatctctccgtaataatctccggccagatcgatgactatgctgccgtcttcttcttcaaaaagatagcgcaaatcgctggaatccatgagtatgcatccgccgggacggagaatacgtttcattcgttggaagaatccgggcatattattcagtcttccgataattccggaaccattcataagcatcaggatcgtatcgaatgtttcggtaaatgtttcgtcaaaaaggttgatgaggcgcggctcgttcactccgcgttgttgcatcacttcgacggataacggagaaatatcaatggcacacacttcttttcccatttcctgaagtgccagtgcatggcatccgcttccggcacctacatccaatattcgccctgtagccatttgtagggcggtacgctctagtataggcatagactgtatactacggaacaattctttgacaggaatttcatcttcttcgaattgggaagagaatacccgcaaacgatcagctctgtgatggttgaaataatcagaaatagcggctcccatcgggtccttttctgcagaaagagttgttgttgccattggtggttacgattgttaactctgcaaagataaataaatccgcagaaaagggttatctttgccgtcggaaatgttgaatactaataaatgattatatgagtatagaagaagcaatcatgggtggaatcgtttttaaaggtaagaaagataagcccaaagaagaggaaaaagtgaagacgaaagcgaaaaaagcgacgtatattcgtggacagcatggttcgggtgcagcgaagatgaaagcagatatccggaagaagagagctagccgtcataagaaataaaagtatggttataaatataataatttgtgtagtatctgttatacttatgttgcggggtgcttttttaattctgaaaatgggactcttgtggatgcttcattgcaggataataaaatcgtatgacaggaaaacacatggaaaggtagtggatatagagacacaggtaaagtctgatggtatgaatattactgatgtatgtataccaaaaataaaatataaattggagggagaagacgaaaagtgttgccaatttcttccttctaatctaaagagtggagaggaaaataacatttatctttatccaaaacagtatcatatagatgataaggttaccatattgtatgataaaggtaaggcgaatgatatgtttgtgttgcccagaatgcaactaatgaggctgcttgttaaccaatttgttcctggttgtttttttatactggcggcaattttaggattatgctttgttttttagaaacagcataggctgtccgaaaagccttagaggaatattatagagtagtacaataatagtagagtcaaatcaaggttaaaagggaagagcccgatgcaaaaccggactctttatcaatcttgttaatttttagagacatttgttgaatatctctgcctagcaatacaaaaaggcaactaattcgcagtgaattagttgccttatcttttttatttattgaagtccctttttaatctgtttagctttttagggccactccaaattgtagtaagggtgattttttctttttagggacttttgagacgacctctcttacttttgtggaagtacctcaatccagtaatcgtccgggtcattgatgaaataaagccccatggccgtgttctcaaaacatacacaattcatttctttgtgataagctctgattgcatcgtaatcgccggctacacgaaagcagagatggctttcgttttcccccagttcgtatggagcagtatgatctttcaaccacgtcaattccagcaagaaacctgtttcgttatcagtcaggtagactaacgtgaacgagccgtcagatgcttccttccgatgatgttcttttaagccgagtgctttttcataaaaagctatactccgctccagattagtgacgttgatattaaaatggtcaaatttactttttatttccattgttgcgattctccttattttttcattaagagcttcacgatttctccaacatacgtgcgcggttgtccggcttgcggagttgtttgtgaaggcattttcttacattcgataacagccgaaggtgttgtttggttcggagcgtacaactttaatgtatagctatctgccttttctattgcatcgtaagcttgatcgggtgaaagtgtgcaataggcaactgcttttcctgattgataaccaagtgcgccaccagcatttgcagtcatattggtcatgttgaactcatcttttccgatgctgattactaattttccgcttcccatcaaagcatatacttcacccgggatttgtttcaaatcaatttctatataacccggcatatcagcggaagccttgcctgcaggagtagcaggagtgagagttgcagcaggaacagtggtttgagcaggttcgccagttgtcacttttatatcagtctttttatctgcgccaccaatgacaatcggacctgcggctgcaacgattgatggagttttttgctcttcttctttcttctttttctctgttttcggacgggtgtcaggtgctccgaaagctaccgctacatccatgaatatatcatcggcgaagtctacagtttttctacgccatttggccaagccacgtactaatttagtcttagctttattgagcgcatatttatcagtaatccattcttcggctttatatttttctgtttcacgataagtaaaacggattttttcaagctctaccaggcagtttccgggtttgcaggtaacggtaatctgatagttaactaatgtacggtctaatgacagggcactggaatggaaaacaatccattcttctccaataccggcaattgttccttttacttcgtcggagaaaacaatgcggctgtcggtgtttttattctctttcagacgttcatccatccactttgtcattgtgtcgtagatttgtgcctgactcattccgggaatctggaactctttggaaaatactactttaccttctacttcaggaacggctcctacaaggtacctggtgtcatctttcttctcttttgcagaatctgccttcattgccatcggcaatgcgagaaacatagtaagaaacagaatcgtaaatttattcataattataatgtgtttatttggtaatctcaaaactttcgccccgacgggtgatgctgataaaacggcatcctgcattttctgcaaaactacgaagcgcatttcctccttcataatcttcactgaagtgcatgggcacaaatatagtagtttttatttgttcgatgaactgttttgcccctttcatataatcttttcccattctccgatccaccgggaatagcactagatcgatgttaggcactttttcttttaaatatttaacttctgcaaggaaatcaccattggcttttcgtatctcttcttcggtcgattcttcactccaatgccagttgttcaagtcgccggcatggaagatactccaatcttgtaagtgaagaaggagcgaactgccgacatctgttgatccgaaggcgtcgatgcggatcgtgtcgtcttcgtaggtttctccttttttaatatagaaagcatcttcggctttggcacgatgggacttcagaatatctttggagaagatgtattgaatgtcggggcgttgctctttccaagtcaatatttcacggttaaagtgatcgggatggaaatgggtggccaatacgtacagtttacccggcctttgcaggagataatcatgcacgattccccggttgtgttccgtttcggaagaatctttgtagtaatcgatgataatggttacaccttccatttcgatggcgaaaccgctgtgataaatataatccagtgtcatagctgactattttatagttgcaatattacgtattctcgttggagttgccaagaaaaatcgacgaaatcaaggagcaagacgactgattttccattcaccgtccggttgtagggtgtatagaaagcggtcgtgcagtcggttggggcgtccttgccagaattcaatccttgtaggtgtgacggcatatccgccccaattatcaggtctttccacttcttttccaatccatcgggcggcttctctgacgaaggatcgtatcaattgcattctgcttgttatcggttgactttgcggagaaattcgtgcaccaatccggcttttataaggacgcttccggaagtattcatccgattctttcggtgaaactttcgttgctattccttctatatgtatttgtctttcgagggcgtgccagacaaaagagagggagatatatggattttgtgccaattgtttgcctttgcggctttcgtaattggtataaaagataaattttccatcatggagtccttttaacaatactgtacgtgtggacggttttccttcgggggatacagtccctacaatgaccgcagtcggttcgtccacctctgcgtcaatcgcttcttgcagccaacgactgaaaagcgaaagcgggtcgccgggaagttcactttcccgcaacccgcctttcgtatattcctgtcggatatctgctatgtttaatttcgccataagattatctggcagctttagtttattatttttaatgatgatatcacataggtacttctattaatagaatatgtgagtctttcaatgtctccagttcaacgctgttcgtatcgtaaacacccatgccgtcacgacgtttcagaacttcaccgtctactactatttctccttcaatgaggaagatatagacgcctgcatgactttgatgcatgtgataacctaatttctttccggcttctactttgccgatggagaaccaggtatcttgcaaaagggaagcaggtgtgctaccgtcgggagatacgatgactgccagttcgttcggacgttccagttctgtaatgctaaaatcctgataaacgggacgggtattccgttctctcggcataatccaaatttgcaggaattccaccggttctaccggacttgcattaacttcactatggaagattcctgttcccgcactcattgtctgaatttctccgacagtaataatgcggctgttcttcttgctgtctccatgctgcagatgtcctttcagaggaatggaaatgatttccatattcttatgcggatgagtctgaaaaccttgtccgggcgcaaccttatcatcattcaatacgcgaagagcaccaaaattgatacggtcggagtcgaagtactcgtcaaaactgaaagtgtgataactatccagccaatcatactgggaatgtcctcttgtatctgctttatgtattacttttttcataaaaactgtcctttctcttatttgtttatatgtttggtaaacaaagaaagcggcttaaaagttttatttcttcacttcatttaataaaggcttgtgattgataaaatcttttatgttttgcagggtggttgcggcaatattctccattgcttcatgtgtgaaaaaagcttgatgagaagtgacgattacattgttgaacgagagcaaacgggcgagtacatcatcgtcgatgatgcggtcggattgatcttcataaaagtattcgctttcttcctcgtatacgtccagtcctgcggaacctatttttttgttcttcagtccttcaatcagtgcattggtatgaatcagttgcccgcgaccggtattgataatcattactccgtctttcattttgctgatagagtagtcgtttatcaggtatttggtctcttcagtgagcggacagtgtaaggagataatatccgaattgtggtatagttcgtccagtgaagtataaactatttgttcttgacgggcgaagttgtagtccggatagaggtcataagccagtacgttcattccgaatccttttaagatgtgaatcagtattttcgctattttccctgtgccgatgatacctgctgttttcccgtgcatatcgaatcccatcagaccgtgcagggagaaattaccgtctttggtacgccaggaggcgcgaggtattttgcggtttagcgatagcataagagctaccgtgtattcggcagtcgcatagggtgagtaagcaggtacgcgtacaacggtaattcccgcag

SEQ ID NO: 8054 - DNA, 84427 bp, Unknown
  gut microbiota DNA sequence
cctaagcatataccgtcactatctttttaacgttcgagttacttattcaaagctttcataagctcttttttcatggtgtctactccgggaaatccagtttgcttgaaagtaatattaccctccggatcaacaataaaataagtgggaactccccggatattgaagctggacatcagaaaactccattgttcatttgtcacacggaaatgctcaccatgaatgtcggtaatcatattttcccaagtgcctttgggtgaagtttcgcctgtgatgtagaggtagataatatccttgtcttttaattcctctttcattggagtaatggctttattggctgtgcgacaagggccacaccaagttgcccaaaaatcgactaacaacgtgtgtccgcggaatttagagataatggatgggaataagtcctcattggagacttgtcccgtctcgtttacagtgaagcctgtctttcttttgtttaattcaattttctttattatttctttgttcgtttgggtaagcatctctgcgtatgccggggaagaaaaagtttttagttcggcattctgctctgttgttaacggggtaaaatcctttatggattgatacagcttattaaatttaatgttatcgaataaggctccctgtcccgttcccagtgtctctttaagtacatctaaagaatttggcagaaaacttatcaagtatattgttgatgcgtaatatttaccgtatagcgctttcagagtgttgatagaagtgaactctttcaatatgtcatagtatcctgtaggaatatcaatgcgggtattgtagaaatagtcgtcagtctgttctttattcagtttattaacagcgatatatgctgattttagttctctctccgtcatggcgattttaccagtcgctgccagatctacctgaatatttaatagctctttacacgcattgctgtatggggattgtgcaatttcttttcgaatggatggaagacgctccaatacataagccttgtattcatctgcgcttttcccggcaatgtcgttgtacatatccatgtaataaacgcttttcaatacaatatctatatctacggaagctaattcttgttgcagactagccagataaccattaaagtatacaggttctccatacgttttatcctttttttgcagatgcgcctgtctacgacatagttcctttgtattgatgatgagcgatgtctcttcgttgggagctatcagacactcgatccagccaaaaggaagttctaatgctacacttgtaacggacgctactttgacctccgcctgaaaagtgccgtcttctttgatctttatgatattctgttcgttgtggacattcaatgcagggctttctatatgcatcttcatttgttgcatcatctctttctgatagtctagtatttttcctttaagtgtagcagtcccataaaccaactttggagtaggcaatatcgctttcttgtttattttgtgtacgactgcttctttggggagtttttgtttatagaatgtatctttgtctaattgtattccccatatcttataggccccgtcgaagtccccttccgagaaatccagactggttacattttcaggtattgggggaaataagagttgaaactccgcttctcccgattccggcatccagaattccttatccaatgtgattccaactccctttcggataggataaagcattccgttattatctttcagaaaactgcctgttgctattttaatccagtatttcggacgataaaaagcctttatatacactgttgttacggtatcactcatgacaattttatcaatctcaatactattggagctccatgctagaaaaggaggccgctcgataactctgtctttggcttgtatggtgcagattgtgcagaatattaaaccgataatccatgcgaatcttttcatgtgaataatgttttattacacgaacaaatataaggatctttttataactatccttgcgaaaagctgaaaaagaaatgacttttttcagcaccggggaaagatacgtccggcaccgggaggagagagttccccaccgatgaacgccccgttcctcaccgatgaggaaagggagcggtatcggggaagttatttattgtaaccggaacgtgatagggagggtatacttaacagggacagcctgtcctttttgcattcccggttcccatttaggcatgtttcccactacacggatggcttctgcatccagtgacggagatacgctgcgtaatacttttacgtttgacaaactaccgtctgttccgataatcatttgtatgattaccctgccttgttctttgtttttttgagcaatgacaggatatttgatacttctagcaagataacgcatcaacccggcttgtccctccgggaatttgggcattgtttctactacagtgaaagcctgatctgcgttttctcctttcacacctactgcaccgggagttgaatcttcctgtggaccgtatcccactacaactacttcgtccagatcagactgtttgatctcttccgccttgggtagttctggatcggatagtctgaaagcaacgggaactgtaaatcttacatttactgcttctcctctttgtttgccaggttgccatttaggcatggcagcaatgacacgcatggcttctttgtcgagatacggattgacacttcgttctacttttgtgtcagctatacttccgtcctttttaacagtaaagcttacaattacacgtccttgtgcaccgattgcatgtgcttcagccggatatttgacatttttagacaagtaatccatcaatgccttcatccctcccggaaaatccggcatttcttctacaacctgaaagacaactgaatccggtacactcttgatttgtgtttccgttacttcctttccttttgtaccttgcggaaggctgatttcttgaatttctcttgtagaaagttcgggaatatttgtggtttcagcttgcatggcaacttcttccgttacttgtcccatcatttcttttgcaaatttttcagtagtacgtgctaccatttcgatgttactgacaatcatcaagatgccagctaagggaagaaacatcagatatttggttcttcctatttctttcgttcttcgtttattcatcattttaatacgatttttgagtggtaaaacattgaaactatttgataaatttgctgcagccttgtgatgtgccagtcccaataagtggtactggtatgatttactatcatgtcccgtttctaatacacgatggtctgccatgtattcgaggtttcctctgacctcccgtttcattaaccagataaatgggttgaaccagcagaatatacacattatttcgctgaaaagcacatccaccgagtggtattgtcgggcatgggtctcttcatgcgtaatgatttcactgatttcagattccgtatgtgattgcgggtgtatgaatatccagtggaagaaagaaaaaggacctgtttctttttttaatagatgtacgcgtactccttgtatattgctttttgagcattggaaatgcaatcggatgatgctacccagttgtacgaagaaacgtgcggtaagtaataacattccgctccaataaataattttagcgaactgcgtgataacctcttgccaatttatgacagtcgcttgtgtaggagtcacaacttgctccggaagcaggatggttgcataaagatctgccattgccaccattggttcgtgagcttttatccatccctgaatattcagtaaaggataaagcatggagatggcaaagaaacatagcaaagccatcctacgccaatggaagaaggtgtctttatggaaaaacaaccgatagaatgcatagaacagagctatcgctacatttatctttagaaaataagctagttccggagtcatggtgatgaatgttttctattaattttcttttcctttttcaatgagttcgataatatctttgagatcatcggtcgaaattttctggtctttggcaaagaaagaaaccatttctttgtaagagttctcaaagtagttacgaactacgccactcataaaatggcgtttatattcattttcgcgaatggcaggagtatattggtaggtattacccacacgtttcggtgtgacatatcctttccgctcgaggttctttacgatagatgctactgtggtataaggaggtgccggttgcgtatactttgcaacaatgtcttttacgaaacagcattgtaactcccaaatgtagatcattacttcttcttcttgtatagttaacttttccatggagatgttgtttaattacgaatacttcgcaaatctacgaatatttcgtaaatgagcaatagctagtcggttaataattgtaaatgtataaatcttgcaagaatattttaattgcattgttattcggaaattatttaagcataaaaaaagaccggatgaacattatttttttctatatagtcactctttaataacctttatgcaaaaaatagactatcaaggatttttttatataaaataaatgaaatatatttgcggctacaaaacatacgttaaatacggaagggtgtgtttcaatactttaaccggttgcgaataattccccacacttcaaacagaactattaactaacaatgccaaccaaagggaagaggaaggcaaactaaaaaatgaatgatatgaaaaaaggtttgatttttgtgctatttgcacttgtttctatcgtttcttattctcagatttcttggaatgccaaagttggtatgaacatgagtaactttactggggatatggatactgacatgaggattggattcaatgtaggcgttggcatggaatatcagttctctgatatgtggtctattcaaccttcgttgatgttcactcaaaaaggtgctaaacaggatgaagtgaaaatgaatccaatgtatttggagattccggtattggctgctgcaagatttgcaattgctgataaccagaatattgtagtgaaagctggtccttattttgcatttggtattgctggtaagtgtaaaattggtgatgaaaaaattgatttctttggtgacggtgatgatcaatttggagcaaaaagatttgatgcaggtctcggtgtaggcgttgcttatgaaattaataaattctttattgacttatcaggagaatttggtttggctaaattggctgatggtgacggtgcaccgaagaacatgaacttctctatcggtgtaggttacaagttctaaacttattatactctctttataatatctctaaaatccctcgttctatactctcttggaacgggggattttcatgttcttatttgaaaaaaacggcatatcccattgaaaggatacaccgttaattctctctcttgtaattcttactcattaatcacttatctgcttggataagttttctttctcttttaattctttgtatcgctctattgcatgtttgcggctcattagtatttgccagcggtatacccaacaagtggtaaggaaataaatgccggcttgcaaccataaagctttatattcaaaagctacttcactaagagtagctcccatattattgatttttacaaagccgttaattccaaaggtagaggggaagatgtaagatacatacttccaaaacgggggaatagctgctcccggccaagagattccggaaataaataacaaggggactgacgtgaatacaaaaatcagcatacacgtctcccggttgcggatagcaatggaagctgtcatggcaaagaagatacaagccgcaaggtaggggacaacaaataatactaatgaactgggttgtccgatctggttgaggctgaacaatcttggaaccacataaagtacatagaaagctactaatatataaaccaggaaataactcaagccttttcctaatacaattcgcagcgttccgttgtaatggcggttaataggcacgagatccttaaacctgttattttcacgagctgtacctgcagcgagaccgatgccgagtaataatgtttgttggataatcaataccaatactgcaggaattaggaaagcggcgaatccggcagtcgggttgaaaatggaaatctcttcatattcgatcggataagcggtgatttcatcttgacggtcggtcgtgtttccgctacgtgcaattttgatatccctgttcatatccagagaaacggcagtgttggcaagaagcattgatttatagtataacaatccgctcatgtcgcaatagatgctcacttgtgtctgttttcctttggcaatattgtcactaaaatccgaagggatataaatgataccgtatgcacgccggtttttcagcatttgtttagcttcttccatatcggcacagtaggagacgatttgaatatcgggtgtagcatctaccttgcggagatattcgcggctaagagatgaatgtgaatcatctacaacaacagcaggaacttcacgcactacttcgttatcatagatgaaactatatagcaacggataacctaacgggacgagtataaagaatatcagtaccccctggtcgcggaaagttgtctgaaactcccgtttccagatataaaacaggtcattgatgccttgagctatcttatcttttaattttatatctttcatttagggtatatatttatagtaaaccaatgcttccttcaggcggtgaaccacgaagaaggggagcatcataaatattaatagtgccatatagttggtccatgagtaagccatactatatccgttgagcgcctgatccacgtaaataaggaaatagtgacgcaaaggaaatagattgctcaaagcctgtaaaacaggatgcatagccatgaccgggaatgaaaaaccggaaatggagaacgatatgactccccacagggaagcaaaacttaatccgagtcgtagagtcggcagggttcctatcataacaataccacaacattgggatgccagtacaagacagagcgtggcaaatatcatcggaaatataccgctgttgcaaggaaaatgcaggaatccatacaggtatacattatagaatatacccatgatgaaaaagattacagtgtggggaagcaacttcccggccaatgcaatataaatggagttgttactcattcgtaaccattcgcgagccgtacgatctttgatttctacaccgattgaatagacagttaccataaatattaatagcatgagtactcctggtatcagtgtattgcataagtataccgaatagttcagccacggattattcagtgggtgtgtatcgataacaatcggttgcagatatgccatagcttgatcctctgttgcacctttggcgtacaacatggtccttgcagcagctcccgaagtgagttctcccatcattttcatatctctgaacaatagggaacctgcgatcagataggagtaattggtgtagaaggagattgtcggttgtcgttggctctgtgcctctgccgataaacctttgggaaggtagaagaatccgtagatttttccttcttgcatggcaatgcgtgcatctgtcacattactgtaatgagctacaacccctgtctgtgaaaaagcatccaggttgcggacaatattacgggaagtagacgaatcatccatatctactactcccgcaggaagatccttgggaagtcccgaatccattaaggtggtgaagaatatatagcaaaacagtggggcaatgaccatacagaagaggtagagcgggcgtgaaaccaaccgccggcactctctttgcatgacctgccacagggctatatatttcttttctctctctctcatgattacttgtcaatgatgacagacatacccggacggaggttttccactttctctatcggagaagctttcacttcgaatgttttcaggtcgaactgtccggttgttttggttgctttccaagcggcataagtccctaagtctttcagataatatactttgagtttgatctttttgttatccagagcaggaatgactgcttcgaattctgaacccattgtcagatttttgagcagatcctcgcgtacgttgaatgttacccacatatcgttgagctcggcgatattcatgataggagcaccagtacctaccaattcgcctaccttcgggaaaatctctgaaacttctccggcagccggagctatgagataagtctcctttatgtacgattctacttcggcaacagcaccttttgcccggtttaccaaagcttccgcggccatcttgtcttcacgttccgctccgttctttgccatagtatattgcgctttggctgctttctctgtagcaatgcttgcatcccgctgcgcagtgacttcatccaatttctgtgcaggcattactccctgctcatagaggttctttacacgttgatatgatttttcggcaatggtgacgcctgcttgggctttttgccacatttcgtatgccgcctggatttgttcctcacgcgcgcctttgattgcttttgcgttttgtgcctgtgcggcagcttcggcagcacgtgcctgttccatttttgccactacgtcaggagcttccaaaatagccagcgtatctccggcattgacactttgtccttctttcacgcgaaattccaatatacgtcccggaactttgctcgaaacgcgatactcggtaacttcagcctgtccctgtatgatttcaggacctttgcgaagcatgaagaagccaacgactgcaacgattgcaataactcccagtagagtaaggaatgcaagcagcatattgctgttttgtgattttataggtgccatatgatttatgaattatgatttatgttttatggtttatggattgtgagttggttagggattgggttgtttctgattgggttctttactttatttttctgctttttatttatttcagtgttcccagagatttcttcagatagatttctgttaacttcacatctatttgtgcgtcaatcttttctgaatgagcggacagccatgccgtttgtgcttcaagaacattactggtggcaatcactccctctttaaaaccaagcgttgcatagcgcagattctcttccgctttttccatgtttttggaagacataaccagtttcttacctgcttcctttaccttgaaagcggcttgattgacttgcaactctattttttcgcgtgcgtcctgaagctggtattgtgcaatgcgggcttcggcttttgccgctctcgttttataaataccttctccccagtgccatataggtatctgtaccatcactcctacattccacatgcctttgaatttgttttcaaagctattgaagacagaaggattggttaccatataattccccatcaatgcgatagaaggaagatgttcggcacgggttacgtttactttctgtttataaatctgtgtcgctaattcgagactacgtatttccggacgattctcataagcggtagataaatcgaaatgagggtctgttgtcagtaatggaatatcttccatattttcatctgctagcgtgatgggggagctaagatcaataccgcatagttggcacagcaacattcgggcaaggctcaatccatcttccactttggtgagtgtcatttctgcttcattcaccttgacgcgtacagacaagccatccgctttggtggctactccttcattaatcattttttccacatcaccgtccagctgttgcaagagctttaaataaccttccgccaacttcttcttattaaccagcgaaataacttgccaataagcctggtctgtactcatgattacttcctgcatgccaccgtggtgttgttcttgagccaactcttcggcatactttgttattttgttgtacgcccggatttttccacccatatataaaggctgtgtcaatgtaagagcacctgcatagacattcctggtgtctgtgcggagcgcatccactaaagagtttcccgcttggtcgagagcaggcagagccgctcctagttttccgcttaaggaagcaataagtggttttaattcaggatgtgctgttgcaatctcggttgcagcctgttggatagggcctgccagattagttcctagtcctgaaagcgcagctttctggtcgttgtttaataatgaaaactctttctggtttctcatgtaagctccggttgccgagaagttgggcaaataattcgtaaatgcagctttccgttgataatgagcagcatttatcttctcattgcttatcaacaaatctttgttgttggcaagagctaatgcgcggcaactatccagacttagaaagttctgcgcttttcctatgaaagtgagacttagcagaattgtcagaagaaatacttttttcatcgcatcttgcatattaataaggtgatacttctatatttaataacccggttcttatgtaatttgtttattgaagtagtctgtttttttgaacttgtttacttaaacaataattgcataaacaacgatgcaagtgtatgagctttacttgaaagtgcaaaatgaattagctttttttaaaatatagtggggtaggattctgtagaaaagaaagaaggctgttcctcgtagtgaagaacagcctttcttgatatataaagtaaggggattaattacagagcacctacttctttcaaagcagcgttcgttccgtgaacagcttttgcgctagctgcgaacttagctttttcgtcttcgttcaggttcagttcaacgatcttttcgataccgttcttgccaaggattacaggaacgccgatgcaaagatctgattcaccatattcaccttccaataatacagaacaaggaaccatcttcttttggtcatgaaggatagattcaactacgaatgctcctgctgcacctggtgcataccatgcagaagtacccagcaatttagtcagtgtagcaccacctaccattgtagcagcggctacttcttccagtttttcggcagagatgaaatttgctacaggcatacctttgtaagtagcgaaacgagtcaaaggaatcatagtagtatcaccgtgaccaccgataaccataccttctacttcgttagcgttgcaaccgatagcttgagacaagaaatatttgaaacgagagctatccaaagcaccacccataccgatcacacggtttttcggcaagcccaaagctttcaatgccaaataagtcattgtatccatcgggttagagataacaacgatgatagcgttaggagaatatttcaacaggttttctgctaccgatttaacgataccagcgttcacaccaatcagctcttcacgagtcatacccggtttacgaggaatacctgaagtaatcacaacaacgtcagagttagcggtttgagcatagtcgttagtgcagcctaccaatgcagtgtcgaaacccagcaattgagctgtctgcatcatatccattgctttaccttctgaaacgccttctttaacgtccagcattactacttcgtctgctacttcattaaaagcaagtacatttgcacatgtagcacctacgttacctgcgcctactacggttacttttgacataatactatatatttaaaaagttgataatttgttttatcttttagcgcgacaaaattacaacgataatcctgattaaagaaatttttccgtaataattttagttaaaggtctaagttctccggaatggatagctatcatgaaaaaaaagtggtcgaacaagccgttggcaagcgtggaagagaagcggagaataaacaacgaaaacgatacaaaaacgagggtgttcggagagggtgttacaaagcgttgaaacgcccgccagtaaaggggaaaaacccaatgaaaaccagtagagtagagaagagtaaagtaaagaagagtaagtaaaagtattatttctgttataaacaatagcaataatactgggcagagaagatggctttggctgctgccgttgtcggtttggatcacttcgtcggtgtcgtttctgttctcgtgtccctcatgaactgttcgtccggcagatgaccgccttttgtctggtaggttattgatgctcgcccggtgggtaacggacattcacacggtagataacatacgtttgtacgttaggtgaattctatattatttctcgggctaccgcttcactaaaaaataatttcaatacttgtttgctaaagtaccatttgcttcaaaactagtacgtaaacaaggtaaaagtcgcaaataaggatacttcgatcaggtaatgtcagtggccgcttaggatcataaaggagaatcagtcagggtactttgcgtctgtcggttcggcctggttgactggttaataaattaaaattgcatagattagtcgggagtttttcaaaaactctcactttttatacttgacttctgttgcgaaatgattacttttgcgcacgttatcaattcacaactgaaactatgagtaaaaaaagccttcttattgcggccgtggctatcttggtgatagctattattggtattacttatttattgtttaccgaaaaaaaagctaatcgggagttagtgcaggaattccaattggataaggaagatctggaaaacgaatatagtcgttttgtgcaagaatatgatgaattgaagtttaaggttactaatgactcattaggagtattgttagaacaggaacagttaaagacccaacgtctattagaagaacttcgtactgtgaagagttcgaatgcaacagagattcgtcgtttaaagaaagaattggctactttacgtaaagtaatggttggttatattaatcagattgattcactaaataaactggctgcacagcagaaacaggtcattgcagaagtaacacaaaaatataatcaggcttcacaacaaatcagtaacctttccgaagaaaagaaaaatctggataagaaggtgacgttagccgcacaactcgatgcaactaatattcgtatcgaaccacgcaataaacgcggtaaagtggcgaagaaggtgaaagatgtggtgaaattggctatcagtttcacaatcgtgaagaatataactgctgaaaacggtgaacgtaccatctatatacgtattaccaaacccgataatgatgtactgaccaagagtgcatccaatactttcccttatgaaaaccgtacactggtttactccatcaagaaatatattgaatataacggagaagaacagaacgtgaatgtattctgggatgtagaagaattcttatatgccggaaactatcgcgttgatatcttcgaaggtggtaatctgattggttcgcagacgtttacgttagattagtttccatctatcgtcttccatccgctccccacatcattttgctgcggagtgtatcgaaaaagatatgattgaagcgtttgactacttttatgctataatctgcccggcggatcttgagttgagttgtttctttgcaggtttcgcttcgcccgtcaatagcaacgaggaaattatggctccggctttccacatccaatgtgatttcccagtcgtcacggataacgataggacggacgttgaggctatgcggagctaccgaagtgatggcaatagtgttggaatgagggacgatgatcgggcctcctacactcaaagagtaggctgtggaacctgttggagtggcaattactaacccgtcagcttgataagtattcagatacgcgccattaatagctgtccggatactaatcattgaggagctgtctcgtttgagaatagctatttcgttgagggcataaggagaatcttggagatgtttttcgtcacagatcaactgaagtacgctccgttcctccacactatatctgccgttttggatttcatcaaatgtttcctccatttcctccggcgaaatatctgccagaaatcctaaacgtcctgtgttaattcccaaaataggaatcccttttcttcctacgcggcgggcagctttcagaaatgttccgtcgcctccgatgctgattaccatatcggcagtaaaatcatcaccatcaaataattgatctgctttaatatccatattttcagaaactaggaattgataaaattccctgcacataccaatctttgctccctgtttctttaaaagtttaaacaaggtgacagcatgagaggactttttagcctgataagtatttccgaaaatggcgaatttcataagcaacatcattagttcaggatgcaaatttggcattttttcttggatttctactttaaataaccaaaaaagaacccataatgcgtttcgtattattaggcaactaataataatatttgtatttttgcggcaaatataacgtagaactatgactaaattaagtgtaaacataaacaagattgccacactaaggaatgctcgcggaggaaatgtccccgatgtagtaaaggtagcgcttgattgtgaatcttttggtgcagacggtatcactgttcatcctcgtcccgatgaacgccacattcgtcgttcagatgtatatgatttgcgccctttgttgcgcacggaatttaatatcgaaggttatcccgctccggaatttattgacctggtgttgaaagtcaaaccgcatcaggtaactctggttcccgacgatccttcacagattacttctaattccggttgggacaccaaagcaaatctggaattcctgactgaagtgctcgatcagtttaacagcgccggtattcgtacttctgtttttgtggcagccgatcctgaaatggtggaatatgcagcaaaagcgggagcggatcgtgtcgaactgtataccgaaccatacgcaacgaactatccgaagaatccggaagctgccatcgctccttttatcgaagccgcgaagactgcccgtaaactgggtatcggattgaacgccggacacgacttgagtctggttaatttaaattatttctataaaaacattccttgggtggatgaagtctccatcggacatgcgttgattagcgatgcattgtatctgggactcgaacgtaccattcaggaatataaaaactgtctacgctcatgaatgcaatgatcttgttagcccaaggggctatgaatatggccgactcgctggctactgccaaccccgtattgacggaggtgaacgctcctgaaatgaacatgcttgatatggctatcaagggtggatggattatgattgtgctgggtgtattgtcggttgtctgtttctatatcctgtttgaacgtaactacatgattcgcaaggcaggaaaagaggacccgatgtttatggagcggattaaagactatattcatagcggtgagatcaaagcggctattaactattgccgtacgataaacaccccttcggcacgtatgatagaaaaagggatcagccgtttaggacgtcctattaacgatgtacaggtagctattgagaatgtaggtaatattgaagtggcaaagctggaaaaaggattgactgtaatggcaactatttccggaggtgctccgatgctcggattcctcggtacggtgaccggtatggtacgtgcattctatgaaatggcgaatgccggaagcggaaacattgatatcactttgctttctggtggtatctatgaagctatgattactacggtcggtggtctgattgtcggtatcattgctatgtttgcctacaattatctggtgatgctggtagaccgtgtggtaaataaaatggagtctcgtacaatggagttcatggacttgttgaacgagccggcaaaataataggctgatgggattaaaaagaagaaatagagtatcgcccaatttcagcatggcttccatgacggacgtcatcttcctgttgctgatattctttatgataacctctacggtggtgtcgcccaatgctatcaaagtcttgttgccgcaaggcaagcagcagacttcggccaaaccgctgacaagagtggttatcgataaagacttgaatttctatgccgcttttggcaatgaaaaagagcagccggtggcgctgaacgacctgacttcattcttgcagagttgcgcagagaaggagccggaaatgtacgtggcattgtatgcggatgaatcggtaccttaccgtgagatcgtaagggtattgaacattgcaaacgagaatcattttaagatggtgctggctacacgcccgcctgaaaacaaataagaaacaatggacagaagaaaaaagggtgaatacataggagcgctgggtgcactgttggtgcatgtggcagtgattgctcttttgattctggtgagctttactatccctcaaccggatgaagatgcaggcggagtgcctgtaatgatgggaaatgtagacgcagcgagtggcttcgatgatccctctctggtagacgtggatatcatggatgaagatgcggcagcacctgcggaaacagcaccggaacttccttcggaacaggatttattgacgcagactgaagaggaaacagtaaccctgaaacctaagacggaagaaccgaaaaaagaaacggtgaaacctaaagaggtggtcaagccgaaagaaccggtgaagaagccggagaaaacggaagccgaaaaagctgcggaagcgaaacgactggcagaagaaaaagcggaacgtgaacgtaaggctgccgaagaagctgccagaaagagggtgtccggtgcgtttggaaagggagcgcaaatgacaggaaataaaggaacagcggctagtggcacgggaaccgaaggtagcaaggaggggaattcttctaccggagcgaagaccggaaccggaggttacggaacatttgaccttggcggacgttctttaggtacgggcagtttgccgaagcctgtatataatgtgcaggaagaagggcgtgtagtggtgaatatcaccgtgaatcctgcagggcaagtgatatcgaccagcattagccctcaaacgaatacggtaaattccgctttacgtaaggcagcggaggatgcagcgaagaaagcccgttttaatacgatagatggggtgaataaccagacagggacaatcacctattattttaacttgagatagtatcattaaccaaatatataaaggattatgggaactgtatacgctttttttgcagatggttttgaagaaattgaagcctttactgctattgacacgttgagacgtgccggacttaatgtagaaatcgtatccgttacgccggatgaaattgtagtgggagcacatgacgtatctgtcctttgcgatatcaacttcgagaattgcgattttttcgatgctgaactgctgttgttgccgggaggaatgccgggagctgccacacttgacaagcacgaagggttgcgtaaattgattcttgattttgccgcaaaaggtaaacctattgcggccatttgtgctgctccgatggtgttgggtaagctggggctgctgaaaggaaagaaggctacctgttatccgagttttgaacaatatctggatggtgcagaatgtgtaaatgaacctgtcgtacgtgatggaaacatcattaccggtatgggaccgggtgctgccatggaatttgctttgacaatcgttgacctgttggtaggtaaagaaaaagtagacgaactggtagaagcgatgtgtgttaaacgctaaaccgtccatgaagaaatatgtaatcattgtcgccggtggaaagggcttgcgaatgggaagtgacctcccgaaacaattccttcccatgggtgataaacctgtgttgatgcataccctggaagtattcaggaaatatgacgaaacacttcaaatcatagtagtgcttccgcaggaacaacaggacttttggaagcaactttgccaaaaacatagctttgtggtggaacatatccttgccgatggaggcgaaacacgttttcactctgtaaagaacggtctggcactggtgcaagggccgggactggtaggggtgcatgatggagtacgtccgtttgtgtcggtagaagtgattcgccgttgttatgacttggcaaaagtgcagaaagcagtgattcctgtggtggatgtggtagagacacttcgccatctgacagatgccggaagtgaaacggtcagccggaatgattacaagctggtgcaaacaccgcaggttttcgatgtagagttgttgaaacaagcctatgcacaagaatttactcccttctttacagatgacgcttccgttgtcgaagcaatgggaatacctgtgtatctggcagaaggtaaccgtgaaaatataaaaataacgactcctttcgatttaaaagtagggagtgctcttttataaatgttcgatttagccacacgcgacataaaatttatctccggtgtaggccctcaaaaagccgctgtattaaataaggagttggaaatctactccttgcacgatttaatttattatttcccttataaatatattgaccggagccgcatctattacattcacgaaatagatggcaatatgccgtatatccagttgaaaggagaaattctcggtttcgaaaccattggcgaaggacgtcaacgtcgtttgacggcgcacttttcggatggtacgggagtcgtggatttggtgtggtttcaaggcattaagtatatcttaggtaagtataaactgcacgaggaatatatcatcttcggcaaaccgactgttttcaacggacgtatcaatgtggcgcatcccgatgtagacaagccggaagatttgaaactttcttcggtgggattgcaaccttattataatacgacggagaagatgaagcgcagtttcctcaactctcacgcgattgagaagatgatggcaacggtgattcaacaaatacaggagcctctgcctgaaacactttcttccaaattgctggcggaacatcatctgatgcctttgacggaagctctccggaatattcacttcccgaccaatcccgatgtgcttcgcagggcgcaatatcgccttaagttcgaagaactgttttatgttcaactgaatatcctccgctacgccaaagacagacaaaaaagatatcgtggatatatctttgagaaagtgggagatgtgttcaatacattttatacaaagaatcttccttttcaactgacaggtgcacagaagcgggtattgaaggaaatacggaacgatgtcggcagtggcaggcagatgaatcgcctcttgcagggagatgtaggaagcgggaaaacactggttgccttgatgagtatgttgttggcgttggataacggttatcaggcttgcatgatggcgcccaccgaaatcttggcgaaccagcattatgaaacgatcaaagaactgctctttggcatggatatccgtgtcgaactgctgacaggctctattaaaggcaaaaggcgggaagcgattctgaccggattgctgaccggagatgtgaatatattaataggaacgcatgccgttattgaagatactgtcaatttctcttctttaggctttgttgttatcgacgaacagcatcgctttggcgtggcacaacgcgcccgtctttggagtaagaatgttcaacctccgcatgtgctcgtgatgactgctaccccgatcccacgcactttggcaatgacattgtatggtgatttggacgtatctattatcgacgagcttccacccggaagaaaaccgattactaccatccaccaatttgataaccgccgggaaagtatgtaccgttcggtgcgcaaacaaattgaagaaggacgccaggtctatattgtttatccgctgattaaagaaagcgaaaagattgatttgaagaatcttgaagaaggatatcaacatattctggaagagtttccgaaatgtacggtttgtaaagtgcatggcaaaatgaaaccagccgagaaggatgagcaaatgcagctttttgtttcgggcaaagcgcagatcatggtggctactaccgtcattgaagtcggagtgaacgtcccgaatgcttcggtgatgattattgaaaatgcagaacgtttcgggctttcgcagttgcatcagttgcgtggccgggtaggacgtggagcggaacagtcttattgtattctggtgacgaattacaagttgacggaggatacccggaaacgattggaaatcatggtgcgcaccaatgatggctttgaaatagcagaagccgatttgaaattgcgtggtcccggtgatcttgaaggtacacagcaaagcggtatcgctttcgatttgaagatcgcggatattgtccgcgacggtcaactgttgcaatacgttcgtgctatagctgaaagtattgtagaacaagaccctgcagcacaaagtccggagaacgaaatcttatggcgacagcttaaagccttacggaaaacgaatgttaactgggctgccataagctgaaaaacggttaaacatgcagtttatttgcgcaaatgtgttgcaaaacatatttcggctctattctccctatttataggagtttaacgacctgattcctcttccttttcgttctaagcatctgaaaaatagttaataacttccttgccatttcgtaggaaaacactatctttggaagaatttttttagtaaatgtattgtttaaccatttgcaaagtcgagtattatgcttgaaaaaacgctggtcattttaaaaccgtgtacccttcaacggggattggttggtgagattactcatcgctttgagcgtaaaggattacggttggctggcatgaagatgatgcaactgactgatgaattgttgagcgaacattatgcccaccttagcggcaaatccttctttcagcgtgtgaaagattcgatgatgacagctcctgtcattgtttgttgtttcgaaggtgtggatgctattcaaacagtccgtacgttggcgggaccgactaatggacgtttagctgccccaggcaccattcgcggggattatagtatgagctttcaagagaatatcgttcatacatccgattctccggagactgcagctattgaattaacgagattttttaaaccggaagaaatattcgattacaagcaggctacatttgattacctgtatgcaaacgacgaatattaattgaattgacaaagaaggaatgaattttagcattattaaaacaggattggtcgctgttgcggctatggtcagtctgagctctttctcacaagacctgattgcccgccaagcaccgatagacaagaaattaaaatcagtagactctttggccttgcagaagcaaatccgtgccgaacagtccgaatatcccgccctaagtctttatccaaactggaacaaccagtatgtacatgcttacggaaatgctattatccctgatacgtatacaatcgacctgacaggtttccatatgccaactccaagtacaaaaattacttcgcctttcggtcctcgttggagaagaatgcataatgggttggacttgaaagtgaatataggtgatactatcgtagctgcttttgacggtaaagtacgtatcgtaaaatatgagcgtagaggatatggaaaatatgtcgttatccgtcatgataatggattggaaacagtgtatggtcatttatcaaaacaattggttgaagaaaaccaattagtgaaagccggagaagtaatcggtttgggtggtaacaccggacgctctactggttcgcatcttcatttcgaaacccgcttcctggggattgcaattaatccgatttatatgttcgacttcccgaaacaagatatcgttgccgatacttatacgttccgcaaagcaaaaggcgtgaagcgtgctggttctcatgatactcaagtggctgacggtaccatccgttatcacaaggtgaagagtggcgatacattgtcccgcattgctaaattgcgtggcgtatcagtcagtacactttgcaaactgaaccgtatcaaaccgaccactactttgcgtatcggacaggttttgcgttgttcataaaaaatatagcttataaaacagtaatacaatatctttaggagagggcactttaatataatttagagtgccctctttctgtttttacttaattattgttacctttgcgcactatttggaagaagatgaaagataccaagcaacaatttgaacatgtcatcgctttgtgccgtgacttattttccaagaagctgcacgattacggacctgcatggcgtatcctgcgtccggcttcggtgactgaccagatttttattaaagccaatcggattcgaagtattgaaaccaaaggagtaaccctgattgacgagggaatccgtgccgagtttattgcgattgtcaattatggcatcatcggacttatccagttggaactggggtatgccgagtctgccgacatcagcaatgaagaagcgatggctttgtacgataagtatgcaaaagaggcattagaactgatgcttgccaagaatcatgattatgatgaagcctggcggagcatgcgtgtcagctcttacacagacttgattctgatgaaaatctaccgtaccaagcagattgagagcttggccggcaatatattggtgtcagaaggtattgatgccaattatatggatatgattaattactctgttttcggactgattaagatagaatttgaaggataagaacttacatatcattcaggaggtagtggcgaatatgtgtcgctttcttttggcggcatcgttcatcttttccggatttgtaaaggcagttgatccgctgggtttccagtataagatacaggattatctgactgcattcggaatggcttcctggttcccttcattcttccctttattgggaggtatcgttttatccgccgttgagttttttataggtatctctttgttctttgcaacaagaagaacattggctacctcattggctttgatgctgatgattttcatgacgccactgaccttgtatcttgccatctttgatccggtttcagactgcggttgttttggtgatgcctgggtattgacgaattgggaaacatttggaaagaatatcattctgctgtttgcggcaataatggctttccgtcacaggaggatgctgattcgttttatcagtgtgaagatggagtggctggtttctctttatacgctgttttttgtgtttactttatcgttctattgtctggaccgtttgcctgttttagactttcgtccttacaagatcggaaagaatatcctggaaggaatgacaatgcccgaaggagccaaaccaagcgtatatgaaagcatttttatcctggagaagaacggagagcagaaagaatttacgttggataactatccggatagtacctggacatttgtcgatacgcgtaccatccttaaggaaaaaggatatgaaccggctattcatgatttttctatgatagatctgaatacgggggaagatataacaaacgatgtattgacagatataggatatactttcctattggttgcccatcgcattgaagaggcggatgatagtaacattgatttgattaatgagatatatgactattcggtggagcatggctacaaattctattgcctcacttcttcaccggaagaacagatagaattgtggaaggacaagacaggagccgaatatcctttctgccaaatggatgatattactttgaagacgatggttcgttccaacccggggttgatgttgattaagaacggaaccattctgaataaatggagcgatgaggatataccggatgaatacgtactgacggacaaactggagaatctgccgctaggaaagcagaaagtgagcagtgacgctcatacggtaggatatgtcttcctgtggtttgttattccattgttgttagtgcttggggtggatgtgttggtcgttcgccgccgggaacggaaaaccgcgaagcggaagcaacaagaagaagagataaaaagcaaagaaccggaaacaaagaatcaaggaatagaagaacaagaataagaaaaaatgataacgagcgaccctctgtaacgaacactaacctgaatcgttcaatcgtcaatcgtccgatcgtaaatttattaaccctttaaaataaaaaacaaaatgagaaagaacattgttgcaggaaactggaaaatgaacaaaacccttcaagagggtatcgctttggctaaagaactgaacgaagcattggctaacgaaaagcctaactgtgatgtaatcatctgtactccgttcatccacttggcttctgttactccgttggtagacgctgctaagattggtgtaggtgctgaaaactgtgcagacaaagcatcaggtgcttatacaggtgaagtttctgctgaaatggttgcttctactggtgcaaaatatgtaattctgggacactctgaacgtcgtgcatactacggtgaaacagttgctatccttgaagaaaaagtaaaattggctttggctaacggtctgactccgattttctgtatcggtgaagtgttggaagaacgcgaagctaacaagcagaacgaagtggtagctgcacaaatggaatctgtattctctctgtcggctgaagacttctctaagattgtattggcttacgaaccggtttgggctatcggtacaggtaaaactgcttctcctgaacaagcacaggaaatccatgccttcatccgttctatcgtagctgacaagtatggcaaagaaatcgcagacaatacttctatcctttacggtggtagctgcaaaccttctaacgctaaagaactgttcgctaacccggacgttgatggtggtttgattggtggtgctgctctgaaagtatctgatttcaaaggtatcattgatgcttttaacgcataattaaaacttctttcaggcacggatttcacggattacacgatatcgtttagtccaagagatttcaaaaactgtataatccgcgtaatccgtgcctaaatattatttatagaatgagaaaactagctttacttactttgttgttggtattggcagttgtcggtgtacaggcacagggcattgtcaaaagtctggaacgtaacgttccgggacaaggaaaggtgactattcatcaagatccccgtattgaggctctgatagggatggaacgtcctgcaacaggtgaacagaaagtaataaagacttccggattcagaatacaggcgtatgccggtaataatactcgtcaggctaagaatgatgcttatcatgtagcatcacgcgttaaagagtatttccctgaattgacagtatatacttcgttcaatccacctcgttggctttgtcgtgtaggtgatttccggagcattgaagaggcggacgcaatgatgcgtcggttgaagtctaccggtgtgttcaaagaggtttctattgtaagagaccagatcaatattcctttataattgtatcatgttagaaaaagaagaaattatttctccgaatctggaggagttgaagagtcattatcgtagtattataactttgttgggtgaagatgccgaacgggaagggttgctgaaaactccggaacgggtggctaaagcaatgttaagcttgacgaaagggtatcacatggatcctcatgaagtgcttcgctctgctaaattccaggaagaatacagtcagatggtgattgtgaaagatatcgatttcttctccctttgcgaacatcacatgttgccgttctacgggaaggcacacgtggcttatattcctaacggctatatcaccgggttgagcaagatagcccgtgtagtcgatatattctctcatcgcctgcaagtgcaggaacgcatgacactgcaaatcaaagagtgtattcaggaaacactgaatccacttggggtaatggtggtagtggaagccaaacacatgtgtatgcagatgcgtggtgtagaaaaacaaaattctattactactacttcggattttaccggggctttcaatcaggcaaaaactcgtgaagagtttatgaatctgattcaacacgggactttgtagagaaaacctggtaagaaatgctatttggtttcggtaccggggaaggcaggcttcggcaccgatgaagagggtgtgcggcaccgatgaagacatctctcggcaccgatgaggaatcatcgcagaacaaccctgtcacccaatcgttttgccatgatgctttgtacggtcttcaactcattaaagcgtttcataagcgagtcacatttttcattatcatgggcaagagcaggatcttgcagggcataaagcatgtgcttcaattcctccgttacgattgcatatttgaagttaatcattaacatcggaaccatttcatagagacgctcttcatctgttacgatcttttgggatttggagtggtatttactaagctgataccgcacattaatcaaatccacactcaatttactgattaccggatcaggatgtgccaggaaataacgttcagcaatgaaattggaatcatgcatgtgtgcagcagcttccgataacatttggcggtgcaacggattatgaaaagctaactcatcttctttcaaatcattaatcacatattctataacggttaccggaatctcgtttccttcttcatcagtcaggttacacatgattttttctccataacgaactaccgcttgtaatatcagccgttcgaatttgtagaattcttgtccttcctttccttcctgggggataaaagatgcatagttgtcttcctgcagagcgggaggaacctctgtatatccgttatctatttcaggaggcaacggaatatctccgttgggcatcggagcattttcagacggtgtcccttgagacattgtagctgttctttcagccatccggcgttcccgttccgtctgttcagctcgtttctctgcttgagtttcccgtcttttggcaacttccgataccaacagcttatcttctacatgaagtagctgtgcacattctttgatatagacatctctgacaatcgcttccgggataacagaaatactttgcaccaagttaccaatcagttccgcacgcttgatgggatcttttcctgcatcctccagcagcaagtttgttttgaagcggataaagtccgtttcatgttcagagatgaaagcctggaattccgttgagttatgtttgcgggcaaaagagtccgggtcgtccccatcgggaagaagacagactttgatattcataccttcctccaataacatgtcaattccccggatagaggccttgatacccgctgcgtcaccatcgtaaagcacagtcatattgttggtgaaccggtgaatcatacggatttgtcccggtgtaagggctgttcccgaagaagcaaccacattctctataccggattgatgcatggagattacatccgtgtaaccttcaaccaaaaaacaacggtcttgttttacaatagcctgtttggcaaaatatataccgtataattcgttacttttatgatagatttccgattcgggtgaattgacgtattttactttaacccctttcgttgcactggcaagtacacgtccgccaaaagccaccactttaccggaaagcgtatggacagggaaaattacacgtccccaaaaacgatctcgcaatcggtggtcgtccgtttcgtagcaaagtccggtttttaccagatactcttttttatatcctttttggattgcctctttggcgaatgcatcgtgactttcagtacagtagcctagttggaatttctcaataatgtcatcgcgaaaaccacggttgcggaaataagccataccgatgctacgcccgtctatatgattttttagtatgttttggaaataatcgcgcgcaaagttattgacgataaacagactttcacgttcgctttgcacaaacttctcttcatcgcttaattcccgctccttgatttcaatattgtatttcttggcaaggtacttcagcgcttccggatatgacatctgctcgtgctccataatgaaatgcactgcgtttccaccttttccacaagcaaaacatttgcataatcccttggcgggagagacataaaaagaaggggttttatcactatggaacggacacaaaccgacgtaattgacaccacgtttgcgcagggtgacaaaatctgaaacgacatccataatttgtgccgcgtccaatattcggtctatggtaacttgatctatcattctttctcctgtgaatccgtttttgcggatacaaaggtacacataaaaaaatcccctgcaaacaaaaaagtatgcagaggatcgtaaaatcttgcctatataagggatggttctgtaaccggagaggcacacggaagattattatttcccctgatccctctctatataatggattatttaatcttctcccgaatcttagtcagatactttttcattccttccgcatctttgttctcgataatttcgagaagattcttcaactccgtgcggatattggctacctgtcccggagtgcgtgggttgaatagaatttcctgaagcaggtagtcgtcttcgcttaataggcctttggcaattgccatgtgctttttgaacgtagttcccggagcttcctgatgtttcattacggcagcaaatacaaaagtcgatacgaacggaatagaaagcgagtaagctactgtttcgtcgtgttcgtcgaacgtatattcgaagatgttcaaacgcaatgtctgatagagatctttgaagaatatttttcccaggtggtctccttcactgatgatgatggcattttcgctgcttagattactaagactagcaaaagtagggccaaacatcgggtggctggagacataacggaaaccgctttcttcataaaacttcttcagtcctgtttttacagaggcaatgtcactaatgatacagtctttcggtaacacaggcaatactttatgaaaggcatccagcgtgtacttcactgtaacggcattaataaccagttccggttcaaagtccttaatctcctccaatgtggtgaaacgatacgtgttatagacaaaacgcaactggtgcgggttgacgtcgaacacggccgtctcatgttgaaagcttaatatatcagtaaagaaagagcccattttgccggctccaaggattaatattctcataatgtttatttaaaaatcctttccctaaccctctttcaaggagaatagactgaaagttactcttgtcaatatgaacaggaggttactttctttcctctctttggaagagggttagtggagaggctgctttttatttattaataatttccatctgttgacgaaccgattcttcgtggatggcttcgaaaattttcttcataaactcgctgtccataccacactgttcgccctgcgcgccacgtttttccaagatttcattgtaacgtccggcttgaagaacggtgattccatgctcttttttgtaagtaccgatttcgcgggctacgcgcattctttttgatagttcctgaatgatattgtcgtcacattcgtcaatttgtttacggagttgtgccagactttcggtagattgcgtttcagtacggatcaccagcagattgaggatatagtcgagtacgtccggagtaacttgttgagaagcatcactccaagcacaatccgggttgcagtggctttctacgatcagaccgtcgaagttcaagtccatcgcctgttggcaaagcggagctactaactcacgttttccaccgatatgactcggatcacagaaaatcggaagattagggatacggcggcgcagttcgataggaatatgccattggggaagattacggtagatctttttgtcatagctgctgaaaccacgatggatagcacccaggcgtttcaaaccagcgttgttgatacgttccagtgctccgatccataattcgagatccgggttcaccgggttcttaaccaatacggggatatcaacacctttcagcgcatcagcgatttcctgtacggcgaagggattggcagtggtacgcgcacctacccaaagaatatcgattcccgctttcagacattcgtaaacatgtttggctgttgctacttccgtagaaacatacattcctgtttctttctttacctctttcaaccaggcaagaccttctacgccgataccttcgaaacctcccggtttggtacgtggtttccagatgccggcacggtatattttctgtccttttgcagccagttgtttggctgtatccattacttgttcttcagtttctgcgctacaagggccggcaatgacaatcggtcttttagcttcaacgcccggtaataaaattgattcgagttccatattcttatttgtttttattcttttaataacttgttttcgttgaaattgttctgtctcattatgctgctgttttcttctctttttctttgaagagagaacaacagaaacctatattctttttattctttccagtgcttccgccagtttattgtctttgcaacaaagagagatacgaatatatcttgctccgttactgccgaaaataaatcccggagtgataaacactcttgcttcatgcaataccttttccgtcagttcctctacatccttgcaggaagcgggaatctttccccaaaggaacattcctacttgcttttcgtcgtaggtgcatcccaatgttttcataatttcaccggcgaggtgacgacggttgcgatagttttcgttattgccttcataccagtctgcttctgcttcaagagcagttgctgcagccaattgcatggcacggaacataccgctgtcgatattacttttcactttcaatatccattgcacgaactccgcgttcgatgccagcataccaatacgccagccgggcatattgtgactcttgctcatagagttgaactcgatgcaacagtctttggctcccggcacacttagaatactgataggcttatcgttcaggataaagctgtacggattgtcgttcacaatcacaatattctttcggcgggcaaaatcaacaagacgctcatagatttccggagtagcattggctcctgtcggcatattcgggtagttggtccacatcagttttacacgactaagatccatcttttccagtgcctcaaagtcgggcatccaaccgtcttcttctttcaggtcatagttgataacttccgcgccaagtattttacttaaagaagtataggtggggtatcccggattcgggactaacacctgttcacccggattgacaaatgccagcgtaacatggaggatcccttctttcgaaccgatcaatggttgtatttccgtattcggattcagttccactccgtaccagcgttgataccaattggcgaaacctttgcgcagttcggggatacctacatacggttgataaccgtgtccgttgggatcatgagcattgttacacaatgtttcgatggtttcccttgaaggaggcatatcggggcttccgataccgaggctgatgacatcttttccttcagcattcatctgtgctacctctttaagtttctttgagaagtagtattcgctaacacttgccaatctgtcggcaggagcgattttatacgtttgactttccttctgcatattcgcctaataatttaagttctttggttaatggagtgattgcggcaatagattgcttgtatcttaggtaatcgttgaaagccacatctacgtaaaattggtattcccattcccgtccgatgattggcaacgattggatttttgtcagattgatattatagaacgatagaatagacaaaacctgtgacagactaccttccgtgtgcggaagagtgaataccatactcgctttgttggttgcgttgacatgatgttggcggagctcgtccacttgccagggatcggcaactaccagaaaacgggtgaagttgtgtttgttcgtttcaatgccttcctgaagaattttcatgccgtaacgttcggctgctgctttggagcagatagcggcatggcctttcagactttcattcttgatgatttccgcgctgcgggcagtatcttcaccttccactactttcaactgtgggtgctgattcagaaattcgcgacattgcatcagggcgatagggtgggagttgacttcagtcaggtcttcccaactctcatcagggagacagacgaaactgtgcgagatacgcagtttgtattcaccaatgatctgtgtgccgctttgtcgcagcaactcattgttgtgcagcaagcttcctgcaatcgtattctcgatggctagcattccgataacctggctgtcttttcgtatcgaagtaaacacgtcttcgaagttggcacaacagattaactctatttcttctccctcgaagtacttgtgtgcggcgatatcatgatatgagccgagtgttccttgaattgctatctttttcattgttctaatgtattatataaaaaaaatcccgcgtccatattggagcgggattcatatgattgatttctctattcagtccttaagcatcactgtcacttgatacatacaaactcccgctctactttgttgctaaagtaaaagtaaaaaaagaagtaatatgcataagtaaatgatttcattcgaatctttgttttttgctttggtttctaattctggggcaaaagtaataattttctgttagatgcaaacaaaaaacgatattttttttgttttttcatcaaaaacaaatgaaaaggttattctgttttgagctttacatgtcgtctttctctggtttgcgtgtagccttttctttcattaaggctgaaagccttctattatatagcgtagggcatcgccctacgtaaaagcatacacctaacataagccctgaaagggcggaattgcttggacgtttacgtctttcatagtatgattctatataaactcttcattatattcaacctgatattcttttagaaacattttcagttcatcttggaaggtcatttttttgtgatgctctttttgtcccagaatatatcgagttacagtctcaacttttgattgactgactgagaaagctccatatccttcttgccaggagaaatcatgatatgagggtcctaaactttttatccattttgacgaactacgttttacttcttctaccattttggataatgcgatgtttttgttgagaatacataggatatgtatatgattggtaaatccgcctactatgataggtgggcagtctatgtttttcagaatgccggagatgtatttggatatttctgataatttatcctcgtttatactgtccttcctgtatttagtgctgaaagtcagatgaatatagttctttgatagggattgtggcatatagttagttcatgttccgccctttcagggcttgtatttgggttttataaatacgtagggcgatgccctacgctatataatggaaggctttcagccttatcaatgttgatgttaatccgtcctgatagtttctacgctatataatggaaggctttcagccttatcaatgttgatgtcaatccgtcctgatagtttctacgctatataatggaaggctttcagtcttatcaatgttgatgtcaatccgtcctgatagtttctacgctatataatggaagactttcagcttatcaagctgatatcaatccgtcgtttctgatagttcctacactatataatgataggctttcggtcttattttaaaagattcccggcagtgcctccggtttcggtcccaagtttttgaattctccgttcagaccagcttcctccttcggattcaattccaaagatttcttcatgtcctctacagaaccatccttatcaccattcagcaatttagcacgtccgcgttctttgtaggcctctgcaaagttcggattcagttcgatggcttcatcaaacagtccgatggcttccgtcagcttcttctgattgatataaagttgtcctaaataaaggtaagcctgttcgttgaacgggtttatttccgtcaccagtttgtaatcctcttccgcttcttcgccctgaccgttggattctttcacttttccacgcaggagcatggcagtttcttcctccggattttgagcaagtacagcgtctatatcctccatcatttctttatactgtttcaggttcagcaaagcttctgcacgtaacagacgggcttcaatgaaatcgtctttcaaagtgatcgctttggtgagatgggcaatggtcattaggtcgtcgttttgtcccttacgggcttttcctagcagataatgagctacggcatttccttcctcaatggcaattgctttattggcagcctcttccatggcctgataatcttcctggataaagcatacatttgccagtgtcaggaaagtactcgtgagatgaggttccatggcagccattttttccaacagttcgcgggcttttgccgtttctcccatttgaatgtagagttggctaagatagcccattgtttcaaactcttcctggatggcaagagcttctgtaaaacattttactgcataatccggacgtcccatgcgttgcgcacgtaaaccgtcgtatttgaaaatctcgaaatttttctgatcgtttttctgtttttcactttccggagtttccgacttaccggagaagaaagatttaaaaaagttcggcatgactgtgttatttttgagttaccttgcaaaggtagtaacttattttgaaatatgtatcattccatcctgcatcttccattcaccttcctccaataaatactggatgacttcactgactctctctttctccgcttctattttctcggctatttctgccggcgtatgcggtttttgggcaagtaattctgttattttctttttcagctcttcaagagacttcccggtcagcgtatctgttgcacggtgactaaggcaaacatcacattgtccgcagttatgctcgtttttctctccgaagtagcggagcagcatccggcttcggcacacattctccgaaatgacatattcttccatcgccttgatgcgagcttcataccgagctttacgctcttcgtagacagcaggggggatgtgcacaaaacgaagttcctgccgttcgcgcgtatatataatataaggagtctttttgtgcggaatataatccacgatgcgacgtttggtaagcgtgaccaatatgttataaatctgttcacgggtcagtccggtacgtacggacagggtggcttcgctgatataggcataatcggtaaacactccggtgtacgaacggagaatcatctgtatcagagcttccgcttccgttcccatttcccgcagtttgtacagttcgtcccggcgaatcgtaaaaaggatgcgtgaggcgttgtcctgttcgtccgtatattccagataaccggcttgagtcagtatcttcagcgcactgtctaccggaaccgggaagtatttgaacttccggcaaaactcttccaggttaaattcacgtacacattggaaaccgtcgcccattgccatctgatagtaatattgcagatgctcgtacacattgaggatatattctttatcgggaaaagtatccactacacgcctgtgtaacgtcgttctgtccgttttagtatataagattacggcatacgctttctcaccgtctcttcctgcacgtccggcttcctgaaagtaggcttcgagagaatcagggaggtcaagatgtaatacgatacgcacatcaggcttatcgatccccatgccaaaggcattggtagctaccatcacgcgaacttctccgctttgccaacgtttttgacgtaggtcctttacggcattatccagtccggcgtgataaaagtcggcggtgatatcttcatttaccagtaattcggtgatttctttggtccgtcgtctgttgcggacatagataatggcgctgcccggtacctttcgtaagatatgcaacagttcttgagtcttgttatccgtttgtcgcaccatatacgccaggtttttccgctcgaaactcatgcggaaaacattctcttcacggaaatccaagcgggcttgaatatctttcaccacttccggagtggcggtagcggtcagtgccagtaccggaattcccggtaacagcgcccgtatctcggcaattttcaggtaagcggggcggaagtcatatccccattgtgagatacagtgactttcgtcaaccgtaatcatagagactttcattgaccgcagtttggtgcggaatatgtccgtgtccagacgttccggagaaatataaaggaatttgtaatcaccgaagatgcagttttcaagtgcagtgagaatttcctgccgtgtcatgccggagtatacggcaagggctttgatgccacgtttgcggaggttctgcacctggtccttcatcagggcgatgagcggagtaatgacaatgcaaatcccttcctgggcgagagcaggcacttgaaaggtgatggacttaccgcctcccgtaggcatgagccccagtgtatctttgccttcgccgatactggtgatgatctcctcctgcaagtcgcggaaggagtcatatccccaatattgttttaatatctcctgatacttattcaatcggctttatatcctcgatttgaagttgaacttcgccacgcttgtgcgtgttttcttcaatggtgtaacagatgtcgaacgaacgtttcgttttgatatagcgcacgtgcgaactctgtccgaacgcgataccgttcattacattattcgatttattatcaaccagttcgagcttgatatgttcctggtcgcgtcccactactttactcgttccataatcatagacgtgatgagtgcagaaaatgggtttcgtgttgtcggggccgaaaggattaaactttttcaggtcgttgaagaacttggaagaaatatccctgaagtcgatttcagcatcaatttcgatgacggcactggtttgttccggcaggatatgccgtgaaacgtagtcttcgaaccgtttggtaaaagcatccacattctccactttcattgatagtccggcggcgtatgtatgtcctccgaagttttccagcaggtcgcggcaatgctcgattgctttatatacgtcgaagccggaaacagaacgtgcggaacctgtcgccatgtcatccgttcgtgtcaataccacggcagggcggtaatacacttccgtcagacgggaagctacgataccgatcactcctttgtgccattcttcgttgtagagcacaatagagcggcggtcggctaatccttccagattggcaacgatgttgtttgcctcttccgtcatactcttgtcgaggtctttccgggtttcgttgtactggttgatttgtccggctttttcaagtgccgccgagaagtctttttccgtcagcaggtctactgcttcttttccattctggatacgtcccgacgcattgatgcgcggtccgattttaaacacaatatcgctgacagtgatttctttttcagaaagtccgcatacatcgataatggccttcatgccgatactcgggttactgttcagttgtttcagaccgtggtaggcgagaatacggttttcacccataatcggaacgatgtccgatgcgatactcacggctacgatgtcgagcaacggaatcagatgatgaaattcgatgccattactaatggcgaacgcctgcataaacttgaaaccgactccacaaccggaaaggtgggtgtacgggtacgtgttgtccaggcgtttggcgttcaatatagctacggcaggcgggagaatatcatccggcacgtgatggtcgcagatgataaagtcaatccctttttctttggcatacgtaatttcctctactgcttttattccgcaatcgagtacaataatcagtcccacaccggtttcagcggcgtagtccactccttttttagaaatgccatacccttcgttgtagcggtcgggtatgtaataatcaaggttcgaatagaactgttgaataaacttgtagaccaatgccacggcagtagtaccgtctacgtcataatctccataaattagaatacgttctttctttcccatcgccctgttcagacgttctactgcaatatccatatccttcatcaggaacggatcgtgcaggtcgggcaactgcgggcggaaaaacttcttggcatctgctgccttcgtaattccccgctgtaccaaaagttgtccaagaatcgggctaatccctaattcctgggccaatgtctggcttgtctctgcctgttcgggtgtaatgggtcgataattccatttgtgattcattttatatattgttttttctttttctgttctcaagggttggaaaggcacttcttcccaacaaggggtaaaagtacgaaaaaaagcggaagtgtatagtagataagacgaaaatatttcaaggctgactttttggaggctgatttcttttgcctatctttgtaaaaagtgcaaagaattaaatttgtgagatttctctgtttatgataaaaagaaacttgttaatcgctatcctgattttatgctctatcggaataataaaagggcaaactgtgtcggattcactggcgatcatgtctgcccgatggaaagtggaaagtcctcaaaaaggaataattcataagtatgcttctatccctcgattatatcaggggatccagtctgttagtctgatagaaatagaacccggcgcaggtttgaaagtcgatattgccgtttcggatgagatgaaagagacgagccggattgcttcagaacatcgtggcattgcagcaattaatggttcctactttgatatgaagcggggaaattcggtttgtttcctgaaagtgggcaatcaggttgttgacacaaccactttgagcgaatgtaaactgcgtgtcacaggagctatgcatgtacataaagggaagataaagttaattccctggagcaggcagatagaaaaagaatacaaaggggaaacaggtatagtacttgcttccggtccgctgatgctgaaagacggacagatttgcgattggaattcatgtggcacgaattttatccgaaccaagcatcctcgtagtgctgttgccaccactaaggaggggaaaatattgttgataaccgtagacggacgtttcccggaacaagccgaaggagtgaatattccggaactggcacacttgattcgtattttaggaggtgaggatgcgttaaatttggatggaggcgggtctactaccctttggctgtccggtgcatcggatgatggagtcattaattatccttgtgataatgggcggtttgaccatgctggggagcgtaaggtgcctaatattctttatattcattaatactactctttaatgagagtatttatttagctcaataacggatgggagagtgcttcatccaactgttttacagttatgagcataatcgtgatatattctttcctccataaagttgaaaaaacatagaagtatctgccacctgcaacaaaatgcgtataatatattagtttacaactagttgtagcgttgcagatacctgttgcagatgcgttgcagatagagtatctgccacactgtataatctatacataaacctatttcctatgagtacgaaagtttattaaatgcattaaactcctgttcccaggcggggaactgtcgtttccggtattagaaactgtagtttccacggtaggaaacgagcgtttccaaggcaggaaacgacagttcctatgtatggaaactgccgtttctccgtatggataccaaaactatcttatagctttacatatagaaaccaagcggttttctttggttatataacgcgttgcagatactttatctgcaacgtatctgccgcaggtatctgcaacgctccaactgtttgtcagctagcgtattacgcgctttttgttgcaggtggcagatacttctatgttttttcaactttatagtaggcaaatgtagttcaaaccagttagtcttttatcttgcgtaacttcgcctttttgataaagaacttggctaattctcttcctgctttggcatacgtttcctgaacgcgatacccggaagtgaaatcggtaccccagaagttgttggcagaagcattacggattctgatagaggctacttgctcacccgtttcaatcttcttcactttgcagcttaggtcgacagatgcattctgacgcatgacacccacattccaacccggctcggtgaagtctgtattgatttcgattcgatattgagcgccttccgtacctgctgtgataccaacttcactcatatatttatcgaaaagttccaagaactttggctcaaatcgttctttacggtcgccataccaggcagctttccattgatctcctttgccctcttcttttgcattatattcggagctctttttatctacatattcgttttctgtcagttttcctaccagcatttcatcataagagaaagtgaattgtatcacttgttggtccttgatgaagtcgatagttcctgaagtcataacaatactttgcgcaaatgaaaatgcagtaatgcagctcaatagtagaagtgttgtgatagtctttttcatggttcgaatttgatttattgtttgtttgttgttaaaaggtacagacaaacagtagatttagaattcaaaaccgaatctgacccctactccgtgtaactcccatgtatcgtcataactggaatggtaataataacctccggaactgtaaccataatctgttgagatgttataatcctggaagttatatatcaaggctaaattcaaggcctttttcccttttaaagaaaaacgtactcctactcctatcgaagcatacgctccttctatgtctcctacagcatatccggtttttacatcggcaaaaggcgtcactcttttgttgatgaagttagccctgaagttagcatagattggcgctgcaacaagatcagcatccgtatagtagttgagagcaacaccaccaccaacgaagaaataattattgaattgataaccgtgtgaggttgataattcaattttggaggcattgtagtcgctgacatcaccgatgtatgcaaagtcaacgaaacctttatagccttttaatgtatttcttgcagctttgcggttgttggcctctttgcggtaatctcttgtgtaccgttcttctttagtgattttctccacatcactcatctgacagatgatgaggctgccatcacttgttttaatttttaaggaaacattgggcacttgctcaatgataactcctttgataatgctgccattctttaaatacactacttctgtgtaattttgtgctgcgacataagtactgatacttaacagtaaagtcagcaataatagtagttttctcatgtttatatatattattggtttataatttcttgagtgcgctataaacagagcctgcccagtagttgcgcaatccgaaaccacgtgcttttccatctgttatccattcttcaatgatctcctttgtttcagtattgaagaatacgacttcatacgtgcctctgttgtttgatttatccaggaactgtgcgataaataccatacctacgcccggcgttttctgaataggtaatgcttcgatagccgctttgatttgttctttactaaggctatattctcttttggtagtcatcagctcggccacgttgatgttttcgttcacttgattgactgcatccagtgagatttccgttacttcttttttcaactgttttcctacgttatacttttttgcttctgtgatgaacagctcattgatacgtctgaaagcatctttgaattgtatcggtgattcatctgcaccgaaaactttagcttgggagtagtccactccatagaacttgatagactggatgtctttcaatgcactcttgccttgtccaaaacagaacaggctcgtacttaagaataagaatagaataagtttcttcatatacgttaatgttaaagtgatatagttggtttactaacttccaaaagtagaaaataattatcgtaaatcaatgaattttatcgtttttcgactcattggaggcatttgaatttttgcgatgtattctgccgactcaaaattaatgcttggagccactcttactttcgaacgaaacaggtcttttatctccttggcaaaaccttcgctgcggttttcacttccgatacggatcagaatttcatccgtccccaattcgttggtgtagacttcaatgatgtaattctttaccgaagggatattgtccagaatgtcgaacaatgcaggtggatacaaagtagtccctttgtatttaatcatttgcccttttcgtccgaggatggaactaaggcgaatcgtatttcttccgcaggcacaaggttcggtatgatggtaacaaatatcaccagtcttgaagcggagcagcggcataccttctactccaagcgtcgtgatcgtcacttcgcctgcttctccctctgcgacaggacgattgttgtcatccaaaaactctacgatgataagttccggttgcaaatgcccgccatggaattcgctacattcggtaaaggacgactgcatttcggtggaagcataggtggaatatagctgtaaggcaggccatttgtcatgtatcttctgtccgagcgtatttaactgaaactcctgattgcgcaaagcctcaccgatacagatacatttctgcatcgagcacgcattatggtcgatatgattcttctcggcaaactctatcagtttgataaggaaagaaggaacgaccattccacaagtcggatgaatccggcgaatcgtgtcccattgcagttcggggatgccgttacctacccggatcactcccatgccgagttcgcgtgctcccatataataggcaagtccggccatgaagcggcggtcgatggtagtcatgagttgcagaatatcctttttactgcatccggtggtggtgaaagacaggtactcgttgtaagataaacggtccaggtcctcggaagtgagaacgaaagtcaccggatctcccagtgtgccggaagttgttacatagtcgatgatttgctccttgtctacacagatgaagtcgtcgttatgaagttgcaagtctgtcttggtggtgacagggatttgttgcaggtcttcaatcttctttatctgattgatgtcaatgtggtgttcttcgaacattcgttggtagaacttggagtgtgcttgcaagtaggtcaacgtttgggctaaccgttcttcctgatagcatttgatctcttccggtgagcggaactgaatttcaggattcttttccatctttggattgtttttgaattttctgttggatacgttctttctcttgcaatttgggaatcggtttctttaatgctttttgccagtatacgatggcttgttgcggttgctgcatagcctcgtaataatttcccatcacttcatatacataatatagagaaggattagaggcttcgtatgtttttaaaacatgctcttctattttctccttttttctgatcttcttcaataggagcggagtcaacttcttataggtaagaagatgctggaactccggtgtttcggcgaattcatctgccggaatggtcaagttagaactgtatatttcgtgttgcaagttaatcgtgtcgttaaatatcttattcaggtcataagctacatactttccacattgccagggagaggtagatacccacatcaatcgtttctccggttggaagataacggaatgatgagcaataaattgattgatagccatttcgttagccagtcccaagtctgcattttgcaaacccttgtggttgcgcaggatagaggcggctttagaggcatctatcggcagattctcattgatgagttctttcaatcgtgcaaaacggtatggactgtccgaagtacggatattttccatgtttcgttcatccttgctgaattcctccgattggtaatgattggtgcagatgagccggtcggcttcttttcctttaaagagtactgtcttctctggggatttttcaatgatagcggctttgccatctttggcagaacctatcaagatggattcggagacgaatgtcttccgtttctgtgcgatggcaaaagcctcatcaatcgttgacgcatattgcaggatttctctggtcagaatggaaataggagtggcggaacctgttggaacagcagacttggcggcattgatcgtgacggtcagccccgtttcgttcatgccggatagtacgcctatcataccgggccatcctacggacgcaaatttataaccttgatccggtgtataaaaagccacttgtttattttctgcgaaggcatctcccacatagaaatcgaagttgcgtccgatcagtagagacgaatctgcactttgagttccccaagtggcaaacgaactgcatcccactaacatataatcttgcatggcatgtcccaggtcgtgtgccgaatggtaattcagctgacgttcgtaaggagtgccgataaagtcgtattcatgggtacacgatagcgagattccgtagatctcgtcgcggtattcttcgaggacgttttcacccaaatgacggttgaataaaacgatgaagaaccggaggaacttcagataactgtctgaaggaacaatctcacgaatctgatcgacaaatactttctcctgataatgaagcaaatcggaagacagtttgccgatggcttctcccctttgaaaggcatcccctttcacaaacaactcccacaatccgctttcgctgtggcgcaggaagttgccgtcataatatcggagatcgagcgtatcgttgtagagcacctctgccggaaccatggtggtagtatctgcatgagacacttttgtcatgatgatactgggttcatgtttcggtgtccgcatatccgctgaaaagtagagataacagattccggctatcaatatcacaaggagcgacagcagaacgtagcttgtgtatttgaatatctttttgattgtcttatgcatttcctacttttttagccaagtattcttgtcccacaaattccgcacaagtgagcatggaagtcagcgttacccccagtgcgccgtgcacattcaggttttgacctgtgagaaagagattacccaaccggcttcgtgtagacacaaaaccgatttgcggacatttataatctttgataattccgtatgcggaaccgtccaccgttccggtatagtcgcgataactcaacggagtggtggtgtgaatctcttctatgttgtcggagaaatcaatgccatggctccggataaagcgaagcagctgtttcgtcttttcctgcttgaaggaccgatagctttctccccgatgttcgggagtggtgtctttccatgcagacagttcgtccatatacatcggtgtcagaatcgaaataacactggcgtattgactgtcttcggaagaggcttgcatcgaaatcatgcagttggtggtccgtcccggatagagctgcttgtcataccacactttgtgatctccatgcagatagaggttacggttttggtacggagtgctcttctttttcattaccagataaagcgtgaagatgccgtatgtgttttcgagcgaacggatgcgggatatgtaggcgttcttgatactacggtttttatccagtatctccagggttcgttgagggtgcatgttggaaattacatagtcgctttccaaccgctcttcgccgttgatgatgactccctgtactttttcgttttcaacaatgatgcgggtggcttcgctgttgttaagtactgtccctccattcgcccggatcacgttaatcaattccaggctgacttgcatactgccgtccacaaaacgataagctccttcgatataggaatggttaatcatggcatgttcgtagaaggtggagacatctttcaagcctccgtagagcaaggccgagcctgccagtacattttgtaaagtagggtccggagtaatatccgcaatcagtcctgcggcggaggtgcagaagtatttcattccttccagggcaagtgtgccctgtttcagatggtcaacgctaatcaagttaccaacagtctgaagctgttcggcataacgtttcaggttttctttttcgtgcgggaaggaccggcagatcgtttcgatgaattgcggataccccattgcataatcgtatgtttttcctttatagtagattgtatcgaaagcctcatcgtccaaacgtttcagctttagtttgtccatgatgccgaaatagcggaaatactgattcatcacttgaccttcatccagacttcctacataatgaatgcctgtatcgaataagtgtccttttcgccggtaggtttgaaagcatccgccgaattgcgtgtttttctctacgacgcatacattgaatccttctttactaagaatcgctccacattccagtccgccaaggccgcttccgataatgatgatatcgtatttactcatgttcgttcggttttctgaatatataaatagtgttcgaggtatatttgtcattaggaatgatttctacattcattccgcaggtgactgctatttcccgtagttgggtttctgtggtgaaatacaattctccggcagtccggttgaaattgaatatacgggtggatagtaattccgtgaaccgggtcagcctgtgtttggacgtatttgccgagtttccgtcgcgtatgataatcattccctgcgaacgcagccggtcagcgcatttcaacaacaaagtccgttgatgttcatagctcatatagtgaagcatatcgttcaggataaagacatcgctttccggtagcggatattccaatgcgttgccgtgcctgaactggagatgttcgttgcgtaaccatccgtgttgtgccaaagctattttatcctcatcgtaatcaattcctaaaatatcccggtcttcggaaagcatagacaacatataacagagcggaccgaagccacagccgatgtctgtaatttgcccttgggcgggaatcagacggttgaacagccggtagtttctttccatcttcaccttgatacggatataccattctacgactggtcctttgtagatatagttttggatcagtgcttcgtagaaagcaggattgtccgtcgtgttcttttcccggcagatacgggcgtaaccctccttcatataggcggatatgcgtttggtgcgttcctggtaggtggttccgaaagaaaggtcgtcggccggtatacggggaagtatttccgtgtagatgattcctttgcggatattgaaaggctgtgcctttgcaatgattttgttgttgccgtagaggaggatcggaagaatatccagttgcaatgtttctgccaggtagaaagctcctttgtggaaacgcttcatctttccgttgtaagtgcgtgtaccttcggggaagatagcgatggagtagccctcttttacttttttccgcatccgttccatatattgttcgtagccttcgcctatgtaatagaaatcgacatagcggatgattgctccgaagaaaggagaatgccatacccaatggttggttaccatcaggattttagacgaaagagacagcaataccagaatatcgatgaacgactggtggttggcgataataattgccggatgctggaaacgctcgttggccttgttgatatgttcttttttgacggcagtggctaacaacagaatccctttgcaggtgatttgtatcagtcggcataccaaacgttgtttgctgcttttccgcacaggcaccaaataaaggacagcgatcagtacacggaggaagatacaaccgataaagaaaagcaggaagagcaatacggtccgtatcagcccgataagcgtataaggcggcaatcctttggaagcgggtcctgcaatgaagaaccggaaaatgagtggctgaatggtataggctaccaacaccactgctatcatgccgagaatggaaatcagtgaaatggattgcaaagccggatgcttggcaaaaacaagtgctcccataccgacaactgtggtgaaagcagagaagaagatggctgttttgtgagaattcagtaccttctgacctgtacggtatttgttttgtagcccgtccataatgaagatactgaaatcgtctccaatgccaaagataaaggtggacaggataatgttgatgatgttgaactcaatccccaaaattcccatcaatcccaagatgattacccagctgaccagcatcgggagaaaactcatcaaggtaagttcgatacgtccgtatgagaaccataatgcgaagaatatcaggaaagaagagatatacagaatcaggtaaaagtcgtcattgatggcagatacccatttattggcaaagtaggaacggtcgaagatgactacatcctgggttttgctgaagttctgatacacggtttccttattctggtcgctaatccgtatctggctgataagcatggtgatggaatcggcagaagtttgccattcgttcagtagcttgccggataaatcgtcttcttgtgcggtgtagtgatattcaccgaaaggttggtttagccattgataaaagggatcgaagcttcctgggcggaaacggtattcagcggcagctgtttccagctgttcacggatttgctgttgtttctcatctgtccagtagtctttccattttttcagacgtagctgttgctcttgtggtgagatcagaaattgtgaggcggaagcatagtctttaatcagtccctgatctttcagtgccgataacttctgattggtcattgcataagtttcggtagcttgattcatgtctttgcctacgctgacaaaaagtactgtcttttcgccgttgtcgaagagctgcattaatttctcttccgattgtttgaggtgttgaggttcatagttgaggctcatcatgtcgttgttgaagccgaccttttgtgaggtaaacaaacagataactgtaatgaggagaataccgcctaccaaccatttattcttttcgtaagaatatgcgtttattttctcgatgatgcgtaatatacatccctgtttgacgtctgcctgtcctttcaggaaatgaggcaggtaaatgaggcagaaaagagtagtacccaccaatgccagggaagcgaacaacccgaaatcgcgtaacagatcggaactggtgaatatcaatcccataaatgcgccgatggtagtgaaactacctactgtaagcggataggctatttctttaatcagttgttgcacggtggaaacatggttctgatgtgccaacatgtggatggaatagcttagtgcaatacccatcactgccgaaccggctcccacagcaatggccgagatacttcctttgataaagaaaatcagaaacagggcgaacaatcctccgaagagtaccggagtaataatcaatggtatcgatcgcttccgtttaaacacgagtgagataaatactatgatgataagcagtgccagggaggaagtcagaatcgtgtctttcttgatctgacgggcgttgtagactcctacggagggaccgccgaaatattcggctcgaatggtaggagattctccctgtacgtgttggagttcttcttcgagtatctttatcagttcatcattctttccggtactgccagtgctgaataccggggtaatgaacatcagcaaggtggaaccgtctttggaaaagatgtgttcgtcataaatctcgtagttggcttccagttggaagtcctgcaaatgtttcagggcttcacttcccagtccgagcgggtcccggagaatataacttcttaatgcgattccggcaggagagaggagattggtatagttcttctgcatgatagcttgtatacccttctctgtcaatagggaatcgaatcgttgataatccgtatctgtcaggaaaagcgggagatgctcgtagacaaagtctgtggctcctccgatgaggctttggtctacctgtgcgaaaattcccttaatcagggttcctccggctttttcagtcagggtttgttgcagttgtccggcagcttctatcagggaatcaggttctacttggtgacaggtatctgccgaggatagcataatgataatcttatccttgattttgagattgtcgaataccttgattgtgttttgggagtctttggtgtcggggaagaattgtgtgatgttctcttcgaaccttacttgcagggcaaagaaccccatcaacaggacacaactgatgagtgacaaatagaacagaatcttgtgcctctcaaaataatcatatagtccgataaaaaactgggtcatatcttttttttcctacacgccgtgagcagaatgaacgcgatggttcctgccagtatgctgcatacgactgcaaagataacacttcctattaaatattgctctatgactgattttacattttcaaaagaaagttcgtttaagtgcaggtttacaggttctcccagtactttacagccggttacataacttccgtacagtaaaaatggtatcatcggagggatgctgatgttggctgctacaatagctatgactttgtttaatcggaacaaatgtgccaaaaacaacgtaatcagcatttgatatccccatgccggaacgatgcccataaatacgccgagcatgatggctgctgtaatccgcaggttagattcgggggagtgggtgatgtgattggagaaaaactgcttgcaattcttccaggtcagtttacgaaagaagttccgtggtacgatccaaaggaaagtgacgagtaccagtatcgtattcagaatactgatacgggtgaaatcacggaacgggcggaaatgagaaacccgttcttcctgtggcggataataaacgtgtaccggaatgtttttaacgggattgcctccccatgctgcaaaaacaagtgcttccagttcaaactcatatttggcagtgtaataccacttgtccacattcattcgttggatagggtagaggcggtagccggattgcgtatcttgtagtttgataccggtttcgagggtgaaccaaaagttggaaaacttattggcaaaggtgttctttcccggcatattgtccgaggccagattacgggagcctaccagtaacgtgtccggttccttttctatggcttcaatcaatacgggaatgtccgaagcgaaatgctgtccgtcggaatcaatggtgatggcatatcggaatccttgcttctttgcgaaagatagtccatgtttcaaagctaccccttttccttgattgacagggtgggtgatgatgtgaagattagcttcctgattcagtatttcaggtgtttcatccgttgaaccgtcattgacaacaaggatttccggtgcatagaatcgcacacttgttatgacttctgccagtgtcttaccattgttgtaactcgggatgatgacgatgatccctaattgtttcaatttttcgtgccaataggctgtacttatttgctccttcatgcttttggggtaagtgcagcttttagtttaatgaaacattcgtcttttatattttcttcctttataatgcttccttttcctgtgtcctcctttacaatttcctcttttgcaatatcctctttcacaatgtttttatttacagtatttccctttatagtaccttccgcctgcaactggattttgccttcttctgtctctttgagaaccaatacgattgctatccgaggcgtttctataggattgatagccgaaagaaatttgcaggaagatacttgtgttatttgcaacttttgctgacgaatattttctgcacattccttgataagttgcaatagacaaactccgggaactaccggatgttcaggaaaatgtccctgataaacagtgtggtcaggattcaactctatctgaatagtccaggtggttgaatccgatgactcggaggaaaggatagtatagaagttatcaagtagcatatattaaatttctttagatagtttatccagacggatcgttaaccgtatccacggatgtttgatttttatttgtgccggatcacccggagtgtcgtcggtaatgtagaccactgattttccaaagccttttccactggttcttttttgggtagcattgtctttggtggctttcacacggacgtcttttccatttaagaacaaacgcctgaaatccatctctaacagtttcaataccttttcttttttcatgggttcaatgcagctgttgacattaaattgatcgtcatgcagagaaaaatcgaaaaggcttaacccgaagtaggtagacgccacgatccggatttcgttatcaggcatacggcgtactatcagcataccactcatgtgatgtttcatgaaatccagttggatattgtatttttgtgattcttccccttgtgtcagttcgataacaggaggcacagtactgccttccccgcttattcgtggagagcaggacgtttgaacctgtattcccaagaataacagaaccgtcaggctaacgaatcgcaaacttcgtctcattcttcagagagttgaactttttattatagaattcgtattctgtgtagtttgtagctgtttcggacagacggagtttgtgcaccgacatatctttcttgtccaaataaatttcgataccggcaatataggcttgtactgctttgttagtcggcttaattttaaccaaataatatcgtgcgtcttcaaaatattctagctggtagttggatgacatcttagacaggtcgcctatcatacacgcagttagcatatcctgcatctgtgccatcattttgttcgaacttaggttcataatacttttcttgccatccgatacgattttgagcttactcccgtttatcacgatgagataatccattgggcggaagtattccatacagattttattgctcttttggtagtagaacttccctttggaagtaaccttttcgtcgaatacatcgagatatttcacttgggtaaaatcgctttcgatggacttcacggtttgtgcctcctttgccaggcggttttcaaactcggtcttttgcaccatctttttcatgctctgtgcatggacggtggcgatagacaagaagaaaagcgataagtatagtaataaagttctcatacatttttattttatgccaatagtttgtccggacggacaacggtatatccttgttcttttagtaaatccagtatttgtttcactaactggtcgctgccgggcatccggtcgtgcaacagaatgatggctcccggtttaagacgtttccgaatcctggcaagtattttgtccggagctgactgttgcgtatctaatgtacggatgctccatcctattgaggtgtatcctaactgtcggacagctttcgcaatcgtaggattagtgacaccgaatggcggacgaaacaaagtaaccggctgcgaagttactcgttctagttcacactgacaagtttgcaggtcttttttcattttagagagtccatatagcggaaataaaccggaatggctatatgaatgattcccaattagatgaccttctgttaccatacttttcaataaggcttcatttccttttatcttgtgtccgatacagaaaaaacaggcagttgcctgatattcttttagtaccttcaatactttgggcgtttgaatgggatcgggaccgtcgtcaaaagtcagggcgacaactttttccgtagtacgttttttgcaaaacgatcgtagataaattcccgactgaatgctataggaagcataaacgagaaaggacagtatcaagaataaacatagaaggaggcaaacaatcatcatacgcttttccgaattagaatcaatgagtgattgatggagtggtgatgattataaatcaatatattggtaggggtagtgcagtttattgatgcttttactgctttccatactgcatacgatgaggcggtaggatattctccacattcgtccttaaaactaagatgaatactttccgggaaaaggttggtttcaagctcttcatagatagagttgctttcattcatgatactcttctcatttttgttctttccggtaactaaccattgaatatcctgacactctaatccgtttcgttgtaaaaaacgaataattcgggaactgatttcttctgtcgtatgttgtcccgtgaaagtttcaagtcctcgtatttctgctaacggatgctctccggcttcccggcttaataggaagaattgagcaccttctccggcttctattcctttcagcagtcccaagcgttgctgaatgatgtaactggtttctgtcatttcgtccatggctcccaccagtatattctcgtttccttcttctattttcatcatggcatccagcaaagcgctttcaaaacttagtccccggtgaacataagtcatgttataggcatgtatttgatgaatcagtgctatttgtgcaccaattgtattgaatgtcgactgaataaaaggagtaggattcagcatccgctcttcattatttaacaggttgttcagaaacttttccgtatcaaccaggcagcccagccctgtggctgtgataattccccctatcttctcgggagatagttcgcccatacattccaatccgcaagccactcccattttcacaatacggctcatgcgcctgcgcaaagttgcattggcaataatatccttataatcgggttcacaagcctgaagaaaaggacggtttgctgaaacatcgggcgaatcatttactttcggattattttcttgtgaatgatttccttgtggatggatagaagcgatgcgttgaatataaactggctgcataggctcaaaaacttaaaggttcgttcgttttggtaaattcgttgcggaaaagaggagcgacgagtcgtttcctccgaaaccgaaagaattggataatacatggcggatcggcaatcctttctggaaagacgtttccggtatcaatcctgtttctgattttactcctgtttctgacaacagttctgtttccggcatagcctccgtgaaattcagattcggataaatcatgcctttatctatggaaagaacggaataaacagcttcaattccttcggaagctcctaaagtgtgtccgataaaagcttttaccgaactaaacggtggaacatgttctccgaagattcttcgcaatgccataccttccgatgcgtcattaccgggagtacctgtcccatgtacgttgatataatcaatatcttcaggagaaatgccactggaaacgatggcttcgctcattgatagaaaggcgccatctccttcgggagaacttccagtttgatgataagcttcatttgtattagcgtaaccgcttagttcacagtaaggagctctttgcagtgaactttctgattgaagcactaaataacccgcgccttctcccaaatttaatccggtacgcgaacggtcaaaaggacgacaatgtattttatccaagatcatgagagagttgaacccattgagcgtaaaccggcaaagtgcatccgtacctccgacgataacagcatccagttgtccatgtttaatcagtctcgctcccaacataatagcattggctgccgatgaacaggctgtactgatggtggttataaaatcattgatacctaaatacgaagctattaattctgtgctggctccacagtcgtgtgaaatcacttcccgcaatcgtccctgtttcgggtttttcttgaaagattcatagaaacgctcgcttaaatccataccgccgacagaggtggcggaaataaaaccaatacgtaacggttgctggtctttttgcgaggttactgactgattcggtaactgatttttttgctgattggatgatatatgcaagtttagtcctgcatcttccatcgcttctttggcggctatcatgcctagcaatgctgtgcgtgatactgtacgctgcggaggtaaagataatagttgtttaagttcttcattgctacgtttcacttcagatacgggtacatcgagagcagtcgggaaaagagttacttttccgatgccatgcttcccttgttgtagtgcctctatattttcggaaactccgatgccgatgcccgaaacaactcccaatccggtgacgtaaatcttcataagttaagctttccgattagcaatgatgtagtcagtcagtgtacataccgagtagaagatttgtttgccttcactgggattctctattttaatgccatattcacgttccaaaatcaggatgatttcgagtgcgtcaatggagtcaaggccaagaccttcgtcgccaaacagaggggcttcatcgtcaatatcttccggagtgatttcttcaaggttcaactcttcgattagtttacctttcacttcgtccatcagttctcttttggtttgatctaaattattcataaatcgttgatatattattaagttgtttaaattctgcttgataatgtccgtacagtagttcgcaccagcctatgatgcatgtgcgtaacttacctttcgccatcacaattcttgcgtaatcctctaaggaagcagtgtcggattgctgacagacaaagaatgtattttctccctgaattttgtgtcgtatacagatttctcccaatactacattggggagagtgtagacaaacacggcaggactggcggctttatctccttctttattgatgatagcttgatgtttgcagtccgtatctaaagaggaagatgcattggctagaatgattccaatctctttcggctggtagttggtatctttcaataaatatccggcagctacatatcccagcttacaaagattatccatcttgtagaacttcatattgttttctcccagatgcttgtatgcttcccggataaacggcgcaaagtcagtctccgaagaattgaatatagctgttccttggttttctaccactcccggtttgatcgtgactatattggctgattccacgacagctttgcaaaatgccggagaatcggttttctgtttcaaatgagcatctgggagagataataccagtgcggcattacagcctccgaaaccggaagcggttttgatacaacatttcatcggcatcggctgatgggtaccataaacggtgatgggcatgggaacgcccagtgtctcatatcctaaagttccgtagtatattccttctttcagttgctctatgcagagtatggtttcaataatgcctgaagctcctaatgtatgcccgaaataaggcttaagactatttaccggaactgctgacaatcctgccaaatgtatggctttggattccatttcgtcattataaaccgtagctgttccgtgtgcattgataaagctgatatcttcgggaagtgctccggcttcttccattgcctgattgatagccagcgccagtccgtctcctgtccgggaaggaccggatatatggttggcatcattgctgatcgctcctccggatagaataatatgatttgcgtttccttgagtttctaaaagcacagctccacaggcttcgcctagacttaatccgtcccgttgtatatcgtatggccggcatcggtgtgcgctgactgaccggaaagacaagaaaccgctggtaataaaatgagaaagaatatccccgccggcgacaatcacccgtttgtaacgccctgattctatccatctcttggcaacaaccagtgccgagactccagatatacaggcgttggagataacttctacctgattggctgcctcaaaaaaatgcccgattcgttctgccattttccaaagaaaagccgggctgtcaacagataattcctgtaaaaaggaaggattgtcaattgttgattgtacagaatcgcctggcttgtccgaattagttcttttttcttgattgctcaataaatcaatatttcccttcgtggtggagagtaataaagcacagtccgactcttgcagattcactcccgattgggaaatcacttcctgaatagtcaatataaacagttgctctagccgggtataagaggaaatatccagctcctttgcccgcttttccaactcgacagaatcaatcatccctgccagaatctgactgtcagaaatccgtccggcttcttgcatacgaatcccgcttcggtagtcatggattgctttcctattctccgaaatgccgaaacctaacgaactaatcagcgtatgggctgtgatgtatatatttaaaggatgttccatttctttttccattccagataaaacggagggttgataagctccagctctttattcaggttcaggaacacttgtatggtgcttccggtggccactacactctggtcggtagcccgatagataacgtattcgaattttatcttggctgcctcacaggcaatatagcgtgtttcgataatcgcttcttcaccaaaggacaatgattgcttgaactgacaggttaaatctacgatgggaaccatgtagccttcccggtaaatgctcatataatccaaaccatactgtttgccgaaagcttcccgtccatcttcaaagtagcgcacgtactcgccatgccatacaatttgcatggagtcaatttcgctgaaccgtactctgaaagtagtccggttagtcaaagctgcaatctgttgatttgttttccgtttcattcttttttgataaatattttcatcttacattcagcaatcagctcttcttccgttttcacttgtgccgaaataagcgtaatatcgaatacctcttgtacgacggtaatctctgtaaataatttcattccggcttccggcaaattgtagattttaagtttgtctaccgaaccgataaaacctaacggaactttttcaccctgccgggtataaataaacccgatacgtgcagccgctgattgtgcgatatgctcaataattcccggctcttgcagtctgcctgcctcacaaaataaattgtcggtagtgacagtcagtccggaatatgaacggttttcttcaaatccgaagaaactgtccaccataacgattggcggacgctgtggaatcaggttgagtattccttctccttgtatgacggcttctctgttcatttcaatctgcattgtacgatgctgtgtcccattcctaaatggtcatgtatctcttcgatttccaatcctgctgcttcgatgcatcgttgcatatcgtccgaatgatacatcttgctgtttccgtttgccatcgctgtaaaatagagactgatttgtgtcaggcaataagcggctgtgtcaaatttctgtcggttccagaaagtctccataatatacaggcggctctctcggttcatagaacgggctgcacgggtcaatatgctggtaacttcttcttccgagaaacaatcgaggaactggctcatccaaatagcatcgaaccctgtcgggaaaggaacttccgggtcgagcagattggcaccatgaccgtggatacgtgtagctccgggcagttctttggtttgttgacgcatcatctccaattgttgcggaaggtccatgatggttacttccactgtgtcgtcatagcttacgcatttggtcgcccaacggccggtattgcctcccacatccaataaagtcttgggatgacgggcgaagacaattgccagtgcttcatcgaacgaacaatccgagtaataatgatcgaaaccgaaccagctcttttgtacctgtgaaggcagacttgacaacccttcatagatagtactccattcaccgaatactttcagtccttcaggacgtccggtggtaatggcttcttccagatgaaacattccctgatagttaacatcatggttgaagtccatattaacacgtaccattttgtcattgagcagaaaccagccggctttcgcaaggcagtatcgcccttcacgcaacaatacggtgccgatagtcaatgatgcctccaacaatacttgtgcgccataagaggacagcccacaagctttgctgatttcttcttgcgtcatacctttgcgctcgtcggccaataactggaaaatgccgaatttaagcataaggcgtgatacctgaaaaacaataggcccaaatgctatttcttgtgccaagcgttgtgcctctaccgctgtcaacggttctttgtcatatttattctgttgcatctttttgtttctcttttaaatccggtgactgctttccggcaggttcccagaatggataataattgaaccattgttccggatagcgttttagtatctgttccaaagcaacagtatattgttcgagcagagccatctccgctttcttttcttttgtttgtactaccggttccgctattataaaatgaaaacggtaagttcttcccggttccctcattgcaaagtagaataccaccggaactttcattcgcgaagccagcaggaaaggaccggcagggaaaggagctttctgtcccagtaaaattcctgtcagaagtttctctttgttcagataacggtcaccctggaaacatacatattctttttggttgatcgcctcggttatgcggaaaacgtgtgtcaggttgtcttcattgacagggataatcttaaactccttgtcctgaccgtttttctccaggatctctttgattctacgatgttcggcatcgtacatcacgatattgattttctttccgtaatcatcaaagaaaggaacgcctatttcccagtttcccacatgggcgccaatcataatcactccctgttcactgttcagcagttgcagaaactccggataccgctcgaatttgaactgatattgatttacttttccattaccgatggctaccttgtcaatcaggatttgtcctaatcggtaatagttgagtagtaacatcttcaaagaacgtatcctattgtatttcagaatgtgacgggcataaaaccaggtgcttttggttgctttcggagcaaacggtatgaagtagagcactaccaggcttagaaaaagataagcggcagtgatgcccagatacttaatcaggtaaataaagaataagtatccgaacgttcctccccgggttttgcctttccacgtcgacatatttacttggcttcctgcatacgggtgataacgagatcgtagaagtcctggaaggttttgatacctgcaaagtcttgtccggttacgttgaaaccgaaattcttttctaccagtaccaccatgtcgaccaagtccagactgtccagttcaagagtttccattaacggcgcatccggctggatgacgtcgatgtctacttcaaactcttctgccagagttgttcttattttctcgatgatttcttcgtttgtcatatatctgttttctttagtaatttattctttgatttggcgtataatcagggtggaattggttcctccgaatccaaacgagttggaaaggaacgtgtcaaattccagatttacccgttgggtaggtatattcaactgtgcggaggcctcgtccggttcctcgaaattgaggttgggagcgatgaaaccgttgttcatcatgagggtggagtaaatcacttcactggcacctgccatccacatttcatgtccggtcatggacttcgtggaagtgacatacgggtgatgtccttcaaatacttccgcaatggctttcgcttcgttcaggtcgcctaccggagtggaagtggcgtgtgcgttgatataactgatttgttcgagtgcaatacccgcatctttgatggccatctgaagagaacgtttcggaccgtccacattcggtacggagatatgatctccattggaagagaaaccgtaaccgataacttcggccaaaatgggagctcccctttttactgccgattcatagctctctaataccagactggcggctcctccactcggaatcagtccgtcacgtcgtttatcaaaaggtttggaggctttctcgggctctgcttcctgggtggaaaatgcgcttagcccgtcgaaactgccgaccgcataaggatttacttcttgtgcgccaccgcaaagaatacaatcctgcaatcctgatttaatgagcagataccccatgccaatagcatgggaaccacttgcgcaggctccggcaatggtgaagttaactcctctaagcttgaagataaccgacaggttcattgtcacggtagaattcatcgactggaaaatagaaccggaacctaccaacgctgtgtttttcttttcacgaatgatgtccactgcgttgataacaggggcggcactactatcattgccatacaagatacccacttcattagcttcgagaaaagcctcgtcaataccggcgttgcggaaagcctccaaagtagcgagataagcatattctccctgttccggcaggcagagacgtttacgacgatctaatagtttcttcaagtcgggacgttccaatatgcccgttaatgcagaaaaatagcccagctctttccgtaccggatctatgccaatccccgatttcccattgtatagtgagtcttttacttcatccaggttcttgccgatgcaagagtaaattcccattcccgtgataacaactcttttcattattttgtctattctatgcttttgttttaagtatatagtcctccgttgatggaaatcacctctcctgtgatataggatgaggccggagatgccagaaaaccgacgagatcggcaacctcttccgcagtaccgaaacgtcctgcaggaatgtgttttttccattcgttctcatcaatcccttccgtcatatccgtgcggataaatcccggagctactgcgttgactgttacctttttcttggccacttcttgtgccagtgctttggtagcggctattacgccacctttggctgcggaatagttggcttgtccgggcattccctgaatacctgacaaggatacgatattgacaatacgtccataacgcttgaccagcatattcttcaataaaggctgtgtcacataaaagaatccgttcagactgatatcgagcactttgttccattcttctcctgtcatccaaagcatcaggttgtctttacggatgcccgcattgttaatcagtacttcgatgtattcgtcaggatgttgtgacgcccagttgttcaaggcaagggcaatagcggcagggtctgtcacatcgaacttcatgatttctccgttacttcctttttcctgcactaactgcaacgttttttctgcttctgcgtcgttactctgataattaatcagtataaagtagcccatttccgccagtttgcaactgacagcacggccgatacctcggcttcctccggttactaatgcgtatttcattttatttattttcttttttgagatagtccatcattctttctatctctttatatttaggtgtatcattggtaaatacagggaagaagctacgtatctcttcatacacctgccggcttttgggacttagacgatcctgtattttcaggtagtcgatggcttgtgccattcccataaattgaatagccatcacctgataagaattctcaatgactgtttttgctaatagagccgagttggttcccatgctgacaatatcctgattatcgttgttgttaggaatactgtgcacatacatcggatttgataatgtctgacattcggctgtagtggacgttgctgtgaattgcgaagcctgcaaaccgtagttcaatccaagtactcccaagtttacaaaaggaggcaggatgccattgatacggtcgtggaacagataattgatctgtctttcgcaaagcatggtcagtttagtcatggcgattttcagtttatccatttcgaaagagatgtaatctccgtggaagttaccgccatgataaatattttgtgtgtccggatcgacaatcggattgtcacaggcggaatttatttcgttaatcaatacttcttccgcattcttcagctcatcatagatgggaccgaggatttgcggaacacatcgcaaggaataatagggctgtactttgtgctcgaagattttttctttgtgcacttggttgtatagctcattctctctttgaagtacacatttgctgcccgctacccattctctcatcatagcggctatctcttgttgccctttgtgatgcttggcctcgtttaatgcctgtgccatgaaatcatcataagaggcggcaatctcattcatcatgacagaagcggctactgaccagcggagtagctttttggcataaatcagattgacgataccgattcctgtcatcacagaagtaccgtttgtgacggataatccttcgcggatgcgcattgaaaaaggttgcagaccgttttcctcaagcacagtagcggcatcacgcaatttcccctgataaaaaacttccccttctcctattaatgtcagggcaatatgggccagttgcacgagatcgccgctggcacctacacttccatgttcgggtatgaacggataaattccacggttgataaattcacagagaagagataccagctccatgtgtactcctgatttcccctgtagaaaagtgtacaggcgggcaatcatagctgcttttacataaagttcgggaagtggtttgccggcaccggtggaatggcttcgaatgatattgtactgaagctcgatcagtgactgatcttctatccggtattgtgccattgggccgaaccccgtattgataccataaataatcttatcgctggaaaaagattgtaggaaatcgaagctttcctctacttttcggatgcattctttagagagttccagcttctcattatcaaacaatactttataaagggtatctaaatttatacttttgtcagctatcattttctgtactagatattttatgccttattaattaaggtacaaaaataggcaatttctgttatatagcggacatgaatcagaataaaactttttccggagaattggttttgcttgttttgtttctcattcgtgagggggctttttcaaaaaaaactatctatgctttttgcaagtcccgttcttcatatttgcagatcgcctctatccattcttctgtcagtggcatggattcatgtctttcaaggtcgaaagtaaccataacagacttgcagatacattttacttcattcgtttctgtgtcgataacccgctggatcaggtgaaagcttttggtgcctatcttagaaacagcagtctgtacggcgatatgatcggatgcgaatatctgtttgacgaaatccgcttcgatatggacaacgacaatcccgatcttttcccaatctactccggggcatactgaagcgaagtattcagtctttcctaagtcgtaaaaggagaagtaaactgtgttgttgacgtgaccaaatttgtctacatcattgaatcgcaattggataggtaatgtgtgatgaaatacgatttcttccattgttttctcttaaacgttttaaattcgacacaaaaatagcacttttgctttcttgcttgaaattgaggcaaagatagagatttctaatgattctgctttcggagataaggaagattttcgttaataatcgtttaaaacgaagttttgggatgtttgtcctgttagggaaacacgcttgtaataatgtaatagttaaattattgtctgccaatagttgattttaaagggtgatttaaaaacgtcaggatagatttcactaaatggaataaatgtgttatttttgcgtcttgttcttaacggaaattaatcaagaaatgatagaagatattaaaaaagcctgtcaggtgatgaatgaaggaggagtgatcctttatcccactgataccgtatggggtataggctgtgacgcgactaatgaagaggctgtacgccgggtatatgagatcaagaaacgtgctgatagcaaagctatgttggtgttggtggattctccggttaaagtggatttttatgtacaggatgtacctgatgtagcatgggatttgattgaagttgccgacaagccgttgacgattatttattccggggcacgtaatttagcacctaatttgctggccgaagatggtagtgtagggattcgtgtgacgaatgaagatttttccagaaggctctgtcaacagttccgtaaagcaattgtttctacttcggctaatgtcagcggacagccgggggctgctaattttagtgaaatcagtgatgaaatcaaatcggcggtagattatattgttggctttcgccaggatgatatgaataagccgaaaccctcaagtattattaagttggaaaaaggtggagtgataaagataattcgcgaataaatgaaaggagaaaaacttagtttattgcagcgttgtatcaaatggcgggaagcgaacataaaggaaaagcaatttatcctgatattaagttttctggtcggaatcttcactgcgtttgctgcgttaatattgaaattctttatccatcagatacagaatttcctgactaataatttcaatgcaacagaagctaactacctgtatttggtatatccggtagtcggtatttttcttgcaggttggtttgtgcgtaatattgtaaaggatgacatcagtcatggggtcaccaaaattctatatgccatctcccgtaggcagggacgtatcaagcgacacaatatctggtcgtctactatcgccagtgccataaccatcggatttggtggatcggtcggagcagaggcgccaattgtactgacaggttcggcaatcggttccaatctcgggagcgtgtttaagatggagcatcgcacgttgatgctgctcgtaggttgtggtgcggcaggtgccattgccggcatttttaaagctccgattgcgggactggtatttaccttggaagtgctgatgattgacttaactatgtcttctttgcttcctctgctgatttctgccgtgacagcagcaactgtttcgtacatagtcactggtacggaggctatgtttaagttccacctcgatcaggcattcgaactggagcgtattcctttcgttatcttgctgggaattttttgcggactgatttcgttgtatttcacacgtgccatgaattcggtagaaggtgtatttggcaaactcaataacccttacaagaaactggcttttggtggtgtgatgttgagtgtattgattttccttttcccgcctctttatggtgaaggatatgatacgattaatcttttgttgaatggaacgtctgccgaagagtgggatacggtcatgaacaactctatgttttatggctatggcaatttgttgctggtttatctgatgctgattatcttattgaaagtatttgcttccagtgcaacaaacggtggaggtggttgtggtggtatctttgctccttcgctttatctgggatgtattgccggttttgttttctctcattttagcaatgactttgctttctccgcttatttgccggagaagaatttcgcgttgatgggaatggcgggagtaatgagtggtgtcatgcatgctccattgacaggggtgttcctgatagccgagctgacaggtggatatgatttatttcttccgttgatgattgtatctgtaagttcatatctgacaattattgctttcgaacctcatagtatctattcgatgcgtttggctaagaagggacaattgctgacacatcacaaggataaagctgtgttgacgctgatgaaaatggaaaacgtggtggagaaagatttcgttgtcgtacacccggaaatggacttgggcgaactggtgaaagcaattgcagcttcccatcgaaatgtctttccggtgacagataagaaaacgggtgaattgttgggaattgtattgctcgacgatattcgcaacatcatgttccggcaagaactttatcatcgtttcactgttaataaattgatgatatctgctcctgccaaaatcttcgatacggatggaatggagcaggttatgcaaacatttgacgatacgaaagcctggaatcttccggttgtagatgaggaaggccgctatcagggatttgtctctaaatcaaagatatttaattcgtatcggcaagtgctggtacatttttctgaagactaaccggcaaggtgccggacccaggtttctatgcagataacaggtttctatgtagattataagacaattatgaagaaagaggacttaagaatagtatatatggggactcccgattttgcggtagaggccctgcgtcaattggtagaaggcggttataatgtagtgggtgtgattacgatgcccgataaacctgccggacgcggacataagattcaatattctcctgtcaaacaatatgcgctcgaacagaatttaccgttgcttcaaccggaaaagttgaaagatgaagcttttgtggaagcgttgcgtgaatggaaagcggatttgcagattgtagttgctttccgtatgttgccggaagtggtatggaatatgccgcgactgggtacatttaatcttcatgcttctttacttcctcaatatcgtggagctgctcctatcaactgggcggttatcaacggtgatacggaaaccgggattacgactttctttttgaagcatgagatagataccggagaggtcattcaacaggtacgtgtgcctattgcagatacggataatgtagaagtggtacatgataaattgatgatgttgggaggaaaactggttcttgaaacagtagatgctatactgaatggaacggtcaaaccaattcctcaagaagaaatggcagttgttggtgaactccgtcctgctccgaagatatttaaagaaacttgccggattgactggaaccagccggtgaagaagatctacgattttatccgtggactatcaccttaccctgctgcctggagtgaactgattgcttccgaaaaagcagaaagtgtggtcgtgaaaatatttgaaagtgagaaagtttatgaatcacatcaattggctgccggaacaatcgtgactgatggcaagaaatttatgaaagtagctgtaccggatggatttgtctctattctttctttacaactacccggtaagaaacgactgaaaatcgatgagttacttcgtggttatcacctggaagatgggtgtaagatgaagtgaactgacaataagatagaataaaaaaccgtcccgaacacgagacaattagaacctaaaataaaagaattatgaaaccgattatcgctccttctattctttctgccgattttggatatttggcaaaggatattgaaatggtaaaccgcagtgaagcggagtgggtacatattgatattatggacggagtatttgttccgaatatttcatttggctttccggtactgaaatatgtagcgaagttaagtaagaagccgttggatgtgcatttgatgattgtgaatccggagaaattcattccggaagtaaaagcattgggtgctcatacgatgaatgtgcattatgaagcttgtccacatctgcatcgggtggttcaacaaatcagagaagccgggatgcagcctgctgtaacgatcaatcctgctactcctgtagctcttctgcaagatattattcaggacgtgtatatggtgcttattatgagcgtgaatccaggatttggcgggcagaagtttatcgaacattcggtagaaaaagtgcgtgaactgcgtgccctgattgaacggacaggttcgaaagccctgattgaagtagacggtggcgtgaacctggaaacaggggctcgtctggttgaggcaggagccgatgcgttggtggctggaaatgctgtctttggtgcacaggaaccggtagaaatgattcgtcagttgcacgaactgtaactaatctattgaattccttttatatccatcgatatccatttatacgcctgcttatcccctggatagcaggcattttttgtggagatcatttttttgaccgttcatgggcccccctttgtggtattctcttctttggcttttttgctgcattgtcttttgctctttattttctgaagcgctattcgctgcgatggtgttttgggatagctatctccgctctttgttttacgggaggatggcttggaatgactggacaattgcagcaggctgtctgctcttttccgaaagaagaaactgtgtaccgggttttgataacggatacgcctcaacctaaagaacatacttacctctgtcaggcattattaaaagaacgtcgtgatactgcgggcatatatccgataggacatactgcggttctttatctacagcaagattcgtctgcctcccgtttgaagagtggagatgaactgctgatttctgctcgcatttctcctcctctcaacaatcgaaactttgatgaatttgattatgcccgcttcctgatgcggaaaggtattagcggaacaggatatgttgcatccgggaaatggataaaatgcgacggaatgaataactttgacctcaaaagtgtagccagctcttgtagaagaaacgtggtttcactttatcaggaactgggattcaacggggatgaactggcagtactttcagcactaacaataggagataagacagaattaagtgattcggttcgtgaaagttattcggtggccggtgcaagccatattcttgctctatccggtttgcatatcggacttttatatacaatgatctttttcattctgaaacctattgcccgaagaggaaatataggtagatgtgtgcgttctgtttttcttcttgtcttattgtggacctttgctttttttacagggctttctccgtcggtagtacgttcggtcagtatgttttcgattttaactatggcggatatggttggtcgtgaacctttatctttaaatacattggcagtagctgcgtggttgatgttattctgcaatcctgcatggctgttcgatgttggttttcagctctctttccttgctgttgcttctatcttgcttatccaaaagccgatctaccatttgattaccgtgaaaagtagaataggaaagtatgtttggggactcatgagcgtgtctattgccgcacaaataggaacagctccgcttgttctgttttatttctctcgattctctatgcattttctattgacgaatctagttgttattcctttgattacgattatcttatatgctgctgttgtaatgcttcttctgactcctttctcctggcttcagatagaagtagccggaggtgttaagaagctgttggaaggacttaatttctttgtccgatgggtagaacggcttccttgcgcttctatagatggaatttggctttatcagtcagaagtgctaggtatctatattgttatcgctctgctaacctattatttcatgaatcgccgataccggaatctgcaaatctgtcttttttctatcttgttgatggggacttatcatgcaacactgtattggctggattgtcctcaaacgagtttagtcttttacaatgtgcgtggttgtccggcagtacattgcataaaaagtgacgggcaatcctggataaactatatggatactctctccaatgaaaaacgtctgaaacacatgacagctaactattggaagcgtcatcaccttcttcctccccaagaaataacggctgattgccggcacgctgaacttaaccgtcaacagcagattatatcctatcatggttgtcgtgtatgtgtcataaacgataaccgttggcgaaacaaatccaccgtttctccgttatatattcagtatctttacttatgcaaaggatatgacggtcatctggaagaactcgcccaggtcttttctttctcttacgtcatattggacgcgtccctctcggaataccgcaaacacctacttgaaagcgaatgcaagaaatccggtctgcgatttatctctttgtccgacgaaggttctgtccgctttttgctctaagtacaaagatttatcgtacatttgcaccttgataaagtttaagagtatgttgacgaaagtaattgaacaagccaaaatagaccattttaccaaatggtttgaacgagctgacaaaatagtaattgtatcccatgtttctcctgacggcgacgctattggttcatcattgggattatatcatttcctggattcacaggaaaaaacagtaaacgtaattgtgccgaatgcctttcccgatttcctgcgatggatgccgggcagtaaggatattcttttgtatgaccgttacaaagattttgccgataagttgatagccgaagctgacgtaatctgttgtctcgacttcaatgcattgaagcgtattgacgatatggcagatgctgtggctgcatctcctgcacgtaaaatcatgatcgatcatcacctgtatcccgaagatttctgtaagattgtaatgtcctatcctaagatttcttctacttccgaattgatattccggctgatttgtcgtatgggatatttcagtgatatcacgaaggaaggtgcagaatgtatctacacaggcatgatgacagatacaggaggattcacttataattcaaataaccgggaaatttattttatcatcagcgagctgctttccaaaggaatcgataaggatgatatttaccgtaaggtgtacaatacctattcggagagccgtttgcgtttgatgggctatgtattgtcgaacatgactgtttatccggattgtaattcggcattaatcacattgacaaaagccgagcaaagtaagtttaactatataaaaggtgatagcgaaggcttcgtaaacatccccctttccatcaagaatgtttgtttctcctgcttcttgcgggaagatacagagaagccgatgattaaaatctcccttcgttcggtaggaacctttccatgtaatcagttagccgctgaatttttcaacggtggcggacatttgaacgcttcgggcggtgagtttttcggaacgatagaagaggcaaaagcggtctttgagaaagcgcttgagaagtataaacctttgctaacagcaaaaagctaaagatggaaggttaaaagtgaatatggaaaggttaaaagatacgaactttcaacttccccctttcaacttttaatgattttgagatacatttgtgcggaatatagctaaataacagataatgaagaaacttgtatttttatttctctctttgttaaccgccggaagtctgttccaggcatgcgacaattcgaagacttatgcagaaatgctggaagacgagaaaaatgcggtgaataagttcatcaaagataatgatattcgtgtcatttcactggaagagttcgaacgagacactgttacggcttcaaaagaagctggggatggatatgacgaatatgttgctttttccaatggcgtatatatgcagatcgtagatcgtggcgggaaagatgaagataaaagtgaatttgagaatgcggtagacacttttgctaataataatgtcatttgtactcgttatgtagaaaaggatatgatgacaggagaggttacttgcttcaatgtacctttagaagaatggatggatgctcctgattattataagtttccattaacattccgttatgtacaaaacgcgtctactgtttatgggatcgttttatccggtagtttggaatatgatttattatgggttaatcaaggttatggaactgcaattccatccggatggttgattgccttaccttatttgcgtaataatgcacatgtacgcctgattgtaccttctaagatggggcatacaactgcacaacaatatgtcaatccttatttctatgatatctggaagtttgagaaagcaaaaagctaaagcactaacattagataaatcttttagttaaaaacctatgactctaatcaaatctatctctggaatccgcggaaccatcggcggaggagcgggagaaggactgaacccgcttgacattgtaaaattcacctcggcttatgctacgttaattcgtaagacctgcaaagcgaagagcaacaagattgttgtgggacgcgacgcccgtatctcaggtgaaatggtaaaaaacgtagtagtcggcacattaatgggaatgggctgggatgtagtagatattgatcttgcttctactccgaccacagaacttgctgtgacaatggaaggcgcctgtggcggtattatcctgacagcttctcataacccgaagcagtggaatgcactgaaattgctgaatgaacatggcgaatttctgaatgcagccgaaggcaacgaagtacttcgtattgctgaagcagaagaatttgactatgccgacgtagatcacttgggctcttaccgcaaagacctgacttataatcagaaacatatcgacagtgtattggctctcgatctggtagatgtagaagctatcaaaaaagctgatttccgggtagctattgactgtgtaaactcggtaggcggtatcattcttcccgaacttcttgaacgtttaggtgtgaaacatgtagaaaaactctactgtgaacctaccggaaacttccagcacaaccccgaaccgcttgaaaagaacctcggtgacatcatgaacttaatgaaaggtggaaaggccgatgtagcttttgttgtagaccccgatgttgaccgtctggcaatgatctgcgagaatggcgtaatgtacggtgaagaatatacattggttactgttgccgactatgtactgaaacatacccccggtaacactgtttctaatttaagctctacccgtgctttgcgtgatgtaactcgcaagtatggaatggaatacagcgcttctgccgtaggcgaagtaaatgtggtaacgaagatgaaagcaatcaatgctgttatcggtggtgagggaaatggtggagtaatttatcctgccagtcactacggacgtgatgcattggtaggcatcgcattattccttagccatctggctcacgaaggaaagaaggttagcgagctccgtgctacttatcctccttacttcattgctaaaaaccgtgtagacctgactccggaaatcgatgtagatgctatccttgccaaagtgaaggaaatctataagaacgaagaaatcaacgatatcgacggtgtgaaaattgactttgctgacaaatgggtacatttgcgcaagagtaatacagaaccgatcatccgtgtgtatagtgaagcttctaccatggaagctgccgaagaaatcggtcagaagataatggatgtgattaatgaattagcaaaataatatcctgtaaaataggattttatttataacatttgagtctcgtatatcataaagataactgaataagttgtctcacatgatatacgagacttttttattaggatgatatccactgaatgataatagttactcttctccttgagtattaacaataaagtttcttttgattaagtctaaacttcctttcgtctaatagtaaacttctcttttgttatttacaaacttaaaatgaaagcttcatttttataaatgcaagctttgtttttaaaaacggaacctttgtttttataaatgaagattgcatttatagattggaagggatgaaaagcaactttactgttaataaaaagaaagtttggacttaatcaagagcaacttttctattaatagattacatgagaagtaagcagtgttgagagagaagtaatcaacgaagcttacttttctgcgtcgttagcatagatacactacaagaatatcaattggtatacaaaactttataggtcttatatcaatgataaacacatggcttaaatatacatattgataaacgtgcgatatgaaaataaaactgattgcattattatttataatgatgagatcattgaaaaatggaagaggcagactcttagattgtgtgaacttagtagtgaagtaattgttgaaaaatagaggtacttgataaaatagagttgcattttccgtataaaaacgtatctttgtgtaaagagaatcaaagacatcgattattaatggctatttttttcgcactgcgaaacaaaacatataagcgattgcctgatatttaatagatgatattaatgattaacacaatgaaaatgcgcttgatttttccttttgttctattgatttattcattgatctgtcaggcagatggcggtaaagattcatatatcttccggaaagtagattatcagcaaggattatctaatagcgctgtgctttgtctttttcaagacaatacagggttgatgtggttcggtacttacgatggtgtcaattgttatgacggcagaagcatggaagttttccgttccgatttttcagctcccaaggctttgagtaacaacgtaatccattctattcagcaggcggataataattgtttgtggatttctactcatttggggattaatcgtctttcacaggattcacggcaagttgtcggatattatgactttacagatgattattatctacattccaattctaaaggaaacacatgggtggtgagtcatggtggaattttctactataatacatcttataaacgatttgtacagattaagaatctgaaagtacccgtagaggatatggataaacgggcgttcgtaacggatgatggtgttttgtggattttcactcaacaaacaggggaactgttacaggtttcgcaggatgcttttgattgtgacacattatcaattcattcaactgtttcatctactaattttcatgcgaaacctattgaagatgtcttttatcagaatggcgttctttgttttatcgatagtgagcatgatctttatgtttatgatatttcccgacaatctaaaatttatattcgtaacctttcttcattagtgcagaagaatggaactattgcaggaatagcccttttctatgaagatattattattggttttcgaacgaatgggttagtccgtctccgtacttcacaaaaatataaagaagaagtggtcgaccggaatgtacgtatatatagtatttatcgagatcctcatcagaatgtcttatgggttgcttcagacggacaaggaacgattatgtatgctaagaaatattctattgccaccaatttgatgctcaatcaactgtcatctaacttaagcaggcaggtacgttctgttatgacagacaatagtggtgggctatggttcgggacgaaaggtgatggactgttgcatataccggattatcgtgagaatgaggaggcttctaccgttacagtttactctcctgaaggtaagcaaaatgttgtgtcttatatacgatggaataaagaatttcctgtttataaattggttcaaagccgttatatggatggcttttggataggatctggagatccgggactattttactattcttttgaagacaaagctttgcattctgtggagaatctgccggcacaacccaccgagatacatggcatttatgaggaaaatgatagtgtactttatgtggtgacagccggttccggttttcataaattaatacttgagaagcaggcaggtaccattcgtttcaagtcgcagaaaagttatcatttttttcacggtcagcgagaaattacgatgttctatccaatgctgcccgagggggattctattttgtggcttggcagtcgggagaaaggactcgtacggtttgataagcggactgaagaatataaagtgatttctttgaaagaaatgcttcataagtcggtagacgatgtgctcagcctgtatcggaccaaagaagggttgttatatgtagggacaacatcaggattggtatgtctgaattctaatggcaaacagatgaaagctacctatatcggacgggagcaaggtttgctcaatgatatgattcatggtgtacttgaagatgagaacggactcttatggcttggtacgaatcgggggctgattaaatataatccgataaatggctcatcacatgcctacttttacagtgcaggtgttcaaatcggtgagtttagtgatgatgcttattacatgtgtccatatacacaggagctttttttcggtgggattgacgggttgctttatttggataaagaggtgcaggctgctccggaattttatccggatattttgttacgtaagttgactgttggacatacgcaagtggttcagggggatggagattactatacagacgatggtaaggcattacagttgaaggggacggaggtttcatttgcactttcttttgttgttccggattttttatcaggagaagatatagaatattcttaccagttggaaggatatgataaggattggacctcttttagtagtattaatgaagcctcatatacaggagtgccggcaggtgattatatctttaaggtacgctataagagggatgtatttgatacggaatatcggcatttttctattccggtatatatcctttctccctggtatcgatcggtggcggcttatttggtttatttgatcattttcttgttgctgttagggtacgtgatatatttactacgtaaaaactaccttcaggaacggatgatgaaaacactgatggggacagaaagttgccggaaatccgagactgtatatacaaaccgtaggatgcttgaagattttactctcatttataattattgtgaccaattgcgtgctgagaatctttcttatgagcaatgtcttgagaaagtgtcactgatacgcgaaactgtgatgagcgcacttcttaatcctgacgctctgtttttggaagaacttaaacaattctttccggatcggtttattgtttctgcacgtatgagtatacagggagtttctcaagaggtgttgcgtacgttggaagaacaagggattgatcattcttctatatcgtcaatgattccggaacacttaacatttccagtttacaagaatgcattatatagtattctttattgctgttatctccggattactgaaatgaaaggtactcatggcgtaatagtagaaatgtcagaacaggatggtaagatgcagctacatttttcttctaaagatgctactgcgaaagcgttgtatgaatatctttcagataaagcttcttcggtgacggagaaagattccgatcatgtgtttgctgtgcatttacttttaggttttgtacggtcggctttggaacgtattcatgccgttcttcgttatgataatgatgagagtggtagtcggttgacgattatctttgaaccggcggtcttgacagtggcaggtgaacaagggaagaaaactgtgcttttgttggaagacagagatgaaatgacttggttgattagtaatttcctggctgatgaatatgtggttcatcaagtaaagagtgtgcagcttgcttttgacgaaattcgtcggtcggctccggctctattattagtggatatgacaatgtatgccaatgctgaaagtacttttatggagtatgttagccggaatcgtactctgctttcaaagacagcttttattccattgttaacctggaaagttggttcggccattcagcgggaactgatcttgtggtctgattcttatattgtacttccttatgatatattattcttgcgggaagttgtccataatgctatttatggaaagcgggaagcgaagcagatatatatggaggaactgggagatttggcgggacagattgtctgtacaactaccgaacaagctgattttattcgtaaattgttaaaggtgattgaagaaaacctggacaaggaagaactgggctcaacgttgatcgctgatcgtatggcaatgagttcccgtcagttctatcgtaaattcaaggaaatttccaatactgctcccggtgatttaataaagagttaccgtatggaaaaggcagcccgcctgttacttgatgaagaactttctattcaagatgttattatggaggtcggtatttccagccggtcttatttttataaagagtttacccgtcggttcgggatgacaccgaaagattatcgggaacagcgaaaggtatgctgattgtcaggttaaattctttcgtataggtgattagttgggaaacattattatttatttgtttgtcacaaccttgtgctctaaatcccttttgttgattttattgtgttgattattagtgtgttaatctgtgctctaatttaccattctgtgctttaaatttgtgtctttattttgccgtttttttggcaaggtagagcattggacttttattcgaatagcctttatttgcaacaatttaaagggaattaaccttattactaatcaaatttaaaggaattatgaatgaaaaactaaagtatcttaccttatttgtaataggtatgatgttgagtttgggcatgaatgctcaatctgtaaaatcaatctccggtacggtaaccgatgatcagggagaggcggttatcagtggtacggtgaaagttaaaaacggtagtacaggaacaatcactgacattaacggtaaatacactctctctgttccttccaatgccaccttggtgttttcgtatattggttatatcacacaagaatttaaagtctcggaattaaagagtaatgttctgaacgtagttctgcaatcggatacgaaagcactggacgaagtagtcgttgtaggttatggtaccatgcgcaaatcagacttgacaggttccatttccacagccaaaggtaaagacatgctgaaagcacaatcattcaatgcgcttgacggattgaaaggtaaagtggccggtgtgaatatcttctctaataccggtcagccgggtggagaatcacgtgtcatcattcgtggtatttctactatcaacgcatcagcatcaccgctgtacgtagtcgatggagtggtgatgtcaaacttcgaattgcttaatccgaatgatatcgaatctatcgaagtattgaaagatgcttcctctgctgccatctatggtgcccgtggtgcaaatggtgttatcatggtgactaccaagcgcggtaatgcaggaaaaggagtccatgtttcctatgatggttcattgtctatcggtaagatggctagaaaaatagatgtaatggatgctaacgaatggatgtctaccttcaagcagggattggaaaatgccaacgaatttcaaggcaagaacttcacaactgatctgtcacagatattcacagacgaacgtttgttcaatgcagacggttctccgaaatataataccaactggcaggatgaagcatcccgcactgccatctctcataaccatcagatcagtatccaacgtacaggagaaggatcttctatcggagcattcatcaattataccgatcaacagggtattttgttgaattcttacttcaaacgtatcaatgcaaaattggcgtatgatgacaaaccgactgattggttgtctacttccgttaatttattagtaaatcatacttggggtaatagaacttctgataacccttacggacaaggcgcattgcgtacaatgatcgaacagttgcctttcttaccggttaagctggatggtgaatatacgcagacgaacattattaatacgagctctattctcaataatcagactgatcctaatagcggaaaacaaggattcagcccggaaggtgtaggtaatcccgttgagttgctcgaacggatgcaggctatgcaatatcgtacgcagatttttggtaatgctgctttgactttccatctcatgaaaggattggatttgaagacccagttcggtatcgactaccacaataatcgtgatgctaactatacgccgttcactccgcgtccgatgattaatcaaagttccgagggagcagcttctgcaaataactccaactctttgtattggcaggaagaaacctatttgacttatgtgaaagatataaacaaacatcacattaatgcaatggcgggtatgtcttggcaagagtataattataccaaattcgaagcttccgacagtaagtatattgatgacttctacggatattataatttaggttccggaacgaaccgtccttctgttggcagtgattacgacaagtgggcaatgaactcttatttcttgcgtctggcgtattcttatgacaacaagtatatggctaccgtaaccggtcgttatgatggctcttccaaattcggacagaacaataaatatgcatttttcccgtcagtcggcttgggttggatgatttctaatgaagacttcttgaaagataactcattgatcagcaagctgaaattacatacttcttacggtctgacaggtaattcggaaattggtacatataaatcattggctacggtgagccagtcgaatacgattattggtgatgctctgcatgtagtgtcttatctggacaatatgcctaatccggacctgaaatgggaaaagacaggacagtgggacttaggattcgagttgggtttattcaataacagactgaatttcgatatttcctattattataaatatacttcagatttgttgctcgaccgtccggttcctgaatcaacaggctactcttccattatggataatattggagccgtttccaatcgtggtttagatattctggttacagcatatcctattcagacacatgatttccagtggacttccactcttaatttaggtttcaacaaaaaccgtgtagagaagttggatgaaagtgcatctgttgatcctgtcaccggtaagcgtcagattacgaccgacggttttgtgggttacgatatgttgattcgtgaaggtgaagagctttcctctttctatggttataagcgtgccggtatttacgatggtattccgtctaactgggatccggagacaatgaacataccttccactattggtgaaaaggtaacttataagaaacgcgaaattatcggtaacggattacctgactggatgggctcattcatcaataccttcaattataaaggatttgatttgactttagacttccagtttacatggggggtagacgtgatgcaagaatattatcactctactgtagcccgtttcctaactaacggtatagaccgtctttataaggaagcatggcatccaactctcaatccgtcgggtaaagaacaggcaattcgtctgaataactttggtcagggagctaataaccaggcagatgatgactgggtttgcaatggttcttatttgcgttgtaacatgattcagctcggatataccttcaatccgacactgattaagaagatcggtctgtcttcattgcgtttgtatgcgaatgtgaataacgcgttcctgattacttctaaggactataacggatacgatccggataactcatctcgtttaggtgacaacaaatggggggctaaccgccaattcttcacctatccgcgtccgagaacgtttacgttcggtcttaatgtagcattttaattcaccgttataaaaaccataagaattatgaaactattaaaagtatatatatctgcattttgtatgtgttcactttctgtgttgttgaattcatgcgacgatttcctgaaagaagaaccattggatatgaagtcatctgaccaattctggaagacgaaagctgatgcggagtcgggtgtgaacgcattgtatttcggtggtgtaccttatttacataacactgatgtaggcggtggctggactcctaaagcgacaatgtggggtggtattgtgtccggattgtacgttgataagcgtaaggatagaacatttactacggcatctgaagggtgtaacttcaatattgaatcttttgatgatattgcaatgaaatactggcatgagttttataaaggtatttcacgtgccaactttgttattgccaatattccgacaatgaccggtgtgctggatgaagctactattaataattatgtggctcaaggtaaatttttccgtgcatacgggtatttttggctggtcaaagaatttggtggtgttccttatatttcagaaccttacacatctacagaaggtatgtacaaagaacgtctttctgctgaa

SEQ ID NO: 8055 - DNA, 34991 bp, Unknown
  gut microbiota DNA sequence
tgcttccctattatgcaaatgtaaataaggtagagtccccgtttgaaattcagaagtttgtccgtgaagtggaggcgggtgattataactctttcttccaccgtctgcaaagtttctttgcagacactacttacgaagtgatccgggaccaggagctacattacgaaaatgttctttttatcgtttttaaactgctaggcttctacaccaaggtagagtatcatacgagtgaagggcgcatcgaccttgtcttgcagaccgataaatttatttatatcatggaatttaagctgaatggtacggcagaagatgctttacagcagattaacgacaagaattatgttcttcctttcgaaatggacggacgtaaactctttaaaataggagtaaatttcagtgcggaaacccgtaatattgaaaagtggattgtagaaacaaaaaactagcccggcaaatagtgaggctagttttttgaagtcataagtctttttattcttttatttccggaaccaatataaacttcgtatccgggaaatacttcttcagccagttttgaatgaagttcatcgtatcattctgaatcgttttatcttttacggtaggatacatattataaagtactgtatccagtacaataccgcgtttttgtatagcttcaaggctaagcaaagtatgattgatgcttcccaatttaccggaagtaacaaagataagcggataattctcttgggcaatgtagtctattgtcagaagctctgttgttagcggaaccattaagccgcctgcaccttcgagcagaacagaatcatagcgttcacttaactcttccgtagcacgtttgattttgtcgaagtcgatgggacggttatccagttgggaagcgagatgaggagaggcaggataagagaaaatttccggcatagtcagtccttctttgtcttcttctgtaaaggagattcccatgatacgacgatgcaaatcaatatcctcggagtgaccgatgtttcctgtttggataaacttttgagtgatggtacgctgtccgttcttgttccattcacgagctagaaatccggtggcgtagctcttgccggcatcggtgtcgataccacttacgaaatatacattctgtttcatacttttttcttttttgcgatgatataaatagggtgataggtcagggacactgaagtgccttgggtaaattcttgtgtgtaacgttcactgaataactgcaagtcacgacgtgtccgcagttgttgggaagaggtgccggatattccggttactcctgtctgcttcaaatgataaagtacctttatggggttatcaaacgaaagagaaataagttcttcttccgaatggagtatgtcaaagtgggatgacaaggctgttacaagctcttcccgtgaacgataagggagcccgtttcctgttaactctcgtatctctttcatattctctttaccgaaagtgctgaaagcgaaatagccttggttattaagcagggcgttgcaccttttgaaaaagttttcaggagattcgaaccattgcagagccgagcaggaagtaattaatgtactttcagcggggaaaggaactgtttctgcatctcccggaagaaaggaaacctgtccttttcttaatatatcctcacaacaatacttcatttccgggcaaaggtcgtttagtaataattcttccggccgaagagcctgaagtagcatacgggaataaatacctgtaccgcatccgaactcaatcacttttgaacaaggaaaagagatgtgttctgtaagcaggtgaatcattttatctgctatctgccgctgtacgtttgcttcctggggataagtagcaatggctttagagaaacgttcggcgattagttgtttatccataaatcgatcattagttgatttgcatgattacattatcaaaaaggtcttgttgataatgagcggcttctatatattcaagggaatccactttgtttctccatgccagccattggctatccggcaggaagatacggtcgctttttcctatgatggctctttgccatgcaaaatccgacggtggcaatgataagtattgcttttgtatggcagcaagctcttctttgagctcttcaacgggacgttggggagctactgtctgaaaagccttgtaatcggctgctgaaccgcacattcttctttgaaacttttgcagggattgttcattcagtccttgcagggttccttcgaaaatggtaggagtaatccctttcgtttcatgtataggagaaagagtgccattgatagcgatactttgggaaaggggcagggatggatattgtttcattatctgtgaggctgcccatactcccattgaccaggcaatgagggtgatttcggaatattcttgcagaatgtcggcatcgaactctaatgaacgataatcatagcaaatcatccagtccttatcggtcgggtgaatttgcaggaatggagtttcatccattccccagcctgcgaagaaaagcaatagatgcttttgattattctttatgataaaatactgtttcatccgtttatcagtttaatgagttggtcgatttcatgttcagtgatgtccgctgtcagtgagaagcggatgcgtgaagtcccttcgggaaccgtaggcggacgtaccggcaatgcgtaaaatcctttgcgttggagttcttctgctttcaatatggtatcttcacttgctccgacaatcatagggacaatatggcttaccgaggggcaattgtatcctttggttgtaagggcttcctttagcttttcactgatttgtagcaggtgagttctcttatattgtaaagctggaagacgttctaacacccatgaagtccactgaatattgataggaggaagtgcagtggtgaatataaacgtgcgcattttattgattagatattcccgaatcagtttccggcagacaatatacgctcctgccgaggcaatggctttcccgaatgtacctactagaaagtctatatcgttgatacattcttgttcttcagcacatcctaatccttttttccctcgtacaccaaaagcatgagcctcatctatataaagaagaatattggaatagttctttttgagttgaatgagagcgggaagatcagcttcatcgccatccatgctgaagatactttcggtaacaataataatctgctcataagcgttatgattttcagcaatcagtcgctgcaactgggaaatatcattgtgacgataccggacacatttagctgatgataatttaattccgtctatcaggcttgcatgcaccagcttgtcagcaagaatcagggtgtgagtgttgcaaatggcaggaagtattcctgtattggcatgataaccactattgaatatgagtgcactttcggttccgaacatggtggctagctgttgctccaacttctgatagtcactaaaattaccggtcaataaccgggaagaagaggaggtaggcaggaaagtttcgggagtgagcgtccttaagaattcctccctcaatgaaatatcattggccagtccgagataatcattagaagataggttcaacattcgttgtccgttcagcagaacatctcgcccctcgtggattagcggtgggagagaacggtagttctttttctctttcaaggtctggagttcctggtttatatactctaatgtcatgaattataggttgtttttttgaataactttaagtaacccggaagtcagtttgcttaattgttccgaagtaatgatgaaaggtggcatcagatataccagtttgccaaagggacgtacccagattctttcttccacaaatcgtcgttgcatataggccatatttaccggacgcttcatctcaatgactccgatagctccgagtattcgtacatcagctacttccggaaattcccgtgcaggtgccagttcttctttcagttgagtttcgattcgcttcacattctcttgccaatcggattcgagtaataggcgaacggaagcgcaagccactgcacacgcaagtggattacccataaatgtaggcccgtgcataaaagctcccggtacatggttggagatggtatctgctatccggttactggctaatacagcagaaagtgtcatatatcctccggtcagtgctttgccgatgcacatgatatctggttctactccggcgtgttcccacgcaaaaagtttgccggtacgtccgaatcccgttgctatttcgtcgaagattagaagaatatcgtgcttccggcaaagcttttctgcttcacgcagatactgcggatgataaaaccacatgccacctgctccctgtaccaccggttccaggataagcgccgccaactcttttgaatgtttttcaatcatctcttgcagaggtagtatatcttccggattccattctccgtcgaaccgggaagtgggggacgggacaaaataacgtacaggcaatgctgaaccgaaaagactgtgcatacccgtcaccggatcacatacagacatggcattccacgtatcaccgtgatagccggaacggatagtcacgaaattgttcttttccggttttcctgctgcataccaatattgtacagccattttcagtgccacttctacggctaccgaaccggagtctgcatagaatattttctgcatggaagaaggaaccaaaggcaataatagtttccccaattcaatggccggatcatgcgtcagtcctccgaacatgacatgagacattttatctaattgttcttttgccgcctgattcaataccggatgattatatccatgcactgcacaccaccaagaagacattccgtcaatgagcgtttgtccgtcttcgagggtaatggtaacaccgtctgcccgtttcactttatatacaggaagcggatcggtggtagaagtgtacggatgccagatatgttcgcggtcaaattgggaagcggcgaaatgataaccttcttcctgaatcatctttttgtcttccgatactttggaaccgagagttgtcagcaggtcgcctacgatagccgagttaataccgatatataatgctttgtgcatcgcctcggaagaaagttgtgaacgtcctccggcaaatcttagaaaagctgtcggattaataaaacgaaagatagcgatggttttaagtatttcttcttcgcttaaaggctgctcgttttccagtggagttcccggaatcggactaagcagattgataggtatggactgaacattcagttcttttaaagtgaaagcaaattcaatccgttgctccatcgtttctcccataccgatgatacctccgcagcagatatccatgcctacacgacgggctgcatcgagagtagccagtttttgttcttgtgtatgtgtagtgcagagtttggaaaaataagacggagccgtttccaggttacagtgataacgggtgattccggcttcgtatagggaacgtagctcttcttcgttaagtaaccccagagaagcacagagctgaatggacgagtgacgtcgcatttgacgaacggtatcgcaaagttgggtgatttgtttgggagatggttttcgtccgctggtaacgagagagaaacggttgacgtcctgggcttcattgtatttcgcctgtcggagacattcttcagcgggaaggagatcgtaaatatcggctttagtcttgtagtgagaggattgtgcacaccatttacagttttccgggcatcggccggacttggcgttgatgatggaacacatgtcgaattcgtgcgaagcacgtgcgacggtaatctcatgcgcggcggcatatagcgcctcgctgtcagccatgttggctagccaagcggcttggtcgggcgaaatatcaatgcctgccaacacttggtcttttatttcctgaagtgtcataaatgtatgataagggatagtaattttagcattctgcttgcgaagggcaacgtccacaacattgatgtgcagatgaccgatttggaattcacgtcccatactcgcaaaagcggcatagttctttctgccccaataacggaagcgggaaagaagggtacgtgtggtctgtatgtggcgttgttgcttcattgattttttacttttgttcgttagaacgtggcaaatgtacaaagattctttggataagcaagcaagtttacgatttctgatatccgtacttttatttctttttcctgtattctttgcgcaagttgaaattgaatccggcatatatctgaagagtgccgaaaccattgtctacagagaaattattccggtggtaattatagtttttcccaacgaaagaagtacctacaaagtactttccgttattataaacaacccctgcacggagtagaaaatccagattaaatttgccgtaccatgcttttccttcgtgagtttctgcatctacatcagaggctttataggcaatggcaggggtgagagacaaacatgccaggcagttgcgggcaaagacccagttgtaggcatatccgaaactgatattggcattggtatattttatatccttgactttcataccgggattcattgtctgctgtagaaaatcaggaagttctgtgtagtcgaagtcgagatgatgctttgaaatagaaaaaccggcaataaatgttcccgcgttgcgtcgttggttggtggactggctgaaggcggccggataagagaattttctgttattgaagatataatataagttcagcccttttatatccacctttattccactgaaatcctcggaatagttggagggaatatcttcagaaaatcctctgatcttatgtatcttgtaattgtttccggtacggcggtagaatatatctacaccaagtttggaactatataagctaaggtcaaattctgtacctctattcttccggttggttttccgatagatatcatccacatctacggaccatcccaggaaaatccatcgccagccgaaatacaatcctattttattatgcgggttgggagagaaactaagtttttgtggttgaggctgttcgctggtgacagagtaatattcgaagttgctgaaatgagtagccatcaacgcataattataacggttcgggctgatatagagcgtatcgaaatcactgaaattcataaatttcttgattgctcttttgaaaggactgggctgggtgaccgttgtggaatctattcttgtactatcatttgtagaaagggctttcttttcactttgcgcctgtaaggacagtgaaaataacagaaaaagatatagaataacccgtttccccatgcggttctttgttgtattagctatttttcgtttcacgaatgtactacctttcgttgatttatgctagcaatcttctaaaaaatgtttcgtttcctaaacaaaaaagttcaatatactgttagttacaacaagcaaataaatcttaagccacaaaattatgagaatctatttacgtttattagtcgtgtctcttctgctttttgcaggaaatatagtatatgcggaagcacagcaggagaaacgcgtgacgggtacggtgacttctgaaggggagcccttgcctggtgtctccgtacaattgaaaggagcatcctccggcaccatcactgatattgatggaaattattcaattgaagttcctgctaccggcactttagtgttccgctttgtaggaatgagatcggtagagcaaccggtgaataaccgaagtgtgattaatgtcacgttggaatcggaaagtaaagaactggaagaagtaatggtagtagcttatgctaccgctaagaagtatagttttaccggagcagcttcgacgatgaaagcaggtgagattgaaaagctacagacttcgagcgtatcgcgcgtattagaagggacggtgtccggagtgcaggctagtgcggcaagcgggcagccgggtacggatgcggaaatccgtattcgtggtatcggatctatcaatgcatccagtgctccgctttatgtggtggacggtgttccgttcgacggtagtgtgaactctatcaatcctgatgatatatcttcgatgacagtattgaaagatgcggcttctgctgctttatacggttcacgtggcgcaaatggggtgattattatcacaaccaagcaaggagatcaaaataccaaagcgaccgtaaaggtaaaagcctctttaggaggttccaatcgtgccgtgcgtgattatgatcgtgtcagtaccgatcaatactttgaattgtattgggaagcacttcgcaatcagtacgccaagagcgcggattatactccggcaactgctgcggtacaagcatccaaagacctggttacgaaattgatgggaggtggaccgaatccatacggtccccaatatgcgcaaccggtcggtacagatggaaaattggtggcaggtgcccgtccattatggaattcagattggagtgacgccatggaacaacaggcacttcgcacagagttgaatctaagtgtttccggaggcggaaaagcaaatcagtatttcttttcagccggttacctgaatgataaaggtattgcgcttgaatccggttatcagcgtttcaatcttcgttccaatatcaccagcgaaatgacttcctggttgaagggaggagtcaatttgagttttgcacattctatgcagaactatccggtttcttccgactccaaaaccagtaatgtgattaccgcaggacgtaccatgccgggattttatccgatttatgaaatgaataccgacggtagttacaaattggatgagaatggagaccgcatttatgacttcggctcttatcgtccttccggttcgatggcaaactggaatctgccggctactttgcctttggataaatcagaacgaatgaaagatgaagtctccggtcgtactttcttggaagctacgattattgagggattgaaattcaagactagtttcaactttgacttgattaattataatacgttggattatacgaacccccaattaggtccggctaaagaaaacggcggcggcgtcagccgaatgaatacccgtactttctcctggacatggaataatattgctacgtatgacaagacaattggtgaacatcattttaatgttcttgccggtgtggaggcctattcttaccgctacgatgaactgacggcatcacgttccaaaatggcgcagcctgatatgccggagctggtagtcggttcacagttgaccggaggttcggggtatcgcatcgactatgcgttggtgggttatctgactcaagcattatacgactatcaaaataaatatttcttctcggcatcctatcgtcgcgacggttcttcacgttttgcgccggagacccgctggggaaatttctggtcgttgggtacttcctggcgtatcgaccgggaagagtttatggcaagtacttccgactggctttctgccttgactctgaaaatgagctatggtgcgcagggaaatgataacctgggtacttattatgcgagcaaaggactttataccattgtttccaatttgggagaaaatgcgttagtgtccgaccgtatggcgactccgaatctgaaatgggaaacgaacctcaactttaatgtaggtatcgacttctccctgttcaataaccgtttttccggttcatttgatttctttacacgtcgttcgaaagacctgctttattcacgtccgatagctccttccctgggatatggttctattgacgaaaatgtaggagccttgaagaatacaggtatagaaatggtgcttaacggaacgattatcaatcagaatggttgggtatggaaactgggtatgaacttgacgcattataagaataaggtgacggatctcccattgaaagatatgccgcgaagtggtgtgaacaagttgcaggtaggtcgttcggtgtatgatttctatatgatagagtgggcgggagtagacccggaaaatggagatccgctgtggtataagaatgaggtggatgcaaataagaatccgaccggaaaacgtgtcacaacaaatgattatggttcggctgactattattatgtcaacaaatcgtctcttccgaaagtatatggcggattcaatacgtctctttcttggaaaggatttgatctttcggctatctttgcttacagtatcggtggatatatctacaatcgtgatgttacaatgattctgcacaatggaagtttggagggtcgcgactggtcgacggagattctaagaagatggactcccgacaatcgctataccgatgtccctgctttgagtactacttctaataactggaactcggcttccactcgcttcttgcagaataattcgtatatgcgattgaaaaacctgacactttcctataacttacccaaacaatggattagtaagttgtcattgagcagtgtgcaggtatatgtacaaggagataatctgtttaccattcaccggaatcagggactagaccctgaacagggaattactggtatcacttattaccgttatccggctatgcgaaccatctccggaggtatcaatgtttctttctaaattcagactaaattatgagaaaaataaaaattcaatccattcttgcggcagttgccggacttttcctggcaacgagttgcagcagcagttttttggatacggaccccacagatgcggtaagttcggataaggtatctgtacccgaaaatgcggaggcacttgtgaatggtgcctggtataatctgtttgattattcaagtacctatgccaatatcggttatcgggcacttcagtgtctggatgatatgatggcaagtgatattgtttcccgtccgaaatatggttttaactcttcgtatcagtttaatgatatagcgcaatcctcaaatggtagaacagagtttgcttggtatctgatatataaaacgatagataattgtaacactgccatttctatcaagggggattcggaagaactccgtcaggcacagggacaagcattggcattacgcgccttttgttatttgcacttggtacagcattatcaattcacctacttgaaagataaagatgctccgtgtgttcctatatataccgaacctagcaatagttccactgtaccgaaaggaaaatcaacagtggcacaggtttatcagcttattttcgacgatctcactttggcgaaggactatttgaaaaactatgtccgcagcggtgataatcaaaagttcaaaccaaatgttgcagtggttgacggtcttttggctcgcgcttacttgctgaccggacaatgggaagaagccgcaaaagctgccgaagcagcacgtgcaggatatacgttgatgacaactacagccgagtacgaaggttttaataacatttccaataaagagtggatatggggatttcctcaaattccttcccaatcggatgccagctataatttctattatttggatgcaacatacgtaggagcatatagcagctttatggctgatccccatctgaaagatacatttactgaaggtgatattcgtttacctttgtttcagtggatgcgtgaagggtatttgggatataagaaatttcacatgcgtgcagatgatacggctgatctggtcttgatgcgtgctgctgaaatgtatttgatagaagcggaggcgaaagttcgtgacggcgtagcgttggcccaggctgtagctccattgaatacattgcgtaatgcccgtggagtaggggattatgaggtgacaggaaaatcacaggaagatgtaatcaatgagattctgatggaacgtcgccgtgaactttggggggaaggatttggtattaccgatatacttcgtacacaaaaggcagtagaacgtgctgctttatcggatgaaatgcagaagacagaagtcgattgctggcaggagggtggtagctttgaaaaacgaaatcctctgggacattggttcctcaacttcccgaacggtaaaccgtttacagtaaatagcacctattatttgtatgctattccacagaaagaaattaacgctaaccctaacatataaatagctctcttaattttttgactttgaccttaacttgtagaccggtatacgtcgtgacgatgcataccggtcgttttctttggaaaagagggagtgcaaaatgtgacacaccccattttatttaatctaatcttattctatttttttcttcttcaaattcggtaaaaagaatgtgaccaatcctagtaacggcatataagcacagatattatatacatattcaatactcgttttatccgctaaattaccgagtacggcagatgctacaccggccactccgaaagcaaatccaaagaacaagccggatatcaatccaagtttggtaggaagcaactcttgggcataaagcaatatggcaggaaaagcggaagaaagcatcaatcccacacagaagctaaggataatagtccacagcagattggcatggggcattagtaagctaaatggggcagctcctaaaatagaagcccaaatcacatacttccgaccaattcggtcaccgacaggtccaccaattaatgttccgatagcagtagctaccagaaagataaataaatatagttgcgaatcttgtacgcttacattaaatttatgaatcaagtagaaagtataataactcgtgagacttgccatatagatatatttggagaaaatcagaatcagcaatatcgcgattgaaagggctgtcttatccataggcaaaggaagatgaacaggttttctgacactgacggtctgtgctttcatccggtttagatatgatttataccatttgcaaattgggtacatcactccgatagcagctaaagccacaaatgcaaatacgatgagatgttgtctgccataaggagccaccaacagagcaaccagtaaaggacctaatgaacctccgaagttaccacctacctggaagagtgattgtgccagtccacgtttcccgccggaggcaaggaatgtgatacgggaggcttccggatgcagtacggaagagccaattccgattaagaatacggaggctaatatccaatatagattatcagagaatgctaagtttatcaaaccaatcagtgtaaagctcattccgataggcaacgaccatgcaacgggatatttatcaaaaatgattccggtaatcggttgaaagaccgaagccgaaagctgataaaccagtgtgataaggccgatttgcgcaaaacttaatcctaaatcatctttgaatagtggataagctgctgaaacaacggactgtaaaaggtcattgagacagtgtgaaagacttaatgcgattaagatggaaaatgtaatttttcctacgggttgttcctgattttgtaccatgatacctattgctttagaagtgttcctgaaaaattggctgcaaaggtacgcaaactttcccgtttctctaagactaaggattctaaattgtcgttaattcaattttgactaactgaactattctccgtacctgctgttgttaaataaaaaaggaggattatatgggctttatttggtatatcattattggtattgtggctggattcctcgcaggtaaagtaatgcgcggcggaggttttggtcttattataaatttattacttggtattcttggaggtgtactgggcggttgggtatttgcccttttcggactgtcagcttcaggattgatcggaagtttgataacttccactgtaggggctatccttgtattatggattgcttccttattctcgaaatctaaatagatatttatataatttatttttaatcctaaaaacagaacttaattatggaatgtagacatggaaatttctggattggactcggaattgggtcaatcctcggcgcagtagcttatcgtctttcacgtacagcaaaagcaaaacagttggaaagcgaaatttataatgctatccatcgtataggtcgcgatgctgaaatagcagctgctcatgctgaaagaaaagcaatggatcttggacttaaagcagtagaaaccggtgcggaaattgctgataaagtagcggcagaagccgacaaagtggccggaaaagcaaaagataagtgggaaaagtaagaatccccaaacgggtaatcgatttaaatataattggttacctgttttattttttgtatatttaatcttttatccctagctttatttagtcatcgtatcaatgtgtgtgcgaacacatttaggctaatcttctttattattatcgtttccttcaagaattgggagttactttctctctaacttttcatctgaaaagagtctttttctctatactatctttactttttcttatgtttaacaacatgtatgttttctgtttgttggagttaattatttgattattaattgtatatgtttgttttgatataatgtgtgtgcgcacacactattgcttaattcaataattcattttacttttgtcgatgaaaaacaagatacttatcaatatatggataaagagttttcaaatattcggattgtagacattgccaagatggcaggtgtctctgttggcacggtagaccgtgtaatccataatcgtggaagagtatctgaagaaaataggaaaaaagtacaggctatcttggaaatggtacattaccaaccaaatctgatggcacgttcattagctgcctccaaaaaacaatatcatatccttgcaataactccttcttttgtgcagggggagtattgggaagctatttcggaaggtatagataaagctgcggcggaaatggaatcatataatatcaccattaccaaactctttttcgatcaatataataacaagacttttgatgatatcatccgaaatctgctgaatgagaaagtggatggggtattgattgcgactttgtttacagattctgttatccggctttcgcaggagcttgacaggaatgaaataccatacgtgtatgttgactccaacattggagggcagcatcaactggcttattttggaacggaatcttatgatgccggagtgattgctgccagattattgatggacaggcttccttcttcttccgatatattaatggcacggattattcatagtgggaagaatgattctaaccagggaaagaacaggcgcgaaggtttctgtcattatctcactgaaatagggtttaacggaaatctgcatgaagtagaactgaaaataaatgattcagtgtataacttcatgaaactggatgaaatctttgaagctaatccgaatattaaaggcgctattatctttaattcaacttgctatattttaggaaattacctgaaagcaagaggaatgcaggctgtcaaactggttggttatgatcttatcggcagaaatacgcaattactttccgaaggtgtgataaccgcattgattgcgcagcgccccgagcgtcaggggtacgatggtgttaaatcattgtgtaatcatttgctgttcaagcagaatagtgagaaagtgaatttgatgcctatcgatattctccttaaagagaatctgaaatattatctgaacaataaattataaacatataaatttataagaaccatgaatgaattatttaacgtaaaaggcaaagtagttgttatcaccggcggagctggtattttaggtaaaggtattgctgcgtatctcgcaaaggaaggcgcaaaagtggttgtgctcgacagaagtgaagaagctggaaaagcattggtagacagtatcaaagcagaaggaaatgaagcaatgttcctttacactgatgtgatggataaggaagtgctggaaggcaacaaagtggaaattatgaaagcttatggccgtattgatgttttgttgaacgctgctggaggtaacatggcaggtgcaactatcgctccggataaaactttctttgatttacagattgacgcatttaagaaagtggtggatttgaaccttttcggtacagtattgcctacaatggtatttgctgaaattatggtagaacagaagaaaggttctattgtaaacttctgctctgaatcagctcttcgtccattgactcgtgtcgttggttatggtgcagctaaagcagctattgctaactttactaaatacatggctggagaactggcattgaaattcggtaatggcttgcgcgtaaatgcaattgctccaggcttcttcctgactgaacaaaaccgtacattattgactaatccggatggctctctgactgatcgttcaaaaacaattctcgctcatactccattcaaccgtttcggtgagccggaagatctttatggaacaatccattatttgattagcgatgcttccaacttcgtaacaggtacagtagctgtaatcgatggtggatttgatgcattctcaatttaataaatggggaattgggaattaaaaatagagaattggctgcgtagcatccgtatgccgactctcaacttttaattttcaactttgatttcttaattcttaattttcaattcttaatttaataacaatatgtatttatgtgaacaaacttggcgctggtatggtcctaacgaccccgttagcttgtgggatattaagcaggcaggcgctaccggtatagtaaatgctcttcatcacattccgaatggtgaagtgtggacagtagaagagatcatgaaacgtaagcaaatgattgaagaagtaggtctgacatggtctgtggtagaaagtgtacctgtacacgaacatatcaagacacagactggtgacttcatgaaatacattgaaaactataaggaaagtatccgtaatctggcgaagtgtggcgtaatggtagttacttataactttatgcccgtactggactggacacgtactgaccttgcctatacaatgcctgatggctctaaagctcttcgtttcgaaaaggcggcttttgtagcctttgaccttttcatcctgaaacgtccgaacgcagaaaaagattacactcctgaagaaatagctaaagcaaaagctcgtttcgaacaaatgagtgaagatgataagaaactgttggttcgcaatatgattgccggacttccaggttcggaagaaagtttcacagtagagcaattccagcaggcattagaccgttataacgatattgacgctgaaaagctccgttccaacttgattttctttttgaaagaaattgcgcctgttgccgatgaagtaggcgtgaagctggtgattcacccggatgatcctccttacactattttaggtttgccacgcattttgagtacggaagaagatttcaaaaaactgattgaagccgtgcctaacgaatccaatggcctttgcttgtgtacaggttctttcggagtacgtgccgacaatgaccttgcaggcatgatggaacgtttcggtgatcgtgtaaactttgttcacctgcgcagcacacaacgtgacgaagaaggaaacttctatgaagcgaatcatctggaagggaatgtagatatgtacggcgtaatgaaagctcttattcttttgcaacaacgtcgtaaatgctctatcgctatgcgtcccgaccatggtcatcagatgattgatgatttgaagaaaaagacaaatccgggatattcttgtctgggacgtcttcgcggactggcagaacttcgtggcttggaaatgggtatcgctaaatctattctttagttgaagttttaattagcactttattataaaaacactatgactattattgaacgtgataatagttgtggtgttttttttatttattctttttcacttgttgagggataagtgaggcgaataagtctccaacatgcgtatctttatcggctttttttgctttcttcggtttgggaggatcggggataataagcaaagctatttgtgcacaagcttctgcgtcagcaagtgcgtggtggtgattctctaagttatatccgcaccgttctgctaccgtatgcaattgatgattgggcagatcttttccgaaaacttttctagaagtacggcaggtacaataaaatttgtaattaggataagtcatgtcatacaattcgtgaactgcccgaagacaaccttcatcaaaaggactattgtgtgcaacaagtggcaatccatctatcaacggtttgatttcagcccatacatcaggaaaatcttcggcttccatcgtatcgtcataagttaatccgtggatagccgttgtccattgcgtataataattaggagcaggacgaatgagacgatagattttattcacgatcttaccgtcttttacaatgacaacacctacactacaaacacttgtacgtttaccattggctgtttcaaagtcgatggctgcaaagttcctcatttatttccttgttttagagaaacaaagataatacaaaaaagggtcatgcaaaatatagaaataggattgataaccaggaaatttattgattttaatgaaaatgaatgtttttaatggatgttttcagtgaaatacctttcttgttgtgaaaattatgctatttttgccaaacataaacaaaaaagcatgaacaaaacctacttcaaatataaatacgttttaatattcattctttcattgattgtttttataggtggactaaattataaacactggtatgttactgacaatttgatggtaaagcgtatttccctgatttactccatatctaaagatgatattggcaacagaaatatagaaaagttgttgtatcaggagtttcagaaacaagggatagaggtaacgtttgataagttttattttgattgtagcaaatatgatgagaaagagcggatagaacatgtaagggaatatcttgaatttctagaaagtaaatcgacagaccttattctgaccgttggtgatcaggcaactaattctttattatctacccgtcaccggttattatcttctattcccgtggtagcttgtaatgtgcattttcccaatgaagaactgattgaagaatacgattcgcagaaagtttatgtattgcgtgatagtcccgatctgaaacgtaatatcgactttataaaaacattgtatccctataatgatatggagattatttataatatagatctgacctttcttggacataaatctttcgatagcctttcccgagtggttgacaggaagaatgtgagagttttgggctatcaaaaagcatttgtgcaagagtgtgattataagcatttgacggagatgattgaatattttaatctgacccccggtttgataaatgataatgttaacaagaatggtctgacaataagtctttgcccctttcgttatataaaaggatcttctttgttagtaatgttgaaacaatcaaagagaagacaacaaaatcaagcgtttttactggataaattagatatgctggcaattccgatagtaacagctttaaatattccttcttttagttgtattcgtgaaggtttcggtgaaaatgctaagattgtcggtggttatatggctacagagggtattacggcgaaggcttccgctagccttgctgcacgcttattaaagaaagaaaaaataggaatgcctaaaataagagatttagaaaaagagtatgtactggactggacatatttttctgaatatgcgggtgatattagtaatgttccgcaaaatgttcgtatgattaactatcccttttatgatcgttatcgaaaagaactttatttgttgggtgggttgtttgttttctcttttattttggtaaccattagtttgttacgtacacatcgccgttcgttgatggagcgtaagaatcttcaaatgctggaagaagcgcacaaacgattgactctttctatgaatggcggcaaaatttcactttggaatattcaggaaggtgttcttgaatttgatgataattatgtacgattagttggcatggaacaacggagatttacaaaagaggatattatgagatatacccatcctgatgatgtacaattgcttagctcattctacgaaacattatatcagtctcccagtatgcaaatacaacgaatacgtttttgttttggagggaaagaggcagattatcaatggtatgaacttcgatgcagtaccttgaaagatgcccagggggagattatgttggcaggcattatgcagaatattcaaaacttggtagagcatgaacaacagttgattctagcgaaacagatagcagaaaaagcagagctgaaacagtcgtttctaaataatatgagtcatgaaatccgtacaccgctcaatgctattgtaggtttcacaaatttattaataggtgagggggctgatgaaatagaaccggaagagaaagctgccatgattgaaatagtcaataataataatgagttgcttttgaaactggtgaatgacgtattagaaatatctcgtttagattcaggcaacttatcctttgatataaaagaacataacattacgaaaataataaaggagatttatgtcacttaccaaacattgattcagccttcattatgctttatccttgaacttgatgaaacagtttccttacccgttaacatcgactgcttccgttttactcaagtcatctctaatttcctgaataatgcaaataaatttaccaaagaaggaactattactttggggtgcaaaatatataaagagcatcaggaagtttgcgtttacgtaaaagatactggcaaagggattgatgataaagaactaatgatgatttttgatcgcttttacaagactgatgaatttgagcaggggagtggtttgggactttccatttgtaaagtgattattgaacgactggctggacgtatagaagtgcattcagaagtaggaaaaggaagttgtttctccgttattttgtctttggcaaatataatttagtacaataaacagaaggtatttaaaagaaaaaagcaaataatgagagataagttcaaaccctggcagaggtgggtactattcgctcttgcaatggctgttatttttgcatcgggagtaattatttcattcctgatggaacacagcgcagaggttgtaaatgtagactataagaaaaagataaaaataaacggaatagaagcacgcagcattatttttgctgaaaactatccacgtgaatataagacgtgggtggatacgacatcgaccgatttgcacagtagattaaatggaagaacctctatcgatgttttagcgcaacgtcctgaaatggtcatattatgggctggatatgctttttctaaggattattcaacaccgcgcgggcatatgtacgctttacaggatattgttcattcacttcgtactggtgcgcctatgggggttgctgacggtcctcaatttgcaagttgctgggtgtgtaaaagttctgatgttccccgtatgatagaagctattggggtagattccttttataataataagtgggctgcatggggagccgaaattgtaaaccctataggatgtgccgattgtcatgaacctaaaaatatggatttgcatatcagccgtccgtcgctcactgaagcttttaaccgtcaaggtagagatattactcatgctactccacaggaaatgcgttcattggtctgtgcacagtgtcattcggagtattatttcaaggggaatataaaatatcctacttttccttgggataagggcttcactgttgaagatttagaaaagtattatgatgaaatcggatttactgattatattcataaattgagtcgtgcccctatactaaaggctcaacatcctgattatgaaattttcaagatgggcatacacgcccagcgtggtgtgtcgtgcgctgactgtcatatgccttacaatgatgaaggagggataaaatatagcgatcatcatattcagaatccgttagctgtgactgaacgcacttgtcagacttgtcatcgtgataataaagagacgctctgtaaaaatgtatacgaacgtcagcaaaaggcaaatgagttgcgtacacttttagaaaaggagttggcaaaagcacatatcgaagcgaagtttacttgggatataggagctacagaaaatgaaatgcaagaagccttgctgttaattcgtcaggcacagtggagatgggatttcggcgtatcttctcatggcggttcttttcatgccccgcaggaaaccatgcgtattttggggcatggcttaaataaagtattccaagctcgtatgcttatcagcaaagtgcttgtagcgcatgggtatacagataatgtaccacttccggatattacaacgaaagaaaaagcacagcaatatattggtttggatatggctgttgaaaaggcggacaaagataaatttctcaaagaaattgtccctgaatggcttcaaaaggcaaaggcaaacgggcgtattgtgaattagaatttattttcactatacttgcctgtaatataaatccaataagattatgtcaacaaaaacaatgaaagagaaagcaaccgagttgttgcagaggtgtgaagtggtagtgcttgcttctgtaaataaagagggatatccccgtcctgtgccgatgagtaagattgcaacagacggaatttctactatttggatgtctaccggagcggactcattaaagactattgactttctggcaaacccgaaagccggattatgctttcaggataagggagacagcgtagccttaacgggaactgtggaagtggtaacggacgagaaaatgaaaaaggaactttggcaggactggtttatcgagcatttccccggtggccctaccgatccgggctatgtgctgctgaaatttgaatcgaatcacgcaacttattggattgaagggacatttattcataagaagctggactaatctcttcatacagtcctattcccgtgcgatctggaaataagaagagagaaacattctttcctttcgaagaagaatgtctctctctttttgatgatagttggatagatagtatatctattcttcgtgtttcatttagaattcgaacttctccagtttcatttcagctaattcctgaatgatacctacgtacttgctgaaatgagaagatttctcgtgagctgccaatacttcagcattctgccatgtttcacaaatcatgaaaacgtcgtgacgggtactgctttcgaaagtatcataagcaatgcatccttcttccttcaaagaacaagcagtcagttctttagctgcctcaatcgctttttcgcggtttgtctcgcttacgcggacgaaaacatttaatctaatcatagtctttattattaaatgattaaaaatagctttatcacatctttggtaataaatcgcaggcaaagatactatttttgtgctttttcggataccttgttctttaaatttcaccaaaacgtcatataatcataaaaaacgattatatttgcccttgaaatcaaaaagtaactattttgggcgcaactcttaaatttgttctggcttaatattagcctcacgaaccacaggctaatttctttcgtttgagtaattccactcgaaccggtttttcattttgttatttttattatttactgcatggtttctcgaaacgtatgcgatatgaaaacgaatggaaaatttcgtaagaaatagtaagcagaacatagaaaaagagattgaaagaattgagcgacagccgattgccccactagataagattaagcagattattgatgtcatacagatgtctcttattctgttgaaatccgccgttgccgaataccaatttccgaatccgaaagaagaaattcttttctttaagacctggaagccacagatttccgggctgttgatgttttatgtccgcttgtatcagattgaaaagaagcgtatcggcgaatctccgtcttcccaatgcaaatatctgaagtcggaactggagagcttgaaaaaacacttcctgaataattctttctatgattattaccgtaccggcaggacggaactcgacgaacaatattttgtcagaagaaactatgatattctggcagacacccgtttcgggttgctggacagggattcttctttcactaccctgcatgattcaagtgtggctgaaatcatagccaacaatcgtttagcggaatacctgtctgctcaaatagagatattatcagaggaacttcatttgaaattcacttcaatggtagaaaaccggctattgcagtggacggacagcaaggtcgctttggttgagtttatctatgccctgtatgcgggcaaatgcttcaacaatggaaataccagtttaaaagacatagccttttgctgcgagactcttttcaatattgagattggagacttttatcgcatattcctggaaatcagaaaccggaagaagagtcggacgcagtttcttgataagttgaaagataaaattataaagatgatggatgagctggacaaataaatttcatgtcgtcttgtgacatcttgtgaattatacaaatggctaatatccaactttgcggagaaaaagatttgattcacaaagaaagataatagcttttgtataattatggaaacaacatttacatgggagataaaggtgaagaatactcctttattgattaaaaaatgcagccactgtgagagtgaccgcttttattgcagtgataagttcagaatgaatgcacagaaaaagaacattgatgtctggctgatttacaggtgcgtgaagtgcgataacacttgtaatatgactttgctgtcacgtaccaaaccggacttgattgataaaaaactgtttcatagcttttctatgaatgatagagaagtggcctggcagtatgctttttcagccggaatggcaagtaagaacaagcttcaaatagactacgatagcgttgaatatgaggtgataagtaatatctccttcgaagatattatgaatatgaacaacgcgataataagtattcggatcgaatgtgattttgaattgaacctgaaattattatcattgataaaaaggtgtttttctctttccactacccggttgaagcatttgtttgaagaaggaaatatttctttgctttccggtaagacgtctccaaagtgtaaggtaaagaatggagatataattttgatagatcgaaaaagcttgattgatattttgggataagatcgattttacagttttttttaatagctttgtgatataatcattcggatgctgtaaatgaggttgtactataaaatcaaagatatgaaaaaggtatttttattagcttttgttttgtttgcatggagtatggttgtcaatgctcaagaaagtgatgggaaatatattgaagtgacaggttcttcggagattgaagtcgttccggatgaaatacattttctgattcagattaaggagtattggcaggaagagtacacaggtaaatctaataaagaagaagattttcggacgaaagtgccattggctatgattgaaaaggatttgcgtcggagtttgcgcaaaatcggaatagcggatgatgctatccgtacacaggaaataggggattattggcgccagagaggaaaggaatttctgataggtaagcaattggatatccagttgaccgattttgagcagattaattccattatccgttctgttaacacatggggaattgagtccatgcgcatcggagaattgaagcataaggatttgccaatgtatcggaagcaaggtaagattgaagcattgaaagctgcccgtgaaaaagcatcttacttggtggaagcgatgggacaggaattgggtgaagtgatccgtattgtagaacctgttgataataatataagccgttatcttccttttcaggcacagagcaatgtcagcatggggacggctgctaccgaacagtaccgtgtcatcaagttgagatatgaaatgactgcccgttttgccatcaaataaaaaatgcctatctttgtggcatgactaaaaataataaatcggatttggtttgataaacaatctgtgtttctgacacaggttgtcctttcgtttgctctcggatgattccattcgagggtgttttctatgtttttataaattcaatttttaacttgcgtacaatggtgtgaaaagcattgttatgcttttcaacgtgtgcgctctatatattaagatcatgaataacgaaaatcaaacaattcacaaatccgacgataacctaactatttatggttggaatgagaaactcaatcagctaaaacaagaatcaatatatagtacccttgctcatgggcgtgtctctattgtacatcgtacttgctacgaggtaatttccggaaacggattgtttcagtgtgaactcacgggaaatatgatgtatggaaaatcggatgatgaattaccttgtacaggtgattgggtcatttttcaaccgttcgatgaacataaagggattatagttgataggttgcctcgtgagcggacattgtatcgcaagaaaagtggcacggttgctgataagcaggccattgcttcttatgtcgataaggcatttattgtgcagagccttgatgataatttcaatgttcgcagggtagaacgctttatggttcagataatggaggaaaatatcagctctgtattggttcttaataaagccgatttagattttgacagacagagtgttgaggaacaaataaaacatatctccagtcagatacccgtatttttcacgagtattcatcagctcgaaacaattgtccggttacggaagtccatatcggaaggcgaaacggttgtgtttgtcggttcttcgggtgtcgggaaaagctctttggtgaatgctctttgtgaaaagccggtattgctcacatctgatataagcctgtccacaggaaaaggccgtcatacttcgacccgtcgtgaaatggtattgatggacagttcgggtgttttaatcgacactccgggcgtccgtgaatttggcttggccattgacaatcccgattctcttgccgaagtactggaaatctccgattatgctgaattgtgtcgctttaaagattgcaaacatatcaacgaacccggatgtgctgttttagaagcagttaacagtggtgtattagattataaagtttatgcgagctatctgaaacttcgtcgggaagcgtggcatttctccgcttccgaacatgagaaacgtaaaaaggagaaatcctttaccaaacttgtggaagaagtgaagaaccgcaaggcaaatcgttgatctctattgaaacgatgcaggtatctccagatgcctgcatcgttttatactagcttaagcttatatctatttgggatttatatttagaagagcttttttattacttattgtcgtatctgcctgtaaaaagcagtttccctttctgtgtatattgttctacgaaatcacctttgtgggaagtgtacatatttctgtcatgttcatattgtttccataaatcaagtttaagccgttcatattctttcgcaatagctgtatttgtttgaagataatctctgaaatacaattcatcattatctccctcataacataagtgtagatgaaatacccgttcggcaaatccttgtaatgtataacctttattgaaatcaatgcgactgtcgttctctgccatgcagatatagccgcatctttcaattgtacctttcaaatcgacgactttttcttctcttgggatttccacaagtatatctatggtaggctttgcccaaattcctttaattgctgtgctacctatatggctaatacgttcaatacagggaagtctctctttcagcaactccgcttcttccttataccaatctgcccaatagtcttggtgtgcagtcagggttatggggaataattgccaaagctcgtctaatgataattcagttaatttcttttgttccatatcatgtggcaattgttattaataataagtgacatagctatatagataaattacagtcaaaaatcaattaattcttttatttcctatttcattatcaacattcttttttgtattaatgttttatgctgataatggtttgcagcttgccgccgttaggcaggacaggtgtatgttgtaagctaaatttcgtattcaatcttgtaatcttcatatacattgaataccgtttcacaatctgataaaatactttcaagcaaaggtttgacctcactattccaatctaacttacccagccctgcacctattttcggtagcgacacggttttgatacctctgctttcgcacacttttttcaagcgtttcaaacctttattcagatatgtgagttccgcatgatacatatcgggttgtgtagcgatgtagattatacccggagagaaacctttgatttctcctataaacacattgccagcctggaacttagtgttgcgtgtgtacttcttaaagagtttttggatttcagggaattgacttgacagcttaaaggcaagcccagttcctaatccttcttgtgagccaacagctacaccttgtgctatgtactcatctttactctgtaatatatctcccgaaatgtattttatcatattgtttccgtttttctattgcttataatggttagaaaggagcatcgtcagatgctatctttcgttgttagcaacctatttgaaataattaatcaatttatcgttattaggaatattcccagtatgccacaaatggatttgtgactttattaccttcaatttttccataaacatatatacagccagccatgaaaacagaaatatcttttatgcaaatttcgttgatttgaaaaatgaagctatttccatctttaaccactttaccatcattatctaatccccattgaataggcattacattacccccaaatttgattgcacaatttttttcaggcatatctttttctgtactcatttcgtatattgaataaatttcatctatttcggggtgtttatatctatcacttttgctttgactacttaattcatgttcaaccaacaacaatttacaatcgggatatgtgttatattccaatgcaacatcaaattccggagtgaaaatagatatttgcttgttgggatttaaagggttttgaaatgttagataaaaatagagattatctttgtccgataaatacttatcatcaaaacaagctggagcatttccaccaacccaaccaaagcagtctttttggtattcaccaatgccgtagtatattgcattttctcttgttttaagtattctttctatatccataataacgataatgatttgattgttgctaatgcgttaataaccacacctcatagtgtagttcctaatctctattattctcatatatttactacctattagtttcatattatcagtccttatcaataggaaatgaaagtaagtcatcaatcattctgctttgaatctcggtcaccccatttccccaaagtaaagctaatcttttgatagctttaactccctgttcttgtaatttgggtgagagacgcccagtgattttgatttgtccaaaggcagtagcgtaagtcaccatgtcgctttgtgtcatatccatttctttctttgaagctagttttttaaccacttcggggtcaagactttcaacaggaatatattccatgccccagtcgtgttctatcagatacttgggataatcaagaaagttgagtttgggattttttctgatcgtttcttcaagagaatctaacgtatcacttccctcatcgctaccaaaaggtgcttcttcgtctacgcaatcataatagagttcttccgtgaagtgttcggtaaatcggggatgagaagttttggggtgcaaaccatattcttcggaatcaatataaaatctgtgcatgaagtcgaagttggcgtcttctacatatccttttttctttttcgagtgaataagtttctctgcttgtttcaggcattcttcttctgtgtcgaaatccttgatttcaaatttaccgatactgtcgaacttaccataatttacagcaaaatcacagccactataatcaatccaccaaaatttatgagatttctcatctttataaataaatgctcttttcataatattgtgtgtttattgttgggagagagtaatgtctctactatacacaaaagtaggaaaactgttgagttatcacctatatgtcttcgtatttcttctgtatttttacaaaataagtcttgtttattcattttttactgttttttcgagaaaacagcaaaaaaagtttgagttacgcaaaaaggttgcgcactactacgcctatctttgtcgaagaaataagaaaacaggtcaagtacgggttacttcaacacactctttaaggtagaacattaccagtacgattatctgttttcctgtttcgtaaagaggcagtagctcagtgggtagagacggtcgtcggttcgactccggcctgctccccaaaaaacaaatatagaggtaggacagtagcttcgggattatctgaaatgaggtcaaccggggcttacttcttaacggtggctatcgctggttcgaatccggcctgttctacctctttttatcagcttaaggtcaaggaagacttacttcaacactgcaggaatgctccattgattcacagtcttccgattaccttacttaaaacacaatgtatgaaaaaagattagttgaaagtacctatcaggctaattgttgatctctattgaaacgatacaggtatctccggatgcttgctttgcagattgaagtgctgtttgttattgttatcaatatcgtatatccgcgtgtttattatcttttcttgatttaaatttgcctttctcctgtcatatccgtaactttgtaaactaaagaatccgatatgaatcaggagttattagtaacaaagccgatacaattctattcttcgtagatgcgctttcggtggtaagaattaagatagccgggaaacgaattgtcaggctattgagaaagaatatacgattaagaatacaaactaaaaatagtggcataaatgataacttcctgtatagcaataatattcggttttcgctttttcggcagaggattgcatgaaatctccggggaagaaatggcgattattgcatttttcatgttgtttctgtttgttccgtgcctgtggcttgtcaggtatttaaaagatgacgaaatagattcaaacagacaggataagctggtggagatacatattgccctgaccatcgttctgactgttgcgggtggtgtcttttcccggatgtccgtacttgtcaataagtggatagacgaacaaccgttcattgttgcagcttacatagcgttggcacttagtgtttttggtgtcgttatcggcaaagctattgatttatgggtatattatttgaagaaaagaatattctaaaacagtatgatagagtacatgaatattccggttttggtttgtgtctccctgttaggggtgggggcttttgttatgatagtaggctcgctattgaaaaagcagtgggctacggatgggaaaaagacttcgttatccatttaccttttatatcttttcgcaatgtcaggttccggctggacatggtataatagcatacataaagcccgtgcgttggcagaaggcaatcgatacactttagccacttatgaaaaagtgtcgggtgtcattaaagggggacataaggtacgccagttcggtttttatgtggatggggtgaaatataatactacaacgacatatcccaaatttttgggtgtcagcaatcctttgcgcatcatagtgaggtatgccgtcagcaaccctgaatacaataaggctttgggggacgagtttgtccccacatgggtactgtccccaccggaaaaaggttggaaacaatacccgcctgctattcattgggaaggtgctgttctggattctgtttatatgcaatcattacagggtaataattaatccgatgacggtaagtgccgtatatacgcagttgatataaaatgcagccatcaacagccggggaatatattcagacttcttgaataaggatgcagactgaatgatgaacaaagcagtaaaaagagcaatgctaaaaccgacctgacttatcagcaaccattgcggatattctgtaatgacagccgcagaccatgcttggagcaagggagttatattttgcagaaatacgtgagccgcaaaatatcctagagaagaaattgcttctttcttctgtcgtagaagcgcattgatagcataagcgcctattccggcttgtcccagcagtatggataactggaaaaagtcgaaaatccaatagatgggattgctggtagtgccatcgttggcaaaataatcatagaaacagagtgaggatacgcaacttgttgcgaccaatcctacacagataaatgaaataattcttttattcattgtattttatttctttcagatgtttttccaatgcaatatacacttctttctgataactgataaaaatagttttatctgttgggaggaatgtttctttttcccgtcatagtgcggaatattagataaaaacaggctatatgaaaaattcatattcttctctattttacgggaaggcttgaatgacttggcaggtatgtaagaataaataccctctttacaacggtagggcttatacatttgcacaactccccacgaattaatctcattctgtttcatttttcgtttattaatttataaattaagttcggtgtcagcattttaattcaagctatctttcatcattattcgtagttgtttttgtgtaggtaatgttttccatcctttatctggtgcttttagagtaaaccaggatggtacgctgtctaatattagatgtcggtcgggggcttttgctaagaatgttacaaagtaacgggttccgattggagtgtttttactctcggcaaatgatataaaaaaacttcctttatataaagtcttattatatacaaattcatattttgcactttgccctctataagcagaactgtatttaacaagagttactatagaatatatgccatcctttcttacattgttgtttctaattgttgagacagcatacaatagaataaatactacaatagggattataaatttaaaaatcttggtttgattaatcatatttattgctattctataatactttcattttttcctctgtcgataatgtccagcagcgttccgctttaagcagtagtgctgtttgttagcaacttattcaataatcaaaatatctccaaagatatttgaaagcatttttctatactcttttatatcttcaattgcattatccttatatgacacagttattgaagtaatatcgtcttcatatttatgttttactgaaaagacaatctcattttgacgtatgacgactttactacataaaccataaccagaattagattgatctgaatattcaaagtagtatgaatccatacccaatttaatatcctgttcatcaaactctaatgctctttcgacaattacatattctttgggttcattcttatcatctgcgaaaccgactaaatatgaattgtcttctgttacttcatatactatatcatttgctataaagtttatttccatatttcacctgttttaatcagttgctaacgttatgctaacagcgatcatttaatgtttcgttgttattttttctaagtattttattaaatctcttcttcaaaatatcgtccaacggatttttaatgttttgtttatcagtaaattatattcatattgttttgctatatataattatgcctctaaaaatacggttttgtctaattattcacaaaggaatctgttagttttttcctctatcctatacaatttcatcctttggcagtcaataacacaatcgtatgttgtataattcgtaattgcctgttttctgtttacattcgtacatctatatcaagttatcaggcagagagaagaagcgtatagcatctctatacccagtctctccacaaagataagctataataatcctctttcgggaataatagctaactatatatgctatatcgtcatttcttatctattttcaacctcatatctttgcaacatcagaaaaacaatagaataaactacttattaaatggagaattatgagaaagaatttattatttctaacagcattactaatgtcgggaatgattttagctcagagaggagaaagtattatgaagaagtatgaaaatcaactgccacaggcagggagaggaaatgtacatgtagcctaccaaggaaaggctattgatcagatgatttacgaatttatagaagagcaggggataccgggtatgacacttgccattgttcaggctccttacattccgcgtgttgtaggctatggagtgacagattttgaaaaaggaaatctggctgcggcaaaaactctttggccggtaggaccaatttcacagggttacgccgctgtagcggtgatgcaactatatgaaaaagagaaattgaaactgaacgatcctatcggaaagtatcttaaggatattccggaaaattggaaaaatatcagtattcttcaattgttgcagcacagttccggtattgcggattaccgtgcgcaggcgggattcaatgtgtcggaagattatcagcccttgcaactgattaagacagtcgaaagtcttcctttggcttttgaacctggtactaatgtgaagcaaagtgcgacaaacttcctgttactggcttctatcattgaaaaagtaggcaaaatgccgtatcatgatttcgtgaaaaagtatcagattgactatcttgggttgcaacaaacttatttt

SEQ ID NO: 8056 - DNA, 32035 bp, Unknown
  gut microbiota DNA sequence
agggcgttgccctacgctatataattaagccctttcagggcactccgcaaaataatcatttattgacctgcctatttttatcctacaatgttttatttctcaatttttaattctcaattcttaatttatcattacctttgccacactaactaacattacgtaataaaataagaaacttatggcaacacctccgtttaagtatcagcccatgtttgaaaagggaaaagatacaactgagtattatctgcttacaaaagactatgtatcagtaagcgagtttgaaggaaatcccatcctgaaaattgaaaaagaaggtttgactgcgatggctaatgctgcttttcgtgatgtatcattcatgcttcgtcgttcgcacaacgaacaagttgctaagattctgagtgatccggaagcaagcgaaaacgataagtatgtggcgctgactttcctgcgcaatgcagaagttgcttcaaaaggcgtacttccattttgccaggacaccggtactgctattatccacggtgaaaagggacagcaggtatggactggatattctgatgaagaagcgctttcactgggcgtatataaaacatacactgaagaaaacctgcgttattcacagaatgcgcctctgaatatgtatgatgaggtaaatacaaaatgtaacctccctgcacagattgacatcgaagctaccgaaggtatggaatatgaattcctttgtgtaacaaaaggtggtggttctgccaacaagacatatttgtatcaggaaacaaaagcgatcctgaatcccggtacattggttccgttcctggttgaaaagatgaaaacattgggaacagccgcttgtcctccttatcatatcgctttcgtgataggtggtacttctgctgaaaagaacctgttgacagtgaaattagcttctactcatttctatgataacctgccgactaccggaaacgaatatggtcgtgcattccgcgatgtcgaactggaaaaagaagtattggcagaagctcacaagattgggttgggtgcacaattcggaggtaaatatcttgctcacgatgtacgcatcatccgtctgcctcgtcatggtgcatcttgtccggtaggtttgggcgtatcttgctctgccgaccgtaacatcaaatgtaaaatcaataaggaaggtatctggattgagaaactggattcaaatccgggtgaactgattccggctgaactgcgtcaggcaggtgaaggtgatgttgtgaagatcgacctgaaccgtccgatgcctgaaatcctgaaagaactgactaaatatccggttgctacccgtctgtcattgaacgggacgattatcgtaggtcgtgacatcgctcatgctaaactaaaagaacgtttggaccgcggtgaagacttgccacaatatattaaggatcatcctatttattatgcaggtccggcaaaaactccggaaggcatggcgtgtggctctatgggccctactacggcaggacgtatggactcttatgtagaactgttccaaagtcatggcggtagcatggtgatgttggcaaaaggtaaccgtagccagcaggtgacagatgcttgtcagaaatatggtggtttctatcttggttctatcggaggtccggcagctatccttgcacagaacaacatcaagagcatcgaatgtgtggaatatccggaattgggtatggaagctatctggaagattgaagtagaaaactttcctgcatttatcttggtagatgataagggtaacgacttcttcaaacagttgaaaccgtggaattgcaaaaaataatcggttgatacctgttgggatgaaacagtaagaagaggctgtaaatgccttgaattaataaaggggctgtctgactattttattgttagacagcccctcttcttattttaaggacttaaagactttccggatattaactttttcagtgtaaatatcaacctttcatcagttatgattacttattctgttcttttttccatttttcatatctcttcaacaccttgcttccatctttgttataccaactataaccatttcggcgttcgtgtccgatttccgatatatcatattttttaatgccatcacggtcgcagaaaaaaggccggtttgtttccagatcataaaaacgtgcccaaagagtaggacagtcttcacagggaaccatgcgatagtcttttttgccatcactgttagtgaaatattctttttgtattccttttatttcagacttttggaaccatttgatagcaccttctatggattttacaacgtctgcagatggatggggaagtgacatcaacagtaatacaatgttgtcagactcttgtccgcttagtgacgggagttcataggcacgtgctttgcagggttccaaagtgacacggtcatgttgggcgcaccacactgttaactctccattttggcgcacctgcgttttgagtatacactctatccctttattaaatgcattacgtgcttgttcacagatattgtcaggaaggaaagtgtacggagctttcttttcgtatatgctccgaagttgattcatgactctcaccattgcattgtcattgtaggtgatttgtacataataacctttgggacgcggataaaattgaggccatccaccgttttcatactgcgatttgagtagatattgaataccgttcagcactccttctttatatttctccttttgcgtagccagataaagccgtgacaaatattctatttctgtcgtggtggcattgttgtcaatggtgctttggttggtatcttctttagcttttagtgccgcattatattcttgttccgtcagttctgccggcatatagatattcttgggccagcctccggtagtttgttgatagagtaacacgttgtcaccgatgcgttgggcttcttccgtcttgaagaaatcatcgtcaaatttaggggcgatgtgtacccattctttgtagttctgttgttttctgtaatctgttgctttttgggctgaggcgtttgccaggataaaaagtaatagtaagaaaagacttagttttctcatggcttttattatttaatgtttttatagtatgcaaatgtaggaagaaagaaaaacatcgatatgtaataactgttttttatacagtaaaaattgggttaaccctcccgataagaagattaacccaataaaaaaaataaatggaaactacttccttattccagatatttcgtaatctttccgctgatttgcaacagggatatttcgcaaagtttcgtgttatattcagcagagaggatgcgttcctcggcatctaataaacttttttgtgcttcgcgcacttcaaaaccggagaggtccccctgtatataacggtccatggcaatatcgtggttgtccttggcggttatcaggttttgacgttccagattcaacaattgaagattgttgcgataggcttgccataagttactgagatcagagcgaagtgctaattccaagtcctgtcgttccaggcgacgattcttgaaagccagactcgcatttctcttttcgcggcgacgattaccgtcgaatatattaaaaccgacagttattccggcattgaagcccagttcacctcttctgctgtttgcattgatgtcatacttgttgaacgtatatccatatccagtatttaatttgagatatggatagttgcgtgagtttattttcttgtagtccaattgggcaagtaccgtgttttgatcggccttgagcaaagaagcattggttgctaacgtagaattccacaaatcatcaaattgcaagtcgctgtgtacgtcgatggtggagtctttgataataatgttttgattgacattgttgttagccattagttcattcaactggatgcgtgaagaatgtagcaattcctgttgtttgatgtattgggcactgtctgcattgaaatccacttttgcctgctgataatccagccctgaaaacttaccgaccaagtgactagcctcggctatgcgcaaacgctctttggaaagtgacattgcataatgaaagtttttcagacggatcttctgctggataaaattatagtattcggaagtcagggcagcaataaaatcttcaatagcaatacgcgtgttggtttccccctgacgttccagctctttcaactgtttgtaggtggtactgatattgaatccgtcgaaaatagtccagttgaggttaagaccgacattaaccgtctgatcgtagactccgttgttttttgttatttctccggtagcacgcgccttggtctcaatattgtccaggtttccggtatatccggcagagaagtccagtgtaggcaggtaacccgcatttcctaatgttgcgttgtttttgctgatctgctcttcgttatggatgatacgtaaagagtaattgttttgcaatccttcttccagacactccttgagagtgagaacttgtgcctttgcaaaagagactgataagaaggcacatgcaatggtgatataaatgatgcgtttcatgcaaattcctttctgtttcattcttgtagttttttgattcggttagtcgaaatgtaactgtaaatagccggtacaatgtacatcgtaagcagagtggatacgaccataccacccactaccgccgtacccatggcaatacgctggttacaaccttctccggtggcaaatgccagcgggataagtcccaaaaccgtagaggcacttgtcatcagaatcggacggaggcgttgaagggcagcatctttgatggcactcattttatcctctccggcttcctgtttctgattggcaaattctacaataagaataccgttcttcgccaccagaccgatcagcatgataataccgatctgactgaaaatattcatcgtaatatctccgaaatacatgaagaccaaagctccggcaatagccagcggcactgtcaacatgataatcaacggatctttgaaactttcaaactgggctgccagaatcaggtaaatcaaaaggatagccaggataaaggcgaacatcagactggatgaactttcacgatattccttcgagtctcccgatagggcagtgcggaaagtgtcatccaatgtttctttggcaatcttatccatttcatccaaaccttgcccgattgttttgccgtctgccaatcccgcagagatggtagctgacacaaaacgattataacgatacaactttggaggtgcaataccgctttccaattcaatcaagttgtccagctgaatcatatccccgctactgctacggacgtaaatagctttcaggtcggccggtttgtttcgttgttggcggttgatttcaccaagaatttcgtattgtttaccgttcatatagaaatatcccatacgttggccgcttaatccatattgcagcgtttgagcaatgttcttggtacttactcccataatactggccttgtcgcggttgatctgaatacgagcttccggtttactgaacttcaaatcaacgtccgccatctggaaaacaggattctcatatactttagccataaacttgggcaacacttcttccagcttttccaaattggtagcctgaagtacatattgtacaggcatactcccgcgacgtccgccgaaagaagactgctgctgtacgaatgaacgcgccattgttttcttctgtaccgcttttgatattttctctgccacatccatctgggtataattacgttcattcatatccttcagcgtgatgcgcacgtttccgctaccgctggatacacgggcagttacagcctcggcatcaggcagaatggagtctaccagttgattgatgtcttctgtgtaatccctgatatattcataggtgacgccttccgctcctcgtgtattgatactgatttgcgaacggtcttcaagtggggccatttccgcaggaactgcattccacagaataccaatcaggcaaatggtgatgaaagtaaatggaagagcgatccagcgtttgctaagaaaagcggcaagcgaacggctgtatagccgattcattccttcaaagaacggttctgtttttgcatagaaccaactttgtttttcccgtttaatgagtaacttcgttgccaacatcggagtgaaagtcaatgcggcaaatgaggatataatcaccgaacccgaaataacgatactgaactcacggaataatcgtcccgtcattccatccataaagacgatagggaagaataccgctaccagcgtaatagtggtggaaataacggcaaagaaaatttctttggctccttctattcccgcttctttcggggccattcctttctctatacggatgtagatattttctgtcataacgatggcgtcatctaccaccagtcccaccgatagtacgatggcgagcatggaaagcacattgatggagaatcctgccagatacataacgaagaaagcaccgataagggaaacagggattacgatacaaggcaccaacgtgacgcgccagtcacgcaggaagaggaagataatgatgattacaagtacgaaagcctcatatacagtggacttaacctcattgatagacgcacggataaacttggtattatcaaaaccatagttatagtgtacatcttccggcaagtcttttttcatttgctccatacgttggtatacagcatccgcaatctcaatgtggttggctcccggctgtggaatgactacgacacccaccataggaacgccgttcatcttcatataactcttaatatcagccgggcccagttcagcacgtccgatatcactgaatcgtacaatacggttattctcttctttgacaatcaagtcattgaattcatctgcggtatgcatcaatcctagcgtacggatcgtcaactcggtggtatttccttcgatactacctgaaggaagttccacattttcgttatctacagcgtttttaacatcgacgggagtgataccgtaacctgccatctttaccgggtcgagccaaaggcgcatggagtaacgcttctctccccagatagatacactacttacatcagaaatagtctgtaattgttctttcacagtcagatccgctatttcacttaattccaacagagaacgtttgtcactctgaagagcaaccatcaagataggcatggcatcggcatctgcttttgaaactgtcggtgggtcacagtcgcgaggcagataacgttgggcacgtgaaaccttgtcacgtacgtcgttggccgctgtttccagatcgacggacaattcaaattctactgtaatacggctttgcccctgctggctcacactggacaaagaacggataccgggaataccgttgatattctgttccaacggttcagttatctggttttcgataacgtcggcattagctcccggataagagcagctgacagaaataatcggattatctaccgacggatattcgcggacacccaaatagttgtatccgatgaatccgaaaaggaggataataatcgttaatactgtggctaataccgggcgacgtatacttaattcggagatgttcattgatttatgatttctgatttctgaattatgatttctgagttatggattgaagatttctgatttttgaattctggtttctggtttctgaatgtttgctgtattctgctgacttataaatcataaattatttggcttataaatcataaatcagaattcataaatcagacattctcattcttcaatattgtcaagtgttacggcgagtccggtacggagttgcaatgttcctgaagtgatgattgtgtctcctacgtgcaatcctctaatcacttgcacttcagatgcggtgcggataccggtaataatatccaccggttcggcctttcctgatttatatagatagactttatctttacccatttccggcacaattgcttccgttgggatggctattgcattaggtatttcatcctttttcaacagcacactggcataacggccgggaagcagggtgcgattgacattcgggtataatgcacgggcggtaaattgatgcagattcggatcgatggcagattctacagcgtatacctgtgcgccgaaagcatccaatgttccttcaacgctgaaattgagattggttccctttttgatttgcttggcatagcgttccggaacggaaaattcaaccttcagtggagcgatttttgttagcttggcaacgactgtggtcggagacgcatacgtaccgatactgacttggcgaagtccgatcactccgtcaaacggagcacgtagctctgtcagttcaatattagctttgataatttctatatcggcattcagagttgctaaatccgttttcacctgttcgtaggcttctttactgacagcatcccgtttcaataaagcatcctggcggaatacacggtcttctgccagtttcaattgcgaaatcaacctttgcaattgtgcctgcaactgtctgtcattcactttggctagtaattggcctttctttacggctgttccttcttcaaagttgatttctacaatctttcccgacgtttcgaaagacaaatccacttcttcatcgggcagaagtacaccggtagtggtgaattcatctgtcagagattgcggttttatgaccttggcatttacatttaaaacttgtttccctctttttttattaccgcccatcactttgtcggcggctgctagttcgtcgttttttttcggtaattgtgagtagattcctccaccgataatcccggcaccaacaagaataatgatgccccatttagtcttcttattcatggtttagtattgtatatggcaattatattgtacatcttcaaaaattagacttcccctgatgggaaaggtttaaagaaaggaagagtaaaaaagagttaatcagtaggcagcccgatattttccttcctctttatcttccaacatattgagataagaggtataacgggattcgctgatgaggtgctcttccactgctttgcgtacggcacatcccggttcatgacgatgtgtacagttgccatatttgcagtcggcggaggttttgaatatttcgggaaaataatgtccgatctcttcttcttccatatcgaatgtgccgaagcccttgatacccggagtatcgatgatatagccatctccttccacagggaacatttcggagaaagtagtagtatgcattcctttgttgtggtaagaagaaatttcgccggtcttggtttctatgcccggcagtatggaattgataagagttgatttgccgactcccgaatgtccggaaaataaagtaatcttgccttccagtgcttttttgatttcagccactccagtgccgttctttgcggaaactttgaagcaagggtagccgatttgtgtgtataagttgataagtgcgtccagatagcggagctcatcttcgtcgtaagcatctaccttattaaataccagtttgacagggacgcgataggcctctgcggatgcaagaaagcgatcaataaaaatagtggaagtttccggataattgatggttaccaccagcatacactgatcgagattggcagcaaggatatgagattgtttggaaagattggatgaacggcggatgatgtagttctttctatcttctatttcactgataaaagcagtgccttcctgattaagtataatccggacacgatcacccactgcaacaggattagtactgcgaatccccttcaaccggaaattccctttgattttacattcaatagattgtccgtcatcggttttcacctgataccaactacccgtgtttttgattactaatcctttcatataaattataaattaaaaatgaagaatgaagaattcaggctgtgtttcaactgaataatacagcattataattcctcattcttcattcttaattcttcattattttttagacggtcataatttctttatccttttcagccagcatatcatcgatttgtttgatatacttatcatggattttttgcagtttggcttccgcattcttctgctcgtcttctgccaatccgtcttttacggcctttttcagtgcgtcgatgccgtcacgacgcgcgttgcgtacgcttactttagccgtttcgccttctcctttacactgttttgccagttgtttacgacgttcttccgtcaggggagggatgccgatacggatcatttctccattgttttcgggcatgataccgaggtcagagtcgataattgctttttcgatgacacggaacatgcttttatcccaaggcttgatcacgatactgcgggcgtccggagtagtaattgctgctacattgctgataggtaccatacttccgtaagaatctacgcggataccatctaataagcgtgcactcgcttttccggcgcggatatgtgccagtgcttcttccagatacatgatggccatatccatcttttcttgtgcattgtcaaggcaagtctttacgtctaccatattttttgagatttaaaattgcattttgattgattaagtagcaaaagtatattattttttgttcatctgcaacagcatacccatcttttttatgagtgacttgccaatgataatcagggtaacagcggtgataatcattaaaatacccatcattaagcggggagtcagtttttcgtgaaacaggagaacaccgaagaataaagctgtcaccggttccagagcacccaatattgccgttggtgtagagcctatataatggatggccagtgcggtacagaccagtgatacggcagttggcaggatggcgagtgataatacatcggcccagagccaggcagacggtattacttgcagttccgtacagaaatttaaacggacgatataaaccgatagtccgaacaaaatggcatagaaggtaagtttcgtggtcggcaggtttttcaatgtcgaacggtttacacctactatatatatagcataagagagagaagacaacagaacaaagataattcccaaagtcgatagcggtttgttgccgtctccctgataaagcaaggcaatgcctgaaagtgccagcaggatggagaaaacggtaatggcggaaatcttttccttgaagaatattcccatgatgacagctaccatcaccggataaacaaacagaatcgtagaagcaattccggcatccatataattataactcataaacaaaagcagtgatgaaaaagagaataacaatcccataatgactaagggcaaaacgtctgccttatgaagtgcaaaagactgatgctgcattttcatcagaatacccaatacgattgtcgcaaagaagtaccggtagaataaaacggtatcgacactcattccggctgcatagagcggaagtgcaaaaagaggattcataccgtagctcgcagcggcaatcgctccatagataaaacctttggttttgttagtcattgttttgctttttttaatggcgtgcaaaagtacgcagttcaccaatgataaacaagtgtttaggcggttgatagtataatttaatctttcgtatgctaaaaactatttcttggtaaagagataactaatcttgtttatgcataaaattaatcgtctgactatagtcgaacttgcgtctgactactgttaaacttacgtctgactatagttgaactttcgtctgactatagtcagacgaaaaagaattaactgtcagatgattaattttattcggtagggagattagttatacgcctcccgagtaatagtctgcaggcaataggcaatcaggtttttgaataaacacttgcatatatcttggattttcccgaatattgcatctgaattatcgaaaaacacagatgaccaaagctaaatttcttgttgtttattgcctgttcatatcgggactttgttgcatggcaaatgtgacgaaggatatcaatatgcgctttaaggacgtaaggcagggactttctcatcaaacagtcaattgtttctatcaggatgaattcggatttttgtggatcggcactcaagacgggctgaatcgatttgacggacgtaagtttgaagtattcaaaccggataacgctaatccttattccatcaatatcaataatatcaggcaggtttgcggaaataaagccggattgctctttatccgcagtttgcagagcgtgactctttatgatatgcgtttgaatcgttttagggtgttgcgtgaaggagaagttgcgggaatctgttatgcgcacgatgcattatggatagctaccggaaaggaaatctaccgttatcgcaacctcgaccaggcgcccgagttattcttttcatttccttcggatgaggaggatgtattgatgaacagtctcatggttcgtcagaatcagacagtggtggtgggtacttcttcgaaaggtgtatactgcatcgaccagtctgcacatatcacccggcgtatggatgtgggagctgtcaattcaataacagaagatagaaacgggagtatctggatagctaccagaaacagagggctcatacggttggatgaagatggaacacttactcatttcaagcataataaggtagctgaaaatacgattaaccataataatgtgcgtcatgtgacgcaagctaatgatagtctcctgtatatcggaacctatgccggtttgcagactttaaacctgtttaccggagagtttacagattatgaatatgacttgaatgtggaggcggccgatatacgttccattatttcgatgcattacgacacttcggggactttatggttggggactttctatcagggaatccaatattataatgtagcgaatgatgctttccatttttaccgctcgtctacggctgttggcggtcatttgaattcttatattatcagttccattgccgaagaccgttccggccggatctggtttgcaagtgaaggaagcgggttgaactattatgataaacataccaaacgctttttccctttaaaaaaggtctattctcaagagctttcttttaagatagtgaagtctctttattatgagagagagccggattatctttgggtagcttctctttatcagggaatcaaccggattaatctgtcgaccgggcatatagaatctatctcggaaaacatctatactccggaaggaaaaacagttgttgacagagcctataatctggtgaaaatgatagagtttgccggccacgattctttattgatagctgccaagggaggattgcttgtattggataaaaaacaccttcgacttcatcatttcgaacacccttcattggctgccaaacatctgtcgcaggtttgggatatgacgtttgacaaagacggggatttatggctgactacctcttttgatctgatacgagtcaacctcaaagcgggcactgcccatagttatcctttttccaaaatagcgcagagcacagcgcagcatcacatcaaccacattttatgtgataagaaaggacgtatatggctgggatcgacaggctcgggaatttatctatttgataagaagacagattcttttgtgggatacggagcgaaacagggattggaaaatggatttataaccggattggtggagagtcctttggatggttctatctatgtggcaaccaatggtggtttctctaaattcaatctggcaacgactacattcgagaactataacagacagagtgattttcccttgaataatgtaaatgacggagggctgtatattgcgtccgaccacgatatttacgtgtgtggtctggcgggtattgtctctatcgcccaggaaaagctgaacaaacagtctgttgactatgatgtgtttgtaaaacgggtgcttgtggataatacggaaatacaaccgcttgattcgttgggacttatcaaagaaaccgtattgtatgaacatcggttagtattgccgcccagatattcttccgtcacttttgagatagcaagtaacaccctgaataatatttctaatatcggtctggaatataaacttgaaggctttgacaacgaatatatgaaggcgggcgataatacaatgattacctataccaatcttcatccggggcattatactttccatgtccgtggcgaccaggtgggcgttcacggtcgggaagcaccttccgttagttttgagctgatagtggaggctccggtttatcagcgggcatggtttattttgctgatggtgctgacagctatccttattgccggctatattatccgtatgttctggatacgaaaaaccttgcggcactctttattggccgagaaacgggaaaaagagtatatcgaaagtgtgaaccagtccaaactgcgtttctttaccaatgtatcgcatgaattccgtactccgttaacacttatatccagccagctcgaaatgctcctgatgcataaggacattattcctgaagtatataataagattctggatatttataaaaattcccgccggatgaataacctcgtggatgaagtcattgatatccgtaagcaggatcagggatacttgaaactaaagatttctaaagagaatattgtggcggtgatagaggaaatttgtggctctttctatagttatgcccaactgaataagatagatctccgcttttcttccactctgaaagaagctgatttgtatattgacaaaacacagatagagaaagtattctataatttattgtccaacgcttttaagtatacgaagcctggtgactggatttctgttgagctgtcagcggaaggagataatgacattgtgatttcagtcaacaacctgggggtaggcattgataaatccaagatcaaacatgtatttgaacggttttggcaggatgattcggcaacaaccacacgaactgtcaaaggatcgggcattggattggcgatggcgaaaggaattgtagagttgcatcagggaaccatcggagtggaaagcgaactgaatggagttacctcttttaccgttactctccaccgggatgcgaatatgaatatggaagcctcttcctccgcagacgagcacgttgccgaacattatataatagagcctcaagaaatctcggaaatggtgaagccggataaaacggtgaaaatactgattgtagaagataacccggaaatgcgtaaggtattgacgcagatttttgaacagatatatgaggtatatacggctgccgacgggcaggaaggattggaacgggcttcttcgctccaaccgcagatgattgtaagtgacatcatgatgcctgtcatgtccggactggaaatgtgcgagaagttgaaaagtaatttgcagaccagccatatacctgttgtcttgctgacagcccgcaaccgggaagaacataccttggaaggcttgcagacaggtgcggatgattatatctccaaaccttttaatatcaagatattggtagcccggtgcaacaatatcatccagactcgtaaactacttcaacaacggtttgttcgaaacgacgaacctaaagtggaagaccttccgtttaatccgatcgataaaaagatgttgatggatgctacggcgattgtggaatcttatattgataacccagactttgacgtagctacttttgcacgagaaatgtgtatgagcagaacgttgcttttcactaaattgaaagcattgaccggacagaccccgaatgactttattttatctttgagactgaaaaaagcaacagaaaaattgcggaatgaccccaatgccctgattgctgatatagcatttgattacggtttttctaatccaagttattttatccggtgttttaaaaatgcttatgatattactccggctgcttatagacggaaatatgcaaactcttaatttatagtgttttatatactttctgcctgacgagatttgtactatttgaacttttatacggacgattctattattcgaaatcattaataattgggatttttgcgctgtaatcattcaaattattacatagtatgaaaaacatcgtaattaaatgggctgtgttcctgacagcctttcttatctctttagaggttagtgctcaaaacgtcagagtttctggagtggtgacagacgcacttggaccgatccccggagttaatatcatggaggaggggactactaacggtacagtgacggatgtaaatggaaaatattcaatcagtgtctcggctaaatctacccttgttttttcttgtataggatataaggaacaaaaaatacgtgtcggtacgaaaacggtactgaatgtgaatatggtggaagagtcgaaaatgctcgatgaattggtggttgtcggttatggagttcagcgtaagagtgatgtagccacttcggtagcttcggtcaaagcggatgaaatgaaaacatttcccgccggcaatgtggctgatatgttacgtggacgtgccgcaggtgtgaatgtaacgagtagttccggacgaccgggatcgactccttcgattaccattcgtggttcccgttctatcagtgcggacaatgcacctttatatattatagatggttctccttccagtgcaacagagttcagtacgttgagtgcggatgatattgaatcggttgaaatcttgaaagatgctgcgtcacaggctatttatggtgcacgcgccagtgacggtgtggtactggtgactaccaaacgtggtaaagccggaaaagtggaagtcaactataatggttatctgggtattcaatctctctggagaaatttcgatttctactctcccgaagaatatatgcagcttcgtcgtgaagcaaaggcgcatgataaaggaataattgatgcgcgtgagatttctatagccgaagcgttggaagacgaggtgatgcaacgggtatgggccagtggaaagtttatcgactgggaaaaagaaatgttcagaaatgcaatctatcataatcacgacgtcagtgtacgtggaggaacagaaaaaatcaaagtatcggcaggtgccaactactttgaccaacaaggaatggtggttaccggatcggggtatcagaagttttctttaagactgaatctggactttgaaatagccaaatggattagtttcggtatcaattcttcttatgcgatgacaaaacaagatcgtgaggatggtaactttaatgattttattaccagttctccattggcggagatatatgatgcggatggcaagtatacaaaatatatcaactcggaaggaaattataatcctttgtaccgtgccgaacattatggacgtgaagtaactcgtgataattaccgcctgaacttttttatggatgtgaaacctttcaagggattcaattatcgtctgaatacttctgtttataatcagacgtctgaagacggttcttataaagattcccaatatccgggaggcggaggaacggcggttcttgacgaatcgcgtacacagaactggctagttgagaatattgtgacctataaagtgcctatccggaacaagaaacaccagttgacattgaccggcgttcagtctgtcgaccataatggttcgaagtctgtcgggtactcggttgagaatcttccggtagataaagactggaacttcatttctcaaggtgagtttacaggcaagcctcgtcgtcagtttaatgaaaataacttggtgtctttcatggctcgggcgcaatattcgcttttagatcgttatttgttgaacgtggctatccgccgtgacggttccagccgtttcggaaaagaaaataaatggggaactttcccgtcggcagcttttgcctggcgtgtcaatcaggagagtttcctaagagatgtgtcgtggattgataacctgaaactgcgtgtgagttatggtattgtaggtaatcagaacggtatcggcaattatactactttgggactggctgataataaaggatatgagtttggaaatgtttttcaaatgggatatttaccgggcaaggaactgtctaatccaaacctgaaatgggaacagtctgcaacagctaactttggtgttgactttagtttcttcaatgggcgtctgaatggtacggttgagtattataatactcatacgaaggatttgttggtgaaacgttccctgaatgcgtcactcggatatactaccatgctagataatctgggaaagacgaaatccagtggtatcgatctttcgttaaatggtgacgtggtacgtacaaaggagtttacctggacactcggaactaatttcagcatgtataagaatgaaattgtccgtattgacgatactctcgatgagaacgggaaaccggcaagtcaggtagcacaggggtggattatcggagaaccgatcaatgtatactatgattatctgatagatggaatttttcagtatgatgattttgatatcactcgtgatggtacgggaaatctggtttatacactgaaaaacacctatgatagtgataatgacggtgtggccgacagtccgattaattacggtggcgctattgaaccgggaatggtcaaggtgcgtgataacaacggggatggaaagattacagctgatgacagggtacctatccgtaaagatccgaagtttacactctccctttcttctacatggaactggaaaggatttgatctgttcatggactggtatggagtttccggcagaaagattaagaacggttatttgtacgagtataattccggtggttctttacgtggaaaattgaatggggtgaaggtggattattggactccgttcaatccttcgaacaaattcccacgtccttcttatagtgcggaccctgcatatttgagtgccattgccattcaggatgcttcttatatccgtttacgcaccttacaactgggatatactttccccacccgactattgaagaatactccgattcataaattacgattgtatgcaacagctactaacttgctgacatttacggagtttaaatcttatagtcccgaactgactccagggtcttatccggagtccagacaatatgtgtttggtgtcaatgtttcattctaaaataaagaatccttatgaaaaagttaatatatacagcctttgtcatttgcggaatgttgaccgcttcctgctcggatttattaaatctggaatcaaaaacagacgtgacgaataattatctgttcactactcccgaagggttgaatactgccgttacaggattgtattccctggcacgtgaattgccgggtggagcggataataacgaatctaatctgtacatcgttaccatgtgtgactttaatacggatattgccatacttagagcaggtgtttctacctcaatcggacgtttgaatacaagttttactccaagtactggagatgtcaataagttctggaaacatcactatgggattatcggaaaagcaaatgaaattattgtagcggcagaagccttggggctggatgacagcgatgtattgcacgcatggagtgaagcgaaatttttcagaggacggagctattttgaactttggaaacgctttgaccgcctttatctgaacgtcactccgaccactgtcgataatctgaaacgggagtataaaccggcttctcatgaagaactgatgacactgatgacgactgacttggatgatgcgatgaaaggtctggactggtcgcttcctcaaaataacggaaatgtattgtatggacgggtaacgaaagcgactgccaaacatgtccgtgcacaggttgccatgtgggaatcggattgggatacagccattgaggaatgtgaagacatctttaaacaggagggcatttactcaatggaaaagaaggccgagaatgtatttaatagcgcagatttgaaatccccggaagtgttgtggagtttccaatattcacaaaacttgggtggaggaggttccggaactccggttgccggacatcgtatctctattcagaccactacccgaatcaataaaattgcaggttgtatcaatacggccgatcagggtggatatggttggggacgtatttatccgaatacctatttattgagtttgtatgatcaggctaaagatacacgatacaatgaattgtttgtacaccgtttcaaatacaatgatcctaattctcctaaatatggagaattgattccccttgcgaaaagttccagttattgtgagacgttgcatttcatgtcgaaaaaatactttgatcagtggactatggccgataatccggaccggacaacgggattcaaggatttgattgtctatcgactggctgaaacttacttaatggcggcagaagcgtatatgcgccgtgacggaggaatgagcacggatgctctgcgctgctacaataaaacatgggaacgtgccgggaatgacaaatttgcgggacctctgacgcaagatattcttttggatgaatatgctcgtgaactaaacttcgagggagtccgctggcctttactgaaacgtttggggcttttgggtgaaagggtgaaagcgcattatggcgagacaaaagctgaaaatccttatttagataaagattatgcggaatgtcgtaccagttttgtagttggaaagcacgaatgttggcctatcccacaggagcagattgacttgatggggaaagagaattttccacagaatgagaattggtattaagcgattgattatctgaaaaacatgaatgagtatgaaaagaataatatatctgttattgattttaaatatggggctgctttcctgtgtcgatgatgcgtcggtacgtgtgatgcctgaatttaattgtaaagatacaaaagtaaacttggcaaaagcggcgggttcttccgttacatcgctattatatactaatgtcggtcaggttgttgctcaatatcaagcggagtggctttctgtagatgtaaacgctaaaagtgtaatatacactgccttgacgcagaatgacggtgaggatgcaaggagtactgtcgtgaaactgacttgcggttcatatacagtggaagtgacggttacacaggattccaaagaaccggacctttctttgaaggtaggacaaagtgtagatgatggtatcggtatgattttctgggtggatccttcggacaagatggtaggaaaagctgtatctgtaaaacgtcaggtaggaaatccttttgaggcctctgtgatgtctcataatgcgctttctacagtgaatggatatgccaatacggctttgtttactgctcctgctgcaaatgatgcagtggcatactgtcagtcgttgggtgagggatggtatctgcctgcacgtgatgagttatgggagttgtttgatgtttacaacggtattggacatgctgatccggattttgcttcggttgtacctgataagttgacggaagttgaaaaagcggcacgtgcggcatttgataagatgttgaccgatttgcagggtgatgtgataaacgaggctgccggttcgggcaatggggaaagctattggtcgagtacggaaaatgcagcaggggataaggcttattgggtacgtttcggaaagtctggtgctgatgcaggaaataaaacagctaccaaccgttttgtgagatgtatgcgcacaattggtgattatacttatcctgaagagccggcaactctgacggtggctcccaatcctgtgacattggaaggtgctaacgaagcggaagcaaatgttacgttgacatccaataagagtgtattcagtgtagtgttggcagatgattcctggctttcatatactatttcaggtactacagttacgttcaaggcaaaatcaaaaaataccactggtaatattcgtacgacaattgctacaataacagccggtactggcgcagccgcaaaagcagtggaggtaacggtgaatcaaaatgtagctgccgagggagacgcttccctcgaattgagtaccaatgcggtgactattacgcctgatgcggtagcaaaatcagaggtaattacaatgatttctaatgagacggaatttgcaataaatatcactgatgaatcttgggtgaaagcgtatgttgatgtaacaagtaaaactctttatttttggacattatctcccaatctgaatagttctagccgggtaacgactgctacggtaatagccggaagcggagcgaatgcgcctaaacaagaggttacgattacacagagaggacttttaagttccgagtttgcggtgggacaggtaattgcggataatggatcgttaaaaggaggcattgttttctgggtaaatgcaactaatcgtggtaaggctaagattatgtcgttggacagagagaatttggcatggtctacagcaggcactccggcttctaccggagtggatttatccagagatgatggatatactaatactatggcgttggctgcattaccaaatgcatcggaaatgcctgccattaagttctgtatggacaaggggacaggttggtattggtcggggagaaaagacttggaacaaatgtttgaaacatataatggaaccactgtagcaaatgcaacaaatgataatccgaatgcgattactgattttgaaaaagccaatcgtgcagcatgggatcgggttgtcagcaatgcgggaggaactattatgaatgaggctgtgtcatcttctacaggagatacatattgggcttgtcgtgaggcttcgaatggtgtgaatggattttatgtacgttttggaaagcctatatcttggagcagtgcaacctctaaaaagagttctttaagatatattcgtgcagtccgttcaatctcgaaataatggtattaggtatgtataaggtatatagaaaaataatcttagcctgcttgttattgattgttgccggcacggtctgcggtcagcgtgtgacgcaaacgatcaacgatggttggaagttctccctctttgagggagacgcgtccactgctgactttgatgtgtccggttggactgacgtttccattcctcatacttggaatgcaaaagatgcagaagatgaaatccccggttatttccggggaaaaggctggtacaggaaagccgtgacagtggaggaactgattgcaggtcaaagagtttatctttgttttgaaggagccaatcaggagacaaatgtatttgtgaatggaaagttggtagggaatcataaaggtggttattctgcttttacgtttgatgtgactgactatgttcataccggacgcaatttggtggcagtgagtgttgacaactcttataatctggatattgctcctctttcggcggatttcactttcttcggcggactttatcgggatgtttatctggtgtatacttcgcccgtgcagctatctaccacccattatgcttccagtggagtatatctcaaaactgttgggataacagatgctcaagcggaagtgtgtgcaaaaacattcttgtccaatgctttgaaaagtaatcaggcattgattcttgaaacggagattttggatgcagacggtaatagagtggcactttccgcaaagaaagtgaatgtgaaggcaggagagaagaatgtagcctttgaagcgttgatgactattgcgcaacccaaacggtgggatgttgattctccttatttatataaggtgtatagccgtttgaagaataaaaagggagaagttctcgattgcgttgttaatccgctgggaatccgtgaatatcattttgatgcggagaaaggttttttcctgaacgggaaatatcggaaattgattggtaccagccggcatcaggattacaaaggaatggggaatgccttgcgggatgaaatgcatatccgggatatacagttgagtaaggatatgggaagtaatttcctgcgagtggctcattatccgcaagatccggttgtgatgcagatgtgtgataagttggggctgttgacttcggttgaaattccgattgtaaatgctattactcaaagtaaggcgtttatggacaactgtgtggagcaggctacggaaatggtttgtcagaactataattatccgtctgtcatcatttgggcttacatgaatgaagtgcttttgcgtcctccctttaatcctgacaacaagaaagaacgggcggaatatatgaagtttcttcatcaaatagcttcggctgttgaggcacagatcagaagtctggactcggaacgctataccatgttgccttgtcattctgcttcccaaatctatcaggaagcagggattactgaattgccgatgttattgggatttaatctttataatggatggtatggtggtaatttgggcggatttgaagagaaactggaagaacttcacaaggagtttcctcataaaccgttgcttattaccgaatatggggcggatgtagatactcgtattcactctttttcgccggtgcggtttgattttagttgtgagttcggctctgtctatcatgaacattatttgcctgaaattctaaaaagggattatatcgtgggggctatggtctggaatttgaatgatttttattccgaagccagaagaaatgctatgcctcatgtgaacaataaagggttggtaagtacggatagagaacgtaaggacggatattatctttatcaggcttatctgaaagagtcacctgtcctgcatattgcttctaaatcttggaagaatagggcaggagccagtcgggatggaaagagttgtacgcaaccgctgaaagtttatactaacgcggataaggtggaggtctttttgaatggaaaaagtttgggagtatatccggtagcagataaggtggtttccgtggacattccttttgtaaacggaaagaatgtggtggatgctgtgattgaaaaggagggacgtgaatatcgtgaccagtatgtctgtgattttaaatgtgtcaatgtgaagaatggctttacggaaatcaatgtactactgggtgctcgacgctattttgaggaccggatagcagagatgtgctggatacccgaacaggcttatgcagaaggttcatggggatatcttggtggggaagtggctccgaacaaaactcgttatggctctttgcctgccagcgatacagatatactggggacggatcaggatcctgtcttccagacacagagagtaggcattgaggcttttaaggcagatgtaccggatggtgtttatgctgtatatttatattggacagaacttacttctgaaaataaaagagaggctttggtgtataatttaggaaatgatgtggtgagggaggactatattaaccgggtattttctgtggatataaatggagtatctgttgccaaacaactgaatattgcagaagaatacggttccgaacgtgcggttattaagaaatatattgttccggtttcacaaggaaaggggcttgtcgttcgttttggagcggtggaatctgtgcctattttaaatgcaatacgaatcgtaaaagaatattagatgatgaaaaatagtatagttatattgtttttactgctgttatcccagtttggttatgcgcagggaagcacatttaaggtcactgcccgtccgtgggtgaaaggacagaaagatcttccctggaaagagtatgatacccgtactattgttcaattggatgggttcaaacctactggcaaagtacgtgtgaataagtatggaagtgatttggatgctcccaggcatcgggctacaggatttttcagggtagaacgtaccggagatcgatggtggatgattgatcccgatgggtatcggcatttgcagaaagtggtggtaggagtacgtttaggtacttccgaacgcaataaacaagcaatgctggacaaattcggtacggaggaaaaatggatcgaaggaacggcacggatgattcattcgctgggcttttccggggccggctcctggagtaatgaagaagctattgcctcttacaatgcctctcataaggaggtactgactcgctcaatcattctgaacttgatgagtggatatgggaagaaacgaggaggaacttatcagttacctggtaatacgggatatcctaatcagtgtattttcgtttttgacccggagttcgaaacctattgcgatgagatggcacaaaaactggtcgcaaataaaacggataaaaatatcatcggctatttttcggataatgaactgccgttcgggccgaagaatctggaggggtatctgactttgaagaatcccaatgatccgggaagattgtatgcagaatcctggttgaaacagcagggtattactttgcagcaaattacggacgaacatcgggaagagtttgcgggggtagtagcggaacgatactataaagtggtgtcggaagcgattcggaagtatgatcccaatcacctttatttaggtagtcgtctacatggaaaacctaagtttgtccgccagattgtggaagcggcaggcaggtattgtgatgtcgttgctattaactactatggtgcatggacaccgagtgagaagaccatgaagcattggggcgaatgggctcaaaaacctttcatcatcacggaattttatacgaaaggaatggattccgggctggcaaacacaacaggggcaggttttaccgttcaaacccagcaggaacgtggatatgcctaccagcattttgttttaggattattggaaagtgggaattgtgtcggatggcattggttccgttatcaggataatgatccgacggcaaaaggggtagatccttcgaatctggactctaacaaagggctggtagataatgaatacaatctttataaaccgttggccgatgctatgaaagaattgaatatcaacgcttatcgtttggctgactggttcgaccaacaatcaactaataataaataaaatacataccatgaaaaaactatttatattgggaacttttctgtttataagttctattcctatggtgtcttgtacggatgatgatgataaagatcctaattttatgcctcctgacatagtgatgggagggggagatgtagagtcggaatatccggaggatttgcctgctcccggagcttctgtgatgtatactccgtcattaaatgccaatatgtatcgccctatcagtgttaagtattccagtgcttatccgcctatatccagttggaaaacagagaatacacgtattattgcgtatatggacgggtataaaccggctattaaaacgttgaaagcgtatcaggagtcggttaataaatacggaagttcgactacgcttccgaaacaggcggctacgggaagattttatacgaagaaaatagacggacgttggtggttggttgatccggaaggttgtctgcatctggaacgtagtgcgacttctttgcgtaagggaacttccagtcgtaataaaacggcctggaatagcaggtttggaactgatgagaaatggttatctattactcaacgtgaattgagtgagatcggctttcacggtacaggtgctttctgcacaggaacttattcactgattcagactcataatgcttccaatccgagcagtccgttaactttggcgccttcatttgcttttctaagccagttcaagagtgcgaagtcttatagttatcccggaggaagcgatgataacgcggcaggtcttgtgttttataatggatggagtgaatggtgtgaatcatatttggcaggtagtgctttcgcagattatttgcgggatcctaatgtgttaggtttcttttctgataatgagataaacttctcttcaaacagttctcggattttagatcgttttctggctatcagtaactcaagtgatccggcttatgttgcggcgaaagcttttatggattctaaaggtacgcaaaatgtgacggatgacttgaataatgagtttgccgggattgtagcagagaaatattataaagcagtgaaagaggcagtgaagaaagtagatgataagttgctttatctgggaacaagattacatggaactcctaaatatatggaaggagtagtgagagctgccggaaaatattgtgatgttatttctatcaactattatagccgttggagtcctgaactgacaacagcgattgctgattgggctaattgggcggacaaaccgtttcttgtaagtgagttttatacgaaaggggtggaggactctgatctgaataaccagtcgggagccggatattctgtccctacacaaaacgagagagcttatgcttatcagcattttacattaggattgcttgaagctaagaattgtatcggatggcattggttcaaatatcaggatgatgatggtacggataattcgtcgaaacctgctaataaaggtctttatgataattcttatcaactctttccttatttatctttctttgcccgcgaattgaattttaatgcgtatgatttgattcagtattttgataaataggtgtttgtttctatataatatttgagaggaaaaacaaggtgcgaattttacaggattagttttggttaaagctatcctgctaaattcgcacttcttatttctaaatgaataatcaatgtcttatcagagtagaatatcatctgatagacaaatgaatatcggtagtgaaatattagttatgtactaacgtacctatctcttctccactgataaccttctttaagttgcctactgtgtccatatcaaatacgacgattggcagattgttttctttacacatacaagtcgctgtcaaatccatgactttcagaccgcgtttcagtacctcatcgtatgtaatatcgtcgaatttggtagcggtaggatctttttcgggatcagctgtgtaaataccatctacacgagtacctttcagcataacgtctgcttcgatttctatgcctctaagtgaagaaccggtgtcagtagtaaagaaaggatttcccgttccagcggacataatgactacttcgccgttctccatacattcgatagctttccatttactgtagaattcaccgataggttccatccggactgctgtcaacacacgtgcctttacaccggtagccacaagagcagaacttagagcgagactgttgattacggtagccaacattcccatttggtctcctttcacacgatcaaaacctttattggctccgcttagtccgcgaaatatattgcctcctccgataacgataccaatctgtaccccttgctggtggatttctttgatttgttcagcatattctgccagtcttttttcatcaatgccatattgcttttcgcccattaagctctctccactaagctttagtaagattcttttatactttgccataccttttgctttttattgtttgccgcaaatatagagataatttatcggatagcctcactgggatatgattacttttttcattatttgtcttcccaaaagggtttgtacaattccccgcaatgaaagataaacgagaaaagccagccacagggcatgatttcctaaaaggggatggaaagcgtaatagactccaaagaagctggcagaggcaactaacatggagtaaagcatctgccgggtagcagtggcaccgataaaaatgccatcccataagaaagcggagaaaccggctaacggaataatgagtgcccagtaaaaataagtgtctgaagcgctgattactgaagtgtcattggttagtaatcccaggaattcttttccgccagctgtatagagaatcgtgaataccagtgaaagaccgaacccccaatagaaaagatgatgtactgtgttacgtaagcctgtttggtttttggcaccaatgtaacggccggccagtgcttcaccggcataagcgaatccgtccataatgtacgaaaataaggtaaataattgcatgagcaaggtgttcacggctaatacgatttctccttgggcggcccctgcagaggtaaaaaacatagtgactataacaaggcagagggtacggaagaatatgtcccggttgacttgaaagaaacggtacatggcttgtttctgtatgatttctttccacacgattcgttttttaagcgcactatagtaacgcatgtataacaaaatagccatgaagaaacctgcatattgggcaattaaagtccctgttgccactcctgctactttcatgtccaataagtagacaaaacatagactggctacaatgttgacaatattttgagtgatagcgatatacatgggaaaacgtgaattctgcatcccgataaaccagccggcgaatccataaagccctaatgtggcaggagctccccaaatgcagatgtagaaataggttgttgccagttgcttgacctccggtgtggtttgtatcagtgtaaatgccagtttcaggatagggtattggagtatcaacaggcaaagtgctataaataatcctactccaacagaacgtagtagtaaccgggtgatttcgtttaaatcatgctgaccgtacgcttgtgaagtcattccgcttgttcccatgcgcaggaatccaaaaatccagtagataatattgaataacattccccctactgcaatggctccaatgtacgccggagaaccgagatgtcctacaatcgtgacatcgataagtcccagtagcggaacggtaatattcgatataatcgatgggatggctatctgtaatattcgtctgtttacggaggatttttttttatctgtcattgtataaaaacacttttatcaatttgattgttcttttcgcgaacaaaggtacattttttatttttttattgtatctttgtgtgtcacgaactaaatagcaatcagatggattatgaggaccttaactatttttcttatctctttattttcattgccgctggtgctgaatgcgcagtcggttgatgagatgttacaaaaagtgtctgctgccattgaggcagggcagaatgggcaggctgtgagctatttccggcagactatcgctctgaatatagaccgtacggaaatgtattattggacgaatgtagacaagaacagtgaaattagctccaaactggctacagaattagcgcttgcctataaagagaatcggaattacgataaagcctatttattttacaaggaattactgcaaaagactcctaataatgtagattgtttggaagcttgcgcagaaatgcaggtatgtcgtgggcaggagaaagatgctttgcgtatgtacgaaaaaatattgcaacttgaggcggataatctggcggctaatatctttttaggaaactattattatttgacagcagaacaggagaagaaaaagttggagatggattataaaaaactttcttctcccactaaaatgcagtatgcccgctaccgggatggattatcgaagttgttcactacccggtatgagaaagcgcgtaactctttgcagaaagtgattctgcgttttccatcaacagaagctcaaaagacattggataagatattgaggatagaaaaagaggtgaatcgctaagcggttcacctcttttcaattatattcaatttgttattttatagttcgtattggtaaatccaaaggcccttcattaagcgctcgggtatcaatgtctcctttcttcggtccgggtatcagaggactataggataagacatgtctgatacgttcacgttgattttgagtgaattggtttgaataactaatagcataatccatgatattataagagataaactctataccatcacatcctgttcgttttaccaaatttttaaatgtgtatttttctctctcattctcatatatgtaatcacatttgctatcatactcttgtttattatagcttttggtatctttgcaataatccgtatcttcacacgtgccattatcggtttcggcaaagacatg

SEQ ID NO: 8057 - DNA, 6039 bp, Unknown
  gut microbiota DNA sequence
agaatatgtatttttgtactttcaatacttgatactttctcgaaatgactgaagatataaagaataaacttttgatgtgtgcggagatttatcatcgtgcagactttatacaaagtgacccggtacagtttccccatcgttatacactgaaacaggatatcgaagtcagcggtttgctgacggcgattatgagttttggcaatcgcaaacagatcttgaagaaagcggacgaattgcacgggctaatgggagattcgccttatcagtatgtactgtcccgtcagtgggagagagatttcccatcgggagcaaccagtagtttttatcggatgctgtcacatgctgatttttatggatactttcggcgattgtatacagcttatacacagtttgaaagtctggaggaagctttgatgttatatcccggaataccaatggaaaagttatgtgcatttcttgaagtctctgccaaaagtcctcaaaagaaactgaatatgtttttgcgttggatgattcgtcgggattcggaggtcgatttggggatttgggaaagttttgatcgcagagatttgattgttcctttagatacacatgtctgccgggtagcccattattttaagttgacggatgtggaaaccttttctctgaaaaatgcccgccagataacggcagcattggctacagtctttccggatgatccttgtctgggcgattttgctctgttcggcttgggggtgaatggggagatttaaatagataaactaatagtactgatttttccggttattatcgaaaatatagtgtttttcttaagttatttcgattataaccggaaaagtcgatattaaaccaactttattcgattataatcgaaaaactggagaactgttagaacgttgttatcttgtttgtgaaatccctccaaccatttgcgttcttatatttttccacagattcggcaggaacacgaatgacggtaatatcatccggaaatccgtaccatactttttcaaatacctgcggaggtgttgtcccttctacctttacttctttaatacctgtattattgaaagccgaaaaattaatctgtgtgacgtttgccggaatggttaattgggtcactttcctattaccacccagtaatccctgtcccaatatccgaatactttcaggtatttcgaagcgagccaatttcggacatccttcaagacaataggggtggatcatagcttcggggtcatcattgaaagtactcccgtaggtggtcacttccgccaattccgggcagtaataaaaggctctttgcgccatggttgtaacgccgttcggtaacttcacggttgtaacgctactttcccggaatgcttccaatccgattgtttttacattttccggaatctcaatcgttttcagttgagatgtcttaaggaatgcctgtgctccgatttctttcagtgtcgcaggcagcagcacttcttcaacgcccgcatatacaaaagtgctggcgggaagtttggtgagtttcgtttggcttaaatctgcttttttcaaattccggcaatagtagaaaatgttttcctccatctgttccaggcttgatggaaatactatttcctgaatggccgaattgaagaaagccatatctccaatcgattttagtccttcattgagtactacctttgctgtttggctgttgctgaaggcagctttcgggattgatctcacgctattgggaagtatgatttcattgtatcctttcaatatttccgtcaatactccgttttctatacggacgggtgaaacctgaacagaaaagcttttttgttttccttccagtgtgatggttacttcttgtttttcgacaggcgtggatgaagagaaaccgctgatctgttccggggtaacctttacaggccgttgtttcccgtcatcatatttgcctgtcacgttaaggccggttaagtctatattctctcctaatgcataaattgtttttgagggtagctgttctatgaagaaatcttcaagtgaagcctctatgggttcagcaggatttgctgccgaaggtgaatctttcctgtattcgtcattttcggtgctgcaacttagtaatattgttcccaaaaacatttgcagacaaagtgcggttattatataaagtctagtttgcttcatgtgataaaggcttagttagggaattgggttaaacgtatttctacttttacggcttttccggcttctacggttttgccggaagaccatatctgatagttgttagggccgcccccttcttgtaccacgaatgtcaggaaccgttgcgactgcgttgcaaaccattcctctcgtggcagtacaaaggtggccataccactttcatttgtctgtatgattgcagttggcaaagttaaattatctttttcaaaaaccttataatccttttcattatacatttttacgggaacgcccgttgcaatttttccattctcatcataaacggataccactacttttgcttctttcatttcttcgtttcctttttcgcatgctaccatgaaaagcatggcgcttaatagaataacaatcttcttcataatcttttcttttttctaatttttcgaatgcaaaagtaataagattgcatcaaattcgggttgtgatgcaatctcgcaaatctaacactttgatttaaagtatattgatattcaatggattatgaaagatgtattctaagatttctaacacaggtctaacacctatccgaaaagtgctaaaaacaactctttattggccgtttctgccgatttgatacgtgatttgagccgtgacttgcgagcatatacattagctaccgtatctttcataaacaaactgattacttgtggagagaaacctacaaaaatataacaaagcagtcgtatgtcagcttctttcattgacgaaaattcattccgcaacttctccattgcattatcatggcaggtatttacgataagttccagttcttgcaacattgcattgttctctgcaaaatcggtgataatctgtttcacttcgtggaacatggctgcttgttgcgatgcggtattctcacgttcatagtaagtctttcccagtttgtcaatgatgtcgaatcgtgaagctatcaaaccttttaaatggctttctgcattgcgctgtccttccatatgttctgtcagggttttgtattgggcgttggcttcttccgccaatagcaggtagcggtcggtacgttcgcgttgcaggcgcagacgttgacggatgatgtagtatgctacccctattattagaaaaattacgcttgctatggtaatctcccaggtagtacggttcttcatccggtattcggcaaatttggagcgttccttgaaatagtcacgttccaccataccggcggagaattgcatatttgaacgtgtcagcgagtcagtcagatagatataatggtgtatcttctctgtcgctttctcgaagtttctggcctgcgcttcaattcgataagcggtgtattgcaggtctgccatgtcacgtatatcggtggaatgtgtttctgcaagtgccagatagtagcgtgcgctgtctatacggtttttcagtagatttacatctactaacgtatggtatccgtataacgtatcttgctgggcagagagttcgatacgttgcagcaggtcatggggaatttgtttctttcctgacaccacatagagagaagcaagattggtgagactggctttggttaatttatcgtacttgtgttcatcagccaaatcaagtgcggcagaatagagccgcatggctttctccatatctttcgaattgaaagttgcggctgccatatcgagagttgcctttgtttcttcgcgagtattatcagcctgccggaagttattgcgagcttcacgaaaataatgataagcccggctatagttcatctggtcataatacacttcaccgatttgactgtataaaagccctgcataataaggctcattggtatccttcagtttctcttcaactttcaggtaaaggcgtaacgctcccggcttgtctcctgcacgcagtttgacttttccccaataatagagagtcttgcattggcggcgtaaatctttgggatgatgtttgtaatactcccaagcccggcgaatcagcgaatcattcgttgctttgatgtgatttttgtctaaagcctctgaataaagcaacgcatacctggcctgttcagcctggccgccttccgatttgagttgttgtaatattgttaaggcactatccggcttattttgtaacagtgcttccgcctcatcaagccgggaaatctgttctctgttataacatcctgtaaaaaagagaattactaatagttcgagtataattctgcatttcatgctgtgaatgtagtgaaaatatttcgagtttagtatggaatcgtcatatctttataattcttatgatgtttaattttgtaaaggtaggaaaatagattcgagttgaatttttcggactaatatcaatatatcttgaatatatagtcttttaatagttctttttcaactttaaagttgaatgtttgttgtgttatactacattattcatatctttgcataaagatattttagatatggatatagaaacagtcgataaattcttgaaagaatttaaagataaggctagggttttcgggattatctttcgcatagatagaaagaagaatatgcaagctttgcttgatttggaaatttcggcaattatgcgtgaaaagataataatgtctttgacagttgaagactattataaaggtcctacggaagataagttgaattatatgggagcactttgggagtttggcaagtccgtagagaaaaaggaggtttatatcaaaataagtaaaggtactggagcaaattctccaatctgtgtctcctttcatttggcagagagaaaaatagaacatcctttcaaaaataaaaagtagaagttatgaaaagtccgtttacaggtggtgacgctgcattgtgtcatgagaagcaatcatttgaatttcgaaaagacaattttgagatagtatatcatttttatagatgtaaggatacaaatgaagagtttactacaactgaacttgatcaactgaatatgaatcaagtttataatttgtatcgtcagaaatatgcgataccatttccggatgaaataaaaagagtccgggaattatatggtatatctgcacttcgaatgtctaaacttttaggttttggcgataaccaatatagaaaatacgaagaaggagagatgcctagtgtgtctaatggaaaaatgatttcagctttgaaagatcctcatttctttttggaaattctgaaacttgctcaaaatcagtttcccaatgatgagatacttaaaattgaaaaaagggtaaaggaactgttattaaataattcctgttttgagaataaaataaatgaatttatatttcacaaccatttgtctttacgttcaagtatgaatgggtatgcttctgtcattcctgagaaggttaagcagattattgtcttttttgcatctgcattacaaggagtttttgaaacaaaactaaataaattattattttattctgattttctttcctataagaaatatggtaaaggtattagcgggttacaataccaagctataagttatgggcctgttcctgtgcgttatagtactatatatgagaacttggatggattaaaaaaggaaattataaatttgggaaatggttattctggaagtataattacaactgttgagcaatttgaacagtctttatttacagttgaagaattagaggttttacaatgtgtattagttcattttgagaagagtaaggctaatgaaatttcagaaatgagtcatgctgaagaagcgtggcgtcaaaatgaaaaacagcatagcttgattgattatagttatgcgtttgatttgaaacagttgtaatgtaagctctctttagtacccatataatatagaatcgcaatt

SEQ ID NO: 8058 - DNA, 15767 bp, Unknown
  gut microbiota DNA sequence
actgtagtgtcccgccttagaaactctcgtttcctgccgtggaaactgtaatttctaatgcaggaaacgacagttccccgcctggaaacgggaagtcaatgtatacaataaacttttgtactcatggagaattagcttatgtcaggtttatactgtgttgcagatactttatctgcaacctatctgccgcaggtatctgcaacgctccaactatttatcaactagtacattacacgcttttcgttgcaggtggcagatgttttcatgttttttcatctttatggtaggaggattacgcatcaaaattagggtcacaaccgtaagtcataaaacagattcgcctctgtgtcctccgtgtcctctgtggtgaaaaccgtgcaagaatgaatctattttaagaatgtgattgccccgaatcactcccccttaattttcggactgccccccccttttttcttttatccgtttttcatttatgtcgcaaaactaaactatcccattatccatttcgcagccttaggcagcactttgtaaaataatgcaactatacaccacgatacgataaacacaaataaagctgtcgctggaatacgcatgaatataggtaaatcaattctgtcaatcgctaaataacctattcctacagcaaaataatgtaccatatagatgcccagtccacattttgttatattctttaaggctgatataattaagggagacgttacctttactttttgaattaataaataccaggcaaccgtcattaaaaagacattgggcgaacagtataaaaagaataattccatttgtcgctctgtaatatcaggttgtgaagtcatattcctgaatccataatacgttatggcataaccgacactaaaaagaataagagataaaacaacagtctttttcaccgataacttgtttctgtctttcaaataatagcctaaaagcagataaccgctaaaacctgaaaaataatataaagtgccatagtcattccaagcgcaagtacctcctatatagctggatatatattcttggcaataaggcagaaataatgtgataaaccaaacggataagaatattttcatttgtttctctgttgcttgtttcagccatgcagaaaaaaaaggcatatacaaatataatcctatcaacatatatatgtaccataaaggaactgtatatgtattgaagttaaaaggaatcataagaatattatgcaagcaactatcccaagtttgacttggagactctcctgcatacgcaaacatttcagacaaaacagaattatccagccctaaaatacccgtaaaccacggaaacaagttatataataaagaccatacaataaaagggactattacacgaagcatcctttttttataaaattgtccgatttcctgttctaccggtaataataacattcctgtcagcatcacaaacaacggtacgcacggacgcaagaaagctccataaatactcccccataagttatactccggatttaaacgagcttcaggagaaacattgaaagggtctgaacaatggatacagatgaccattaaaatggctatcacacgaattaaatcagcccatactatatgattcacatttttcatttggtattcaattttttcaattgcaaagttaggacaatggtatgacattttttttaaactacttaaaaaagcagaataaagcaatgcgaaggaaacgaaacaaccctattatttaatcttgttcctcaaatggcacaacgtaacttgagagatgcctaaaaaagatgcaatataacccaaatttactctttggaagagatccggacgtgtttgcaacaattctatatatcgttcttccgctgacttatacagtcttgaaattaaacgtttttcattcattataaaagcctcttgatgcaaaatccttgaccagttcgctatttctatattagtctgatacagcttttctaaatcttttatcggcacggcatataataccgtattttccaataactgaacaacttcatattcgtagccttgttggttcccataaaaattgttcgtcgaaaaaacgatatctccttctgtactaaaccatgaggtgagttctttgtcgttaattacacaatatgagcgtgctatacctttttcaatgaaataaaagtttttatcattctggaaagaggacgttaggatatgttttttgggcagttccaataaagagctatgagcaaacagctcattgatggaactattgctcatgtttgacttggctttaagtgagtttatcgtattacgcatcatttgactttcacaacgcttatttactctttcctgttttttattaagcagctacaaaaatacaaaaatgctcctataataaataaacaagctgcatttttatatatcgcccagattaacatttatggattgctccccttgcctttccattgttgtttcatgaccgggtatccatacttttctgctataatctgccgattttattcgattatcccaatgatattctttatatttgtatagtattcgcactaaaacaaagtacatcatggaaaatgaaaagaaattaacccgttcttccaaccgaatgatcgcaggtgtatgcgccggaatagccgaatatttcggatgggaccctaccttattaagaatagtgtatatactggctacattcttcactgctttcgccggagtaatcatatatataatcctgtggattgtcatgccgggaaaaagaccttcagacggatacgaagaccgtatgaatcaacgtttacattaaattaaaagtatagaccatattttcataccagtatccgatatagataaaagccttcgttcctggaagatggtaatccgatagaaataagtacattagtatagctccagtccgaactcatctttcagctgcatcaacgcttgattcttttgagccatcatctggaatttctcgacacgtcccacaggacgtattgtttccgttgcctcacttacccgcactgtcatcaccactttgctgtttttcagcctaccacgaagataactctgcaattcaggaatcaaagctgtaaaatcctttgcagcaaactcattatcaaccaccacttcaaaagtcgttgagttattaagcaataccggacggagcatctgcatacgtttagtaagagcatcctgttctttcggcaactgaccggcatattcctgccagtaataattcaaatcccgatcattgaaaataaaatcttcttccggttgctgtactctgggaacatgagtggtaactgtattctgcgttgtctgatcgcgctgcggattcttgatagacacgcccaaactagacatcttcatcaccggaattctccgttcttccttgacagttgaggcaactcccgctccttgcgacggagcagacgaagccgcaccagaagaagctgatgctcccggttgcgttgccgcagatgcttgcggatgccggacagtagtgccattaacagcctgtgttgttactgaagacggagacgtatgaagggaagcctgctgaacctgggttgcagaagcgacctgcggctgctgagctgcggcaggctgtgtgaatatgggttttatggtcttcgtagggccacgcccaccactcacgtcatccccctcggtggtaagctgtgcaacctgtatcaaggtcagttctaccagcaaacgcttatttttgctgatgcggtaattcaaatcacactcattacaaagcttcatggcccggtacaagaaaggtaacggacatttctgcgcctgttcctgatagcgttggcgtatgctcgctcccacctccagtagaggcaatgtcaccgggtctttccccaccaacaggtcacggaaatgagacgataatccggtaataaaatgacttccgtcaaagcctttattcaatatatcattgaaaagcaacaaagcatcacttaccttgttttcgaggaaacaatccgtcagacggaaataatattcataatcaagaacgttcagattatcaatcacactcttataggtgatatttcctccggtgaaacttacaacctgatcgaagatagacaaagcatcacgcataccaccgtctgccttcatagctatcacgttcagtgcttccggctccgccgtgattccttctttcgaagcaacatacgacagatgattcaccgtatcttccacgcttatccggttaaagtcataaatctgacaacgggaaagaatggtagggagaatcttatgcttctccgtcgtagccaggataaagatagcatgacggggaggttcttccagcgttttcaggaacgcattgaaagcagatgccgaaagcatgtgcacctcgtcgatgatatataccttatacttaccaatctgcggcgggatgcgtacttgctccaccaactggcgaatgtcatctaccgagttgttggaagcagcatcgagttcgtgaatattgtatgatcgctgttcgttgaaagctacacatgactcacactgattacaagcctctccgtcggcagtaggcgtcatacaattgatggttttggcaaagatacgcgcacaagtggtctttcctaccccacgtggtccgcaaaacaaataagcatgagccagtttttgggtagcaattgcatttttcagcgtagtagtcaacgcccgctgtcctaccaccgattcgaacgtggacggacggtacttacgggctgaaacaatatagttttccatatccgggattctctctgtttttttgaattttcgcttactctgcaaaaacagtgcaaatgagagcagagtcaagctagcttgaactatgccgagtgaagcctgttttcgcttactctgcaaatgtacacaaaaaaagtgagatgtaataagggataaagagagaagttttgaagctaaagcgataagtttttaagttattagttttatctttgcggatattaaaaggagaaattatgggtaaactaatcagtatctggagtttcatacgcagacggaagtatctcattacggtcgttgcgtttgctgttatcattggctttctggacgagaacagcctggttcgtcgtttcggatatgaacgggagattagccagttgaaagaagagatagaaaagtaccgggcagattacgaagagaacaccaagcgtctcaacgaaataacgaccaatccggacgccatcgagcagatcgcccgtgaaaagtatctgatgaagaaacccaacgaagatatttacgtttttgaagattaaagaatgaaacaattagtacccgcccttttcgtcgtaggcgccatcatggctctcaccggagctgctgtatttatcaccggatggatctatgctccttacatatatactatcggagccggacttttcgcattggcacaagtgaacacgcccgtcaaaggaaaaggcaaaacactgaaacgcctacgcgttcagcagatattcggagcattggcgctgatcctgactggagcctttatgtttaccacccgaggcaatgaatggattgcctgcctcacgattgctgctatcctcgaactttacactgctttccgtattccgcaggaagaagaaaaagaaagggcataaaaaaagcctgttcatagctttacagtcttgaacaggcggaaatcgaaaaaaatattgaaaacgttccgtcctttttatcaggaaacggaacgtttattttttatccttcactattatttcttcacaggtgaatatcttgcattcaacccgtcaacaatttcttttgtgatattaaaagtgctgtcagcataaagcaggttatcaaaacctgtgttgctgaaaatcaggctatatccgtgagtcttattatattctttcaggaaagcgttgatagaatcgcggaactgcaagctattcttgttgttctcttccatcaaaccattctgaagtttgttactcaactcttgcaaatcttgttccaacttcaccagacggttgtattcttgctgcgctctatcttgtgacaggaaagcattgttttctactttcttctggaaatcttgtttttccttgttcaaagaggtagccttctgattcaatgtcatgcgaacgttctcgctcttctttaccatcgcctcattcaagtcaatacagaaattgtatttggcaagcagcgtatctatttcaacataggcaattttcattcctgacagttcggcattagcctgtgccggagtacttgtagtttgattgtcagttttgccagcacattgtgaaaataaaacgataaacgcaagagcagccaaaccgttcatgaggtagttcattctattcataattaataagtattgtttttaataaatttaattcatactatcgttcaaggctttttccaactcatcaatagaaaaacgcggtttcttttgtgcttcgcgatcctgcgactgtgcgcatccgattcctttctgacgcaacgttttattcccgctcacatgaccattcgggaattttccacccttcgtaaagaatactttcacccctaataataccagggaaatagcaactattaacaaagttatcagtatagtctcaaccatttctattaattttgtgagtgcaaagataggctttaatgagatatgagttcagataagtcaatcaaattaaccatatttagcaatagaagaagcgaaaacagcccttctattcctattataaaataaaaacagcatggaaaaaaaagacttaaagccggctggcgtattcaagtatttcgaagaaatctgccaagtgccacgcccttcgaagaaggaagagaaaatgattgcttacctaaaggcattcggagcaaaacataacctggaaaccaaggtggacgaagccggcaacgtattgattaaaaaacccgctactccgggaaaggaaaatcttcaaaccgtcgtattgcaatcacatatcgacatggtgtgcgaaaagaacaatgacgttcaacatgacttcctcaccgaccccatcgaaacggaaattgacggtgaatggctgaaagccaaaggcactaccctcggagccgacaacggtatcggtgtagctaccgaactggctattctggctgacgacagcattgaacatggtccgttggaatgtctgtttaccgtagacgaagaaacggggcttaccggagctttcgccctgcaggaaggctttatgagcggtgatattcttctgaatctcgattcggaagatgaaggggaaatctttatcggctgtgccggaggtattgactccgttgcagaatttacttataaggaagtgaaagttcctgccggatatttcttcttcaaggtggaagtgaaaggtttgaaaggcggtcactccggtggtgatattcatttgggacggggaaatgccaacaaaatactgaaccgtttcctttcacgcatggctggcaggcatgatctgtacctttgtgaaatcaacggtggtaatctgcgcaacgctattccccgcgaggcatacgctatctgtgcagttcctgaagatgccaaacatgatgtccgcaccgaactaaatatcttcaccagcgaaatggaagacgaattatccgttgtagagcccgacttaaagttggttctcgaatcggaaactccccgcaagacggctatcgaccaggataccactacccgtttattaaaagctctgtatgcagctcctcacggtgtatacgccatgagccaggatattcccggactggtggaaacttctaccaatctggcatctgtcaagatgaagccgaatcatgtcatccgcattgaaactagtcagcggagctcgatactatccgcacgcaacgatatggcgaacacggttcgtgccgtattccaactggcgggagccaatgttacgtttggcgaaggttatccgggatggaaaccgaatccccactcggctatcctcgaagtggctgttgaatcttacaagcgtctgtttggtgtagacgcgaaagttaaagccatccatgcaggattggaatgtggtctgttccttgataaatatccaacgctggatatgatttctttcggaccaacactgacaggtgttcactctcctgacgaacgaatgcttattcctaccgttgagaaattctggaaacatctattggatatcttggcacatgttcctgccaagaaataacagacagataagtcaacataaagaagagtatggtaacagtgaaaagagagtagctgttgccatgctcttttttgcaatgaatttaatagctgtaagtttctttgctccttcttatgttatcgcacaagattctcacgaaggacaaggctatcacgacacacaagtcccctctcaacaagaaagaatccctttccgcgttgtaagttggaacatagaaaacctgttcgacactcgtcatgatagtttaaagaacgatcacgaatttcttcccgacgcgatgcgtcattggaattatagcagatataaaaaaaagctgattgacgttgcccgtgtaataactgctattggcgaatggagtccgcctgcattggtcggactatgtgaagtagaaaatgatacagtgcttcgtgacctgacccgccgttctcctttaaaagagcttagttatcgttatgtaatgaccaactcccctgatttaagaggaattgacgtagccttgctttatcaacgggatttattcaaactattatcttcccgttccatttccatccctccgttgaagcaataccgcccgacaagagatttgctacacgtcagcggacttctactgacgggagataccctcgacgtatttgtctgccacctccccagccgttcgggtggagccaaagaatcggaaccctatcgcttatatgcagctcacattctacgtatggaagttgatagcattatgaacattcgttctcttccgcaagtcattattatgggagatttcaacgattacccgacgaatcaatctattcagaaaatactggaagctgaagcacctcctgttactaccaataacctagcctcaacaaccggctccaccaacaactcaacagtagccccctcctcattaaaactatatcatctactcgcccggaaagcaaagtcaaaagacttcggttcttacaaatatcgtggtgaatggggattactcgatcacttgattgtatcaggcactctattaaatcaatcaaatcactttttcaccagcgaagaaaaagcaaatgtatgccttctcccctttttactaaaagatgacgaaaaatatggtgataaagaacctttccgcacttataagggaatgaaatatcaaggaggcatcagtgaccatcttcctatctatacagactttgaactgattctacattaattataagaaacggcagcagctaataatatccggttattacaaagaaagaaagtcaaccattatcagggaagtacaaacgccattacagtatgctctgacaagggagtattctcaccgtaatgagaaaagattctcatagtaatgggaatatattctcataaacatgagtattttttctcataaggataagtatcgttgagaaatacaacgcctcatcgtagctccattaattagtccgaatactgataaactttcaaatcgaacttcggtaccattgccaacaaatgatcgaagatatccgactgaatacgctcgtattctttccataccttattgcgggagaagaaataaacctgaataggtactccgtacatcgtagcttctttctgactgataatcaaatccaactcctgattgactacgggcaggctacacaaatagcgttcaatatataccctatacacttgagaattggtaggaaccactccttcttccggctggtaatctgccattagtggaatttctttccgataacggtccagcatttccggcgtacagaattgaagtgtagtcaagtccaatgtgatactcttcatcacccgtcgtcctcccgactgtgtcattccccgccaattctgaaaaggactgctcactaatgtataaggaggaatggtggaaatggtattatcaaaattctgaatcttgactgtattcagcgttatctcctgtacaataccgtttgcgtcaccggaaggaagcgtcacccagtcccccggacgaaccatatcgttggcagaaagctggatacctgccacaaaacctagtatggagtctttgaacactaacatcaaaatagccgccgaagcgcccaggcccgcaaacaaagtggccggagacttattcacgataatagcgatgattacaatcccgcctacaaagaaaagaagcacctgcaacacttggataaatcctttcatcgggcggtctttcatcgactctcttccgtcatagatatccattatcatcaacagaattccattaatagccaatagcaaggagaaaataatataaatgacacacgctttctgggaaatcagtaacaactcttttccacggataaaagccattggcaacaacgaataaaccagaaaagccgggatggtatgaatcaaatgatgaaataccttgcgtttcattaacaacgtgttccattgatgaggcctccgccttgtatactgtttcatacctccgataagaatcgcctgacagagataattcagaacgatagcaatcactatcatcagtaaagccataatagtctcatcaaaacgatcggcaactaccggatctattccccagtcgatgaggattttattcatccattttcctaaatctactactaacataacttctgtcttttttaataaataacagtaaaatattcatttggtttagaaaaaaaagagaccggtatctgattcatcaagaatcaagacaccagtctctgctgctactctctaagcatatctttcaatgagggctccatcagggagtcaccatcactcctatttcattcatttctatttttgcggtggtggcagttggcgtagtagcttccagtttaataaaacgtgcctgtattttctgtccgagagtgaccgtctgcggcaacggattgtgcataatattactaaactctccattagtcggaacttctttccacgtcttaccgtcctcactcacaaagaatttgtaacggaatgccatcgtcggttttacctctgcctttgcaggagcatacgtgaagctagccaacgtcactgtcttacctaaatcaatagtcaacggagagatagccacttgtttccatccggagcgcggcaagttattccagtcttctttctttgtttctccctgcaaaggttctgcatagtaagcggcaacctgactaacgtaagcagtcagacgacattcgtcaatcttcacccgtagctgactggctttcacggccgggaaacgcaacatacgtttataaccgattgtcgtaccttttccaacttctttccagcccttatcagtcaaggcttccacagtgaaagcctctacccgctgccctttcgttatatcttcctgcaacatgaccagattgatttccgatttggacttcaaggtataaacagtctcactacccgaagtagcgcaccagcatttccttccgtttttcacacggttgtcagcaaacgtttgctgccgatagtcggcaaactcttttaaccgcttgatatcagcttcatgaatcagccctctccggtcaggcggaatattcaatagaagcactgaattatatcctaccgactggaaataaatatccgataaatgtttcaaagatttcactttaccatcttcctccgcatgatagaaccatcccgggcggatagatacatccacttcagaaggataccagaataattccgtagctttctccaagatcttacgacttcccaaatcctctgctttaccgaaaacacccaagcgtttgttattctcttgcgaacgggtgtatataccgggagtaagcacagttgcagtccattccgtttcacggcctatccctttttcatttcctacccaacggacatcgtctcccataatcgccattactgctttcggttgaaggcgttggatggttttatagaaagcgtcccaatcatatatttgtttctttccgttcgggccttccccattcgctccgtcgaaccatacttcgtgcacttcaccataattggaaagtagttctgtcaattggcggataaagaattcattgtaacggggagagtctccataacattccgcattccgatcccacggagaaagatagacgccgaacttcatatcatatttatcgcaggctttccgaagttcttttacgacatccccctgtccgttcttccaaggagaagaggctacggaatgtttcgttgtagctgtaggccacaggcagaaaccgtcgtgatgctttgcggtcagaataaccattttgaaacctgcatttttcaaactcttcacccattgttcagcatcgagttctgaaggattaaagagtgcgggatcttcttttccgtctccccattcacgtccggtaaaagtgttgatgccaaaatgaaggaaagcggtcagttccatttgttgccaggcatattgttgcggagtgggtaccagccgcgctgccatatcgactttctgttcgagcgttgcatcttgaggaaattcaacatgcttcacgtagtagttttcttttttctgtgcctgcactccaccgatgagggtagaagacaataagagagagattagtagtttattcatagcctataaattattgcagttttacaaaaataaaataaaggtacggatttcacgattctcatggaatactttcttatgatattccattcaatcagtgtaccccccacctttatatataatctaaataacctattgatttagtatctatttcaccggataaagggtaaattcaaaactctgtttctttaatggaaccaagtattgcggtaacactccgggaccacaagtagccgttcccacgcctgcctgttcggcatccagatgcactgtcaacaagccatcacgttccagttcattgatatggcgggccttctctaataatacatccgagaaaggaatcatactaaactggaaaacacgatttgattctacaaagaggccttcgccggaagtatttgccaacttcgcccaacgtacatcggtgcggttgcccgtagattgcggagcaacataataatgaaacatccgttccggtgtggtctgatatacaccgattttgccggactgattgcggtcaatgtatgtttcattccctccacgtccgaggtaagaaacctgatcgtaggtgttcgccacacggaatgtcagtcccagacgtgccattgatttcacgatggtcgtgtcggactggaaagtagtaagtactttcaacgcaccatttttatccaatgaataaacaaagtcggcagttcctatcttttgcgctttcgcatttagaatttccacccgggcagtggtcgaagtcttgccctctttcagtgaaacgaccttttgggtcagattatccaatcctgcattacgccacagacgtgcaccgttcttatcccggttgtcattatccgttgccgggcggaaaaggctcaatgtcagcggagcagctaataattctttgccattcaggttcaatgaagtcagcgcccctgtttgcttgtcaacggtgaaagccgtttcacctgctttttgcggacggtagcctgtgtaattcttattaccggcaagcacgaactgatcgtatgccacttcccagtccttatcgatcattgaagatgcttcacgacgcatccagctgatattcagataagcctcacgaattgtattcggaagtttgacagcgcctaaagctacatctacggtagcgtgcggtgcacaatcaatcgttttcgtaccttctgccaaaatcttgccattgtctgccgtcacattccagttcagtacatactcattcagattagagaagtcataccagttcttgacacggatagtcagattcttttgatctgccaaagtcgcttttatattctggtatactttctttacctcaagcaaatgcggatgcggttcacgattggcgcctaccaaaccgttacagcagaagttaccgaaactcgggattccttccggcccgtaatcaccgccatacgtccaataccatttaccgtttttgtctatttcgcggaatgactggtccacccagtcccaaacgcagccaccttgtgccatcggattgttttcaaatacatcccagtattctttcagtccgccgcaactgttgcccatcgcgtgcaggtattcacaaagaataaaaggacggtagatgtctttcttcgcaagatatgctttgatgtcgtccacactgcggtacatacggcagtaaatatccgtattatagttcaattcggcacgttcgtattgcacgggacgagtgttttctaccgatttcagccagtcgtaggtacgctcgaagttgattccgttgccggcttcatttcccaacgaccagatgacgatagcgggatgattcttggaacgttcatacatccggtgggtgcggtccatgtgcgcagtcagccaggtagtgtctttggcaagagaagcagccccatatcccattccgtgggattcgatatttgcctcatcaatcatgtacaatccgtagcggtcgcaaagctgataccagtaagggtgagtcggataatgcgagttacgcaccatgttgatattgtgctgtttcatcagtttgatgtccagttccatcagttccttgctcacggtacgtcccagctgggagtgttcgtggcgattagttcctttcaccaataccggaacaccgctgatgcagaaacgtccgtctttgatttccgaggtacggaagccgacttcgcaacccgtcagttcggtgaccttgccttgttcatccttcagttcgagtattaatgtgtaaagatgaggatgctctgcgctccaagcttttacatcaggtagattcttttcatcaaacgtgataagattgctcaatccacgggattttatccggatggcatcctgcaggacagttttgccttcggcgtctttcagggtataagcaatagaagtggctccaggtgtaatagaaggtccctctacggtcacttcaagtccgaaaattccatctttgtatttctctttatctaaagatgcattcagtttgtagtcggcaatgtactgtttgggagtgctgtaaagatacacatcgcgttcgataccactcaaacgccacatatcctgacattccagataagcccccgcactccatcggtacacttccaaagcaaccacattttcgccttcattgaggacgtcagtaatatcccattcggcagctgtctttgatccctgattgtatccaagcaattttccattcacccatacataatagaaagagatgaccccttcacaacaaagtactacccggcgtcctttccagtcggcaggcactttgaaggtacggcggtatgagccgacttcattttccgcatgcggtaccagcggcggattcttcttgaagttgaacattttatcgtcaaattcatacgtttcgttgacatagatagctgtgccataaccctgacgttcccagttgccgggcacattgatgtccgcccatcctcctgtgtaataagaaggttggtaaaagtccttcggacggttatcgggattcttcacccaatggaatttcca

SEQ ID NO: 8059 - DNA, 15442 bp, Unknown
  gut microbiota DNA sequence
ccaagtcattgcaagcagcgaaagcttccagcacttccttgttcagcaatacagattcgctgaaacgctcgcctccgtgtaccatacggtgacctactgcattgatctcatccaaagatttaatagcgccgtattcaggattaatcagcgtgttcaggataaactctactcctactgtatgttcaggaatatctttctccaatattttcttttcaccattcggcaaagtaagtttcaagaatgatcctttcagaccgattttttcgataccaccttgtgcaatcacctctttggtggtcatatcgaacaatttatatttaatagatgaacttccgcagttcaataccagaatcttcatgtcgttgtcgatttatacttaatagtttatatctaatacttatttattcgcttttgctgcaatggcctgattagctgtgatagcaatcatgcgatatacatcttcgatagaacaaccacgagacaagtcgtttaccgggcaagcgataccttgaaggatcgggccgatagcatcagcatgtcccaaacgttgaactagcttataagaaatgttacctacttccaagcttggaacaatcagtacatttgcttgtccggctacctccgaacccggagctttgcttgcacctacttcaggaacaagagccgcatctgcctgcagttcaccgtccaaatcaagagtcggagccatttccttagctattttagttgcttctactactttgtctaccacttcatgtttagcagagcctttggtagagaaactcaacatagctactttcggattttcgataccggcaaccgccttggcagtctgcgctgtacaaactgcaatctgcgccaattgattagcatcaggaaccggggttacggccacatcacccatgaccaaaattccattctttccatattcgggagcatgagtcaggagcaacatagcaccggatacgcaagtgattcccggagcagtcttgataatctgcaaagcaggacgcaatacattaccagtagtgttgcgggcaccagccaactgaccgtcagcgtcaccattcttcatcattaaacaaccaaagaataaaggatcattcgttaacttgcgggcttcttcgatagtcatccccttctttttacgaagttcacacaacaactgcgcatattcttcgtgtttcggagaagtttcaggatcaatgatagtagctttaccgatgtttcccaatccccattttgcagcaagttcattaatttctgccggtttacccagtaaaattagatcggctacttcgtctgtcaaaatcatattggcagctttcaatgtgcgttcttcagttccttccggaagaacaatacgttggcgatttgctttcgcacgcgccacgatttggttgattaaattgagcatagatatattgaatattattataaaacgtccttacaatttgtaatttgcggtgcaaaagtactcaattttgcaatatccacattacaatttcggctatttttctctcccaagtctaaaatattataatatttaacactgtactcctatttttcatacctttgcagtgttttcaaacaaaatcaataggttattagtatatgatacgtcagtgcgccattttatttggctgtttggctttgggtgaattaatagtttatcttacgggtatcaagctcccctccagcatcatcggtatgctgctgctcaccctctttttaaaattaggttggattaaactacactgggtacagggattgtccgactttctggttgccaacttaggattctttttcgttccgcccggtgtggctcttatgctgtactttgatgtcattgcggcagagttctggccgatagtgacagcgaccattgtcagcaccgcgcttgtacttgtcgttacgggatgggtgcaccaaatcgtccgcaagttcaggctggcacgtcagattaagctggcgcgcaaacttcacctgacggatttccatctgtcggagaaactgcaccttaaagataaaatcaacttaacgaataaagacaaatgagtttcttagagaataatttcttcctgctggctatcaccttcgggattttcttctttgccaaattgcttcagaagaaaacaggactggtattattaaatcctatattgctgaccatcgccctattaatcatcttccttaaaatgacaaatatctcatacgagacctataataaaggaggacatctgatcgagttctggcttcgcccggctgttgttgctttaggcgtacctttatatcttcaattggagatgataaaaaagcagttattgccaatccttctgtctcaactggcaggctgcattgtcggagttatttcagtagtgctgattgcgaagtttatgggagcttcccaagaagtaatcctgtcactcgctcccaaatcggttacgactccgattgcgatggaagtaaccaaagccattggcggtattccgtcactgacggcggcagttgttgtggcagttggtttattaggagcaatctgtggttttaagaccatgaaaatcatgcatgtaggcagtccgatcgcccaagggctttcgatggggacagccgctcatgctgtcggaacttccaccgcaatggatatcagcagcaaatatggggcatacgccagtctgggactgacactgaatggaatcttcactgcactgctcacacctacgatccttcgattattaggtgtcttgtaaaaacaaaatctcttgattttccgttatataaagagttaaacgcaaaaagcaattttatgattccatttaaagatatcacattagcagacaaagacacaatcacctcattcacgatgaaaagtgatcgccgcaattgcgatctttcattctccaatctttgcagctggaggttcttatacgacactcaattcgcagtggtcgacaactttctggtattcaagttctgggcgggagaacaactcgcttatatgatgcccgtaggcacaggagatttgaaagcagtattgtgggaactgatagaagatgcccgcaaagagaaccagcatttctgtatgctgggagtgtgcagcaatatgcgcgctgatctcgaagctatccttccggaacagttcactttcacagaagaccgcgactatgcggattatatttatttgagaagtgatctttctacgctgaaagggaagaaattccaggcgaaaagaaatcatatcaaccggttccgcaacacttatccggattacgaatacacaccgattaccccggaccgtattcaggaatgtctggatctggaagcagagtggtgtaaagtgaataactgtgaccaacaggaggggacaggcaacgaacgtcgcgccctgatttatgctctccacaacttcgaggcactcggactgacgggaggtatcttgcatgtgaacggtaaaattgtcgcattcacattcggtatgcctatcaatcatgaaacattcggcgtacatgtagaaaaagcggataccagtattgaaggtgcgtatgccatgattaattatgaatttgccaaccggattcccgaacaatatatctatatcaaccgggaagaggatttaggtattgagggcttacgcaaagccaaactgtcttaccagccggcaacgattctggaaaaatatatggcttgcctcaaagagcatcccatgaatatggtaaaatggtaaatccattataaatatgatgataaaggagcaagtaaaagcattgtggaaaatctgttttgacgatagtgaagaattcgttgaaatgtacttcagactgcgctataaaacagaggtgaatgtcgccatccaaagtggcgatgaggtaatctctgcgcttcagatgcttccttatccgatgactttcggcggagaaacagtgcagacttcctatatttcaggagcctgcacgcatcccgatttccgaagcaaaggggttatgagagagcttttatcacagtctttcgcccggatgctgcggaatggagtacatttcagtacattgataccggcagagccctggttgttcgactattatgcccgcatgggatatgcttccgtattcaagtattcaactaaagagatcgttttgccggagtttattcctgctaaagagatagcggtcagtgtggttccggaatttcaggaagagatttattcttatttgaataagaagctttccgaacgggcttgctgtattcagcacacgctggaagactttcaggttattatgactgatcttgccatcagcggaggatacttatttgtagccagacaagaaaacgatatcaaggggatgactattatatataaaggagacaaacatatcattatcaatgagctttgcgctgaagataaagatgtggaatatagcctattgtatgctatcaggcaacacaccggatataagtgcatggttcaactcttacctcccgaagatcaacagcctcaacatccgttgggcatggcacgtatcatcaatgccaaagaagtgctgcaaatctatgccgcggctttccccgaagatgaaatgcagttggaattatcggataaacaactgtcggtaaataacggttattattatctgtgtaaagggaagtgcatgtatagtaccgagcgactgcccggtacacatatacagatgaatattagcgaactaacagataaaatactccagccgttaaagccatatatgagcttgatgatgaattaagacacgaattacaccacctaggaagagtacgaaaaaagagttgcagataattccttcatatctttacttatttatattcatatctgtttctaatacatataccatttgagggtcaatttccgctgtacgttcaccatctccctgacgggtgtgttgcacaaagaggtgaagtttccgctgttccttccagagctccgtatcatgggacggttcccaggcatccacggaaaagtcggtcaaatccgttatcgtccatttactaatgccgacgtcggacgcatgtgccatcgatacacggcttccccgttcttcgtcgcggaaaatataaaagacttccccaccctctaccacaatacgcggacgggcaataggtatcattttcgtaccgccacccttcaaggtaaaaggtgttttgcgatctgtgatctgccgttgataccatactttcccatcgttccagacgatacgatattggggcacgttactgtcgggatcccgccaataagtggctatatacggatttccttctgcatcggcactcatacttgtttgattaatcaactcacagttttgaggcaaacgacaggcatactctgcattagacaatttgataggaagttcatattgctctccacttgatttataccaagtcactccattatcaaacgaacgggcataacatatatcatggtttgtttccacatgccagctttcgcgccacacccacgaaagatggatggttcctttctcatcgacatacatttgccaataagcattccgtttattttctccgtcaatcagtatatcctgaatacgagtccatttatgttctttcagcgaataacggttcatcaccaagttaccacgaccggaagaaccggaacgataaacaaacagtaaatctcctccggataaagaataaaactccggataggttacatttccttcatcaattccggtcatcggtattttatctcccagttccagagaaccaggagcaatgctccggcaataattcagtttatgtccatgatgatcgaaagacacgtgtatgtaaccttctccatccaccatcatactgattacattatgagcatcctttacatttccctgatattgggtgcggtgtaaagtccattgtttcgaatccagtttccgttttccaagtatcagatagccgtcgttatcgtaataactgatatattgttcctcaccgtgcgtcaccagcgagttattgcgaaagaccgcagtattgaccgaagtacagctatatccctttcctacttccaccaaacgctgggaacagacaagagtaggaacaagtattattccgcaaagtagtagtaatatccgtttcatgcttatcttcttttttatttgtcaaagatggaaagagtccatttttcatgccagggaattgttatctttccgtcttttacaagtacaggcagccatacatagcgggagtcttccaagtctttctttttccagcggtcgaacatagcgatgtatgcgtccttctttccgataacaggctgaacgtaagtactctgcgcgtaaaacgttttatccgcatccggtcccgtacaaggattaccgatcgttttccacgttcccataatagaatcggccactgctatttcggccacattcggatcccagcctgtgcaaccggagcttaacatatagtatttaccattatatttaaacacagccggagcttcacgagactctttgacgaaattacgagtaaaccgtccgctgggtttcagataatcatcagtcaaaagactaatatacatggtttcattattttccgaagaatagaactgataagcacgtccgtcatcatccacaaaaactgtctgatcacggctcatcgcattgttcggacggaaacttccctgatagacgaacggtccgacaggagaatcggcaaccgccacgccggcacaagccttactgtaatcggcactttccacatgtgcccacattacaaacttaccggtcttcttattaaagatgactttcggacgttccaacactttggacggatgcaggtcatgattcggatcgtctttgactgccggaagcacaattccttcaaatttccaattcagcaagtctttagaagagtaacaaccgactccggtcacgtctgtacgataacactcccacgtagcccagtccggcaaaatcgtttttcctttcttgtattcaccataccaatagtaagtaccattgtgataaagaagtccgccaccatgggcattgatcggatttccatccgtatcattccacacttgtccggggataaatgctgtgttcttttgtgcctgcattgatacaggtagtaacaacgcacaaacgactcctgataatatacacttgattattctgcaatgtctattcatattcatgatattaaataagatttcttgtttacaaagatagatgatacattaaatataaaggtacacttatgtgtcaaaaaaggactaaaaaacaatcattctccgctaaatgcacgatattacagagcatttgcacttcgattttagcctgcgtttaccatataatacgatagggatagggatttcacctatcagttcactcaataaaaagaacctacccgatttcaacacaaagtgattttctggtcgagcaggtcatttatatatacacataaaatgcttttctgataatccggtttcctaatcctatatggcacttctctatctatgcttctgaaaacataccttacctgcttccttatccattactaactaccctctctttcattaataacaaactttcttttgattataggtaaacttcctattaccagtatgtaaacttacttttcaataaatgcaatctataaatgaaagttgcgtttataaaaacaaaacttgcaattatataaatggaagtttcatttatataatcaaagcttgcatttatagttttcttataatgtaaagaaagtttgggtcctatacaaaggaagtttatcccttatagaaaagaagttttcctataatagtttggaagctatctattaacacttcttctgccaactatagatgaaagagttagcagaagactggacaagctgtgaaagccagaatagaaaggtgaaaggaaggtgaaagccagcccttcacccgctaatgccgatgaacagggcattgtgaaaggtgaagggtgttttcttgaatatgattattttagtataccagcgtaaggcaatgtctgcaaccacaactgaatgaattatatccacgaaacatttctcaaatatggtttcattcaaagaataaagaaagcagtctatattgtttatattcaaacaattattcatagcacaatttgtgtagcataaaaagtgctacataaattatgctataaatattgattctatcaaacttttaccgaacaatcattgccacatgatcccacaacaaacgatagagatatcatctatttgtttaccaatacagcacctccctgtggaagaatctccagctgcactttaccgttctctttcactttcaacggcactagctgtggtgctccttttttatcatccttatacaaagaaactgtttttccggcaaacatctctaaatccagtttcaacttcaacgtttcttttcctgcattcacagcagccagataccaagtatcattgtgacgacgtgccaacacgacatattttccaggatatccatcaatgaagcgtgtctcgtcccaagtggtaggaaccgctttcatatagtccatacaaacaggagaaacatcttccaggttgttgggagcaagcgcaaagttttgtaccggattctggaataatacggtagtggccagttggaatatatcagtagtgcggcgggtagttcctccgtcattgttgcggttcagtcgtttgttcaggaaacagccgccgaattccatgctgcccactgcattgcggataaacggatgcagacaagcattaaaagcctctttatcgcagaagtgctggttgaataccatattctcggatgccagtacggcttcactacctacataattcggatacatacgttcccatccgcgagggattgtacaaccgtggaagatcaccatcaggccgtgatcgtcggcatcactcaagatatcttcatataggcgcatcgtttcttgcttgtcgccaccaaagaaatcgactttaatgccttttactccaagactctgtaaccatttcatctcccgtttgcgaataatggcgttgtccatgtgattaaccggtccttgctcaatatcattccaatacccggaagagctataccataagaagagttccacgcctttactacgtgcgtattctaccaaagacttcatgcggtcgcgaccgatgttcgtatcccaccagttatcaatcaacgcatactcatatcccattgccgcagcaaaatcaatatatcgcacctgatcgtcatagttgatactaccatcctgccaaagaatccagctccatgtgccgcgtccgaaacggtagtcatattttgtttcataaagaggacgcacgacatcccacgcaacagttgtttccacaatcggtttcaaagtttcgccaacagttatggtacgccagggagtagctcccggcaaggcaaatgccggagcaaccgttccgttgccgttattttcttctgccatcgggaaagcaaccgtatacagattaccttcgctcacatcgcttaaacgtgagccgcaatatcgactgtccagtcctgtctcgctaaccagtacccaaccatcgtcaccgatacggaacaggcaagggaatgtgtaaccatgcccgtattgagaacggtcgctcatcggagcatctgccttgtattcttcctcataactgggttttgtacgtttccatcctatcatggcatcgctttgcggacacaagaaagtagtagtctgttgcggaaaacggaaaccggtttcttcggcagtcaccgttacacttccttttccgtcctgacgcggcagggcataacgaaaagctacatcattgttgctgacacgaaagacaacatctattttctgtcctttcgggttctcaaaatgacagttcagctcgtttgcctgataatgcacttgtgaggttttaatacgatcctgatggtagacagtatcaatcggggtgaccgtatgccctgtcagtttcattcctttagcaaagtcaccgatattcgtgttcatacccaaaggtgatttctccagcatggttttcccattataggtaatggaataacttggcttttcggtaggagaagtaaagacaaccaattgcagtttttcatccggtcctttcacgaccacgtcttgtgccatcagcgaagtcagacagcaaccagccaccagtagagtgcttattatcttcttcatattattcatgttattatgttcttcatttatttcctgttatttctcatttgccttttttatccggatcaccgtaaaagagtaggcaggcaattggcaatcaaacttttctgccacttccactgtatcttcaacaggtagcggagtatctgccggtttaccggtcagtacggttctctttgcagaaggctgtaccgcaccgattccggaaaggtcgacatgggtattcacctctactggaagtaagttgaccaacttcacaatcacatctccacttgccgaatcgcggacaatggaagaagcaaaacgtttctgcactttatcgtctttattatccaaagtgattttcgacggcaaatattcgtttccggcattctgtccgtagagtttctgcacataatatccggtagtaggtttcacttcccggttattgaagtaaatcaaatccggattccattgggtatgtccttctttggcgagaagaggagcataggaagtcatgtgtacaacgtctccattgcgttccaaggcagcaagataaagagcttccgtcagtgcagtttcgatattcgcttttcgtcccgggatatgagtcgcatattcgcccagatatacttttgtctttttcgaacggtcgtatttatcgtagaagtcctgattgttcaggaaccatcccggagtctgataataatgttcgtccaccatcggcacacccagtttgtcggccagtttccatccttctacgtagtctgtaccttcattgaacggtcctactgtacctacaacgatcatttccggatatttttctttgatggcattaaatatcattgtaaaacgttcttcgaagatatcggtgatgagatcttcatttccgataccgatgtatttcaggttgaaaggtttcggatggcctgcttcggcacgtacctttccccactttgtcttcttagcgtcgccgtttgcccattctatcagatcaagaatatcctgaatataagcccccatttcgctcatagggataccgccttgctgtccgcctctcaagtcaccgtgacaggcagagttctggcaaggaacaccagcagccaataccggaagcggttctgcgccaatatcttcgcagaattggaaatattcaaaatatcccagtcccatgctttgatgatatccccaaaggttacgttgcgcctttcttgcttctaacggaccgactgtatttttccattgatagatattcttcagaccatcaccatgagccacacagccaccgggaaaacggatgaaacggggatgaatgtcagctaacacttgagccagatccttgcggagtccgttcttgcgtcctttaaatgtatgctgcggaaacaaagaaatcatatccagattcaattctccagcagattggggaatgatttcgaggcgagtatctgcggttgctttggcagtaatcactgctttatacgttttccattggcgggaagacacagtcagagaagtctctccacatatatttccttctccatctaccaaacgaacctgtaatttatttgattgcccctgcggaactctcgcgaatatggaaaaatcatatttctctccgacattcagcgcgataccatcaaagcctgtattttctaacgcggctcccggtcgttctacattcaatacggcataatgcggattattggcatgaataggatcgctagtgttaatggtgaaagtggttttatctcctttcaatgtccaggaatgagtactattccagttcttatccccttccctgtctgaagggtcgtattcgaaatcacggttctggatcagctctgcatagagtcctccgtctgccgaataattaatatcttcaaagaaagcacccaacaagacatcgctgatggctttgacgcgttcgagctgtacggtgaccgttgcatttacaggcttcaaaccggcaaaacgttctccatcctgtaccggacgttctccatgcaatgagttccgatattgattccagccataattcttatttaatccatctaccaaagtccacgctacccggttgatagttcctttctgctcctctccggcaactacggctttcactcttgttccgttaaaatcggaagtagtacggggatatttctggctggtccagtttatcaagtccttagaagtggcctgaccgtatccatcacgatcattcaatttccaggtacatatccattcgccagcgggcgactgtttcaaataagggtcgagcatcttcttctgtgatccccaacggctgtaatcacaccggagatatccgtagttccggccgacttcaaaccagttttccttatccatgctccaggcaaaacgaagcccgctacgtccgtcgtctccggaagtagcgaaggaaaagagataaaccgaatcgggggtactcgtcatttctttgattgcagctaaagtgacttgctgaaacgacaaaaacaagacaactaaaaacaggaataattttctcatggtatctattgcattaagattatcaatcgcaaagttaagattttcattattctaactgatatatttcaagctataattggttgttttacacttaaaaatatataagaaacaagtaaacaagggtaaaatatacactttttccaatatcgtatactattttcctggattacactagtgaatccaccttatcttaataactcaaaaaaagacgaaagggtgaatgtatttatctggaaatgaagactacccgcttgaaattcattgaatttgtagatgagaggtgcccaaatttcctttcaacgaaatcatcttcgcgacaagaagctgtggcgaggatgatttctaatttagatgggttttgaccttcctcctttggatcagaaaccttccggtttaccgtacgccttgaaaaggcgttgcaattctttttgagtaatcggaataacagtgccgtggcgtggatggaaatccatactgatatcatggtcaatcactttgaagtgttccaaatcagcactttccgtaaactggtatttgcctttcatatacacatcgtacatcaagatatacttatccgagccaatcaatggaaagatgcccgcaccctctactgcatccttcgtctgctgcttatagtcatctgattccgtccactgtccggaggtcagagaggaagtagtagccttcttaatgccatttccattcccttccgttttatagaacaagtgataaagcccgcctttataaatgatgtcgccgtcaatacatgacttttcgtttttcggaagaaacagcggtttcggttctccttctatatcggtaaaatccttgttagcataagcataataaatgatgtccgggccattgccatgttgcatggaccaatagatcatgtattttccggcctccttgtcataaatcgtttgtggcgcccacacacgtttcaggttttcctgatcgggatatttcttctggatattcacgatattggaagtccagtgtacaaggtctttcgatttcagcaataccatggcgcgattagaactccatccattagcagataccatatctgtaactaccatataaaacgtcttcccgtcttcacaacgtaaaatatggggatcgcgcactccgcctgttgaactaatcacccgggaatcaagtaccggttgatttccattcaaggctttataattatatccgtcgagactaacagccatcctgacggcttcttcactcatgcgattgccggtgaaataaacaaacaggtaggcagattgttggcaatatccagtcaacactcctacaaagaggagtgcgaaaaggattatattttttttcatatctattatcatttcaatgcttgtacatcaatagtttagtaattaaagtcagcagatttcacatacacccgatattctttaatcatgcccggatattctttctcggcacggggcagatagcggaagccagtcactgtttccactttactcaagtcaatcaccaattgatgaggataagggacattatccacagtcatccagaaagtagattcctgcaaatcgaatattttatcggctgtacggttgccgctgcgtgtttcttcactatcggcataacgaatcttccaatgctcacgagataccggtttgccatcagctcccaggacatcgaactctgctactgccgcgatgttatcatttgcttgcggagaaagcgcttccaaacagaaataacgtcctttcactggagcagcaaatcgtacttcctgccagccgttgcccggagtgaaagctccttcgtgtgttactttctcacctgtcagtttcagtttttctccatccttgcggtgtgtttcgggagctttttcacgaagcacatcaagaataggtttcctcaagcctttaatagaagccttggcaggacctttcaaatccaatatgagaatttcattctctccttctttgagccagcaacccggcataaagagggtctgttgcggaccaatttcccagaaacgccccattgcatggccgttcacccaaaccatacctttaccccatgtgctcatatccagaaatgtatctcctactttatccagtttaaaagtgctcttgtagtaagcaggcatagccggtagtatttttgtatcgttatatttcttgtctttaataaaagaataatctaccgggaagttgtacacagcccagtttttcaattccttagcctggttacccgaaactagttccaccttttctgtaatacctttgcggtcgtggatggatttgtcaaagttgacacgtcccattgcttccaccagaatatccagttgcgtaccttttttcagtgcgggcaaagtcgtagtaaattctcctttacgacggtccaaacgcgccagaagtttgccgtcggcatagatttgcgcccagtcgtgcacttccgtaatcttcaaaacggttcctgcgggggttgcttcaggcagtgtggtccgatacagaatagttccccatccctgattgaattgttccatcgattgaatatccactgtttgtttggcttccggcaaattcgagaatagtggagccactttattgaaatgaatttcgggaatctcaataacaggcaaagcagcggggacttcaggtaatgtttcccctgccggaagatagtttttcaataaatcgcgaagcaagaaaaacttttcggtggtccatccggcttcactgatcggagcgtcataatcatacgaactg

SEQ ID NO: 8060 - DNA, 24769 bp, Unknown
  gut microbiota DNA sequence
gcagtttcttgcttccgttattactttcttccatattcatcttgaacattcatttcttttatcagaaacaaatgtacttagaacatatcgaactgccaaagataatatctcctattttatctccaccttcgtctgtaatcttatgtcattggaagcagcgccaatcattatctgagaagttccctaaaaagatcataattacagtagaaagctttctccgtaatatcttcgctttatggattcaacagattttattcgtatttttccggtttacatattggtttacatgaaccgcataaattatatgtataaaggtactggcaaaaacatttagatggaaaagatataaacaggggaaatagtaacttcttcataaaacaaacataaataaaagaaacctgcttacccaaagaatattatcttttcagtaagcaggctttcactcatattcaaaaatgcaaagagcaaaatctctcacaaatttgtgtgttccattaattgatagctatcggagcatccaacgtcttaatagtaattccatttgtagtaccgtttatacgccctgtggcatctttgataactccaccttcctgagtctccgatccgtctagtttataataaagtgccaagccttctgaagcagggtcaacacccagcatattctgcttaagttgattttccgtacgggctacactccaaacacggacttcactcattttaccatggaatggacgttcaccccatttaaaaccatagattctaccaatataaaaacccatatccgaattcggatcaaaaccgtcaatcccccaatctgaaccagcccatttctcaccatttacataaatgcctgtttttcctgtcggttgatcataagtcaacgctacatgataccaacgatttgttaacaacggtttcgttacacggtagttctgtcttccggccacttccaaataatctttaggagtaattcctcctcccgcatcaccgatacggaggatcatcacaccttcagttcccataatcgtattattatcgaggaaataatccacattaatcaatgcttcgtaagtgaatgacgagaagaaagtaccgacagggaacttcacagaaatatagtgattactgaagttaccagctttggtaattttcaacggtttggagaaaaagaaatatgcaatgtttgttccggaaagagtcgacaccgaagacgaatgcacccgcataggcaaaacatacgagttcccggctttcaaggcttctaacccggaaagttcgacttctacattatccgcatacaattttccactcgaaatagaagatgtcgtactgcttagctttacctgcgaaacatcaagcatctcataatttgtgccatactttgcattgtattcgtctactacacttggttcggctacactatatgatacgtctacctgagaggaagttgctgacgagagtcttgaaaccagatcaaatgtcattacatccatttcatcttccaccgagaaattatattccttgctttcgaaataaaccttaggctccagcaggtcattcatgctgtcgttgcaagcgcccaacaataacgccatactacctaccatcaaataatagaatatatgtttattcatcatctttttactgttttagaattttataagtccacttattcctgcggtttattttccgcttcgttttgtttcgctttccattcattgaaaacccgctgattgatttgaatagcctgacgcatccatttataatttggcgtattgtcataatcattatcgaagcgataagctcctactccacctttataaccttctcgcggcatagcagctgcctgcttcagcaattgacctccattagtggcatacttttcaaagttctctgtgcagattattttcttaggatcaacgccataaccatcaaaaccgggattggaactaccataactttgtataatccaataatcgacatactcatccaattcatgggtaagcccataaatatttccatcaatacagatcattttatgtcctttaccttccggatcgcttttcgggccaatgtaattgttcatctctttaaccaaatgaatcaaatgcttattctgactcaatgtgccatccatatcaaacacaccactaccgatttcccagtctacatcataaccgtcccattcgtttgcatacaaagaatcgcacagagctttggcaaacttcgccagacatgcataatggttttcactttcaaactgaccttcaaatccccaatatttccaacgggcttgtttcttcgccgtttccaattgagccgccgaccagccttcttcctccgcttgtttttccacttcgaggtataccgaatttggtgtcgcacccttaccaagataagaaagcagacttacctgcaacagtttcgttcctttcaccttttgcacaaactctttatctgccttctgctccggagtgatttcataacgtcctggagcgccactccacattgaaacaaaatccatactatcgggcatagcagagagatatcctcttcgataagctccagcaggcgcccaattggaataccatccgaaagctacgggacgattgtaattccaagcagtcgccttataggcgcgcagattggcataatatgcctcactctccgcattgttcattgtggcatacccgcctatatggtctatctcaatattctccacatccatgcaagaagttaccatcatgcctgtcaatggaataatatataacaattttcttaatgatttcatattcttcatctgtattaaaatgatacatgtaggttatctcttacaatcccaccacaaacgggtagaagacttatcttcgccacctgcaccgttattgaacaacttcaaggctgcttcataaatagcctttccctcgttagtctgagaaaaactggtgggataaatcatacggcgaataccaccctcaagagttgcgccttgcactgctcctttcaaagtcttaatgacattcaacttcggataaccggttcttctccattccgtccacgcttcctgcccgttaggaaacaaagcaatccatttctgaatcataattttttccaacttctgctctgttgttccttcaaacttggcagtagtctcacacggagcagaaagtgtttgcccatactgataatgggaaaaaacatatgcccgaggtgacaaattggaattcatataatcgtctacaggatcggtcacaccattctcctgaaaagacatatcaatgccctgtttataccatgaatccgcactgccgaaaccttcccacactaaagctgcttccgcacgcaaaaaataaacttccgatgcacgcagccaatatgtaggagttccactttgaatattgggctttgagcaagatttatagatatcattctgcgcattggcatgccctgccggcaccgcttgatacgtttttccgtcgaaagcctcaacaccataagaggcattaccatccatcggcaaaaaataaacgctcaaacgcgggtcttcatatcccatcagataagaaaagatggaagaacccatacgagcttcattatagttgcctgccagccattcaatgttgttgcggaaagtcatacctgctccttgactcatttgagccgcatcatccttagccgtcatcacgccgatagaatgatttactgcttgagtagcatactttttcgccagttccgcatcagcgaagcggacacgcatagccaaacgaagcatcagcgaattgccgtatttcacccatttggtagcatctccggcatataccgcatcataagcgcccattacattcaccccattttccgccttttctgttaattcttcaatggctgaggtcaattcttcaaacatcgccgtatacacctccttctccgaatcgaacggaatgttcattgtagcgtccgctgcatgagaataaggcatcggaccgaaactttcaagtgtcttgtgccaagcggaaatcttcagaatttgagccaaagcaaagacttcgggcgtaccatttttctcggacgctattttcaatttcttccaaggatcaagagcattggtataagactgtgtataggtcgcttttatccaattgtccaacaaataataagtagtattgttactacctgcgttccaaccattactgttgttctcaccaaaaaatccactccaattatcggctgatagatgataagctatttgatattcattgataacatctgtatcatcagcctgtgtgcctacgggaatcactgtccgttgcatagctgtaatcagccctccgacttcaaaaccatccatcgcaccttctccgtcgctcatctcaaattggttggtattgatttcttcaaaattgcatgaggcaaatagcgccattgcgcatatcaccgctaatagtttaaaatgattcatttttctcataataaagaaggtgtattataatttaaatttaataccgaagccaaagctacgaacactcggttgcataaaataatcattaccttgtccgtaagtactagtggaaggagtcagttccggatcgaacggagcttcgcaatacaacatccaaggattgttggctataaacgaaactgtaacatctttcaacacgttaccaaaccacttattaggcatagtatagctaaaggtaagttcttgcaaacgaatattggtggcactgtatacatagtaaccggaagtttcataatttcccgtacctgtcatctgataataagacttcgcatctaccagaccttgtcccttcaacaatacgcctcccgcttcacgagcctcagccgaacgtttggacacaccgtaacgatcaagcaatgcctctgtagaagaggtcaccacaccaccaaaacgcccgttgatttggaatccgagtccaaagcctttgtatgtcaacatattactccatcccatattaaagtcaggagaagtttttcccaaataaacaggttcccccttttccattccaaaggttccgtcgctctttacctcaacatatcccaagtggtctttctttaagaaggtgttggcataaatatcgtggatacttccgccttctttcaagatgacacgaccaccatccttcaaaacctccggaatattaatcggttcatccatcaaatccgtatgatagttttcaaccatctccttaatctcatttatattacgagagaatgtcaatgttgaagagattcctaatccgaacttaaactgatcggaatagcttaatgaagcctcccaaccacgattttccacattaccggcctgcaaataaatctgcttgtatccggtaaattccggaagatcacccaagaaagtctgattgtatgtattagaatgatagtaggttacctccgcacttaatttattccacaacttcagacttaatccaaattcgtatgactttgtacgttctgccttgaaatcagtaaacggatagataccggtaggatctaatgcaccacccacaataggggtagttaccgtacccggagtcagtcccgaacgggatacaggcgcaccgacttccgtatacgaaccacgaactttcaggtaagagataaattcgggcaatttgaccatctcggaaataatcccggacagaccgattgagggatagaagaaagattcttcatcggtattcaccaaacgtgaattccagtcattacgtccggtcagcgtcaaataaagcatactcttccaaccaagttccaaattggcaaaaacagcatgattacgtacacgactatcaccacccttttctgagatgcgaccattagccggatcgatattagaagccgcaaatttattgggcactcccaataatgtccctttgtatcctctctccaatgcccaatagttagaatagttccaacccgcattggcagaaatactgaaatcagctatatgtttatttacgttcaacataaagtcggcatattcctgacggtcttcatagttattgtatccatacagtcctttctttccttccgcaaatttatcgtcggatgaagcgtaaatcttgcgttcaaacaatacatgtgtgtcatccattctgaaacgggctgtcgcattcaaccaatcggtaatattataagtcaaccctacgttgaacatataacgactcttttcattcgtagctacattgcgataagcagtccagtaagggttctgtgaagcatataccggatctgccaccggccaatactgaaccggaagttggcgactttcatcgaaatgttcgaatgacttaattccatcaaagtcttcaccacgagggaacaaataggcggccatcaccggattccaatattgtccttgcgataccatattcttgtctttctgtttcacatacgacgcacctaaatcgagttgtaatttatcattaaggaaagttgccgtattacggattgtgaaattcaaacgatcatattcattattaggtacaatacctttggaattggtagaagaaacagaagcaaaagtctgattcgatttcgtcccggtggtcaacgttaccgaattaataaagtttgttccggtattaaagaaatccttcttaggatcataacttgtaggagtcaacagtttctcaccccagctttcatacatatcttttttattaccatacgtattttgaaactcaggagtcatataagctttgctgaactctgaagaagaagagaactgcactgaaagttttccttcttttccttttttagtggtaatcaaaattacaccgttagcggcactactaccatacaacgcagcagccgaaggaccactcaaaacagaaagactttcaatatcttcggggttgaagtcggcgattccttctgttccggccttaccttcacccataataccactgtcggtatttcccatattggtattgaacaaaggaataccgtccaccacatacaaagcattgttatcaccttcgatagattttgcaccacgcattacaacacgtgtcgcaccaccaactccactagcacttttgttaatactcactccggctatcttaccgttcagcgagtttacgaagttagcatcttttaccgtagtcaaagcatctcccttgacttgttgtacattgtaagacaacgccttttctgcacgtttgatacccaatgccgtcacaacaacttcatcgagcacttctgtatcctgcttcattacaaccggatagaaatctttcttggaaacaggaattatctgtgcagcatatccgatataagatactttgagaatagatttctctgccgccttgatcgtaaagttaccatcgaaatcggtaatcgtacctgtagaactaccatccacagatatatttactccaatcaacggttcaccgctttcatcagtaacctttcctttgatatttttaagggtttgtgcaactacaggcttcttttcagctattatgatgtagttaccttgaatctggaatgaaaagcccgtcccttttaagatggtatcaagtgcggtttcgagggatgcgttccgcaagtttaactgggctattacttttccttttaattcggaatcactataatttatagactttttggactgtttttccacagtttttaaggcatcaatgacagtgatgttcttttgctggatagttattttactatcattttgagccaaagcgaaagtctgtataagaataagacttaaaaaagtgagaaagacccgcttatgagctattttttctgctattttttcgtagatttgtagcatctttagtattagttaattggttattattctaggatcattcagaatagcgtcaatattacgctaatattaaaagagattgatttcatatccgggaggaacggccattccttccgggtatttttttgcattacgtattaaatttaaaaggttctacaatatatttattctttactagttacatagcacttatttcccttgataacatagtttacatttcctacaacttgcgatataatcttcataacttcctccagattcgcctgtttggagaagcggaaactatatgtattctttttcaagctatgaaggctatatacaaaagcataaggaaatttgcgttcaagacttgtaaaaatatcctccagatacatattactaaaaaccaattccccacgttgccatgccgtcacatcatctatctcaggcatccgcagattgtgcgctttcgtatgtttgtcatataccaactgttcattaggctttaaaataatattggacagcaagttattgaattcaactttcacactaccttccagcaaagtagccatcagctcgctattttccggataagcatttacattaaattcagtacctaaagcagtaacttgataatcattggcctttacaatgaaaggatgcttcttatccggtttcactttaaagttggcctcaccaatcaaatatacacttctagtctctcctgtaaatttttccggatatagtagtatactcttcgaattcagcatgacatatgtaccatccggtatgtaagttcacgaatttccgctgtcggtatatagcattcaactaaatctttttccggccgttccttttccaacatcaaataaatagaaacggatgagactgctaacaagaaaatagctgcagctctccatataagcaactggtaatttctacgtgaagtgatagactgcattcccagattctgccgcattcgttgtattgattgttgcatgccatcaggcactttctgctctccggcttgtttccatagctcacgaagagcctcattcttttcatcaacatgatcctcgtcagccaaccactgttgtactttcttctgtgttccggctgaataactattatgaccgaacaattctacgagttgttgaatataatttttcatgaatctttttctttcttttttgggctttatacactaaatacaactactacatacatactacttaaaaatattagagaaaaaaataaaaaagaggagtactttctttaattcgatcaatgctaaataaacctgatgctctattgttcggatagaaacatcgagtttatcagctatttctttatgacttaatcccctgaaacgactaagttcgaatatcaacctccgacgcttcggcattttctccagggtgagttgaataatcatcaacatctccttataatatacgttattcaagatctcttccttttctgttaattcataaagaagagtcttctctataacttccgactgatattcctgttctacctgttgatgtttaaagatattcagaactatatttctagtcattataaaaatataattgtctagttctttatcattatccagccacaactcaggctgcaaccagagcttacagaaaacatcttgagccacatcttctgcatccgcttccgattttagcagcatttgagcaaagttctttacctttggaaaattcacagtgaaaaacctctgaaactttaattcaatctgcctgtcattattctccatctctctagtatttttcagtgttagcggttaaatcaaatattacatatatttaggtctaaggaatgattcaatataatattatacattaaatcataatctaaaagcaaaataaaagattaataacacaataaaaaaatattataactcttttttggtttatttcttccaagcagctatcatatagaactttccagaaaataaataaaatgtatattatacacccataaaaataaaaaggcttcatgaatcaatgattcatgaagccttataaagaatactcgtactcgaagcgggacttgaacccgcacagccgcaatggccaaaggattttaagtccttcgtgtctaccattccaccattcgagcatcctttcaaagaaagagcggaaaacgagactcgaactcgcgaccctaaccttggcaaggttatgctctaccaactgagctatttccgcgttttttcaacgggtgcaaagataagtagtttacttgtttctgccaaatcttttcggaggaaagtttaaaaaactatcctccgaaagtttattttatcttccaagcagtgctttctccgctttctccattccacaaaagttgaatccatcgatcacttgctgcatcaatgcggagatttctgcattacagaggttaccgatactaccttcatgagtatggtgtacttctttagtatgcgagaatttacctgcttcaatatccaaacctacctttttatatgcatcacggaaaggcataccttcacgcgccaaacgatttacctcttccacactaaaaataagaaggtatttgtcatcatcaagaatatgttcatttacctttatttcattcatgatataggttgtcatctgcaaacagtctttcaattcctgaaaagcaggaaggaaaacttctttgataatctgcaaatcacggaaatagccggaaggcagattgttcgcaatcatcataatctgctggggaagcgattgcaatttattacatttagcacgtgtcagttcaaacacatcaggattcttcttatgaggcataatgctggatcctgtggtgcagtcatcgggcaacttgacgaaaccgaagttttgactgttaaacatacaggcgtcaaaagctaatttggagattgttccggcaatcgtagccaatgcaaaagcaacattgcgttccatctttccacgccccatttgagcatatacaacattgtaattcattgaatcaaaacctaataagtcagtcgtcatggtacggttcagaggaaaagacgaaccatatccggctgctgaacctaacggattacgattgcacattttaaatgctgcctgcaaaaacagcatatcgtccataagactctcggcgtaggcaccaaaccacaagccaaaagaagaaggcattgcaatctgcaggtgtgtataccccggcatcaaaacgtttttatatcgttcgctctgacggatcaagacatgaaaaagttgttctaccgcttcggcaacctcttttatttgcgtacgggtaaaaagtttcaagtccaacagaacctgatcatttctggaacggccactatgtattttctttccgatatcacccaaacgacgggtcaacatcaattctacctgcgaatgtacatcttccaccccgtcttctatcacaaattcgcctttttcagccgaggcataaatattcttcaattccaccagcaactggtccagttcttcttttgtcaacaacccaatgctttcaagcatcgtaatgtgagccatagaaccaagcacatcatgcttggccaaataaagatccatctcacgatcacgacctaccgtgaaacgttcaatatccttatttacctgtacggacttctcccaaagtttctgtgccataaaaaaaagtttaatattcaataactgccagcatatcaaccatcttctccaaaccttcctggagaggtttctgcaccattgctttcataaatggattaagatccattccgatagtaaccttcactttacactcttcttctgcagtttcaaccagttgaatccacatattaaaaggaagaggagagttagttgtcgccaactttatacatttacaaggatcgcgctctacaatttgcaaagtcaattgtccaataggggaaacactaaaactcaacgtgtccgaatcaaaactcaaatcctgcaccttatcttttggcaaacggtctttgactgcttccagattacttaaatccgaaagtttattatatacgcgctcctggctgtaaggtattaccttgacactactctcaaaattactcataaacttctattagtataaaacaaaaaaagaacaatccggccaaatattgtccgaacagttctttttaccaaatatgtttgatcaaaaaatgaatcttattttccagcatcccaatgagcagggtctttacgccattcgttcaatgtctgtatgtcttctttttcaatataacctgtacgaagagcaacatcaagcactgcttcataattggtcaacgttaccaaagtcaccttcgcatttttgaatgcctcttctgctaccgggaatccatacgtataagctgcaaccataccgatcacttcgcaaccatcgcgacgaattgcttcaacagccttcaaactactaccacctgtagaaatcaaatcctcgacgactacgactttcatacccggacgaagttcaccttcaatcaggttctccaatccatgatctttgggggtagaacgaacatacacgaacggtagattcaatgcatcagccactaaagctccctgcgggatagcacctgtagccacaccagcaatcgcatccacctgtccgaatcgttccaatatcagacgtgtaatttcaatcttcacaaaattacgaagagaaggataggacagagttttacggttgtcacagtaaaagggggatttccatccagaagcccatgtaaaagggttagcgggttgaagtttaatagctttaatcttcaacagtttctccgcaaatagtctctctaagtttttcataactaaactaactattaattatttgccgcaaaagtacagaaattgaacgagaataaaaagaagaatccgtttattttttcagtcaatttgttcctcttcatcgggaatgtcgatacaacgcttaatatctttcagttcaaaaccacgactcatagcgaatcgcatcagctttccattcaattcataatcgtctgctgcatggatacttttccgtttggaagccagcaggtcacgcagaatagaaaggtattcttcttcatcaatctcgttcagataacgccatgccacatcagatgggatcttcttcatataaagcccttgggctattttcattttcccccacttggcaaagcggaacttgtcattcacaaaagctctgcagaaacgttcatcatcgataaacttctctgattccagtcggtcaagaatacgcgcaatggtatcataggcaattccccaacgttgtaacttctcatttatttctgcccgacaatgctcggcagtggagcagtaagaggctacgcgatttaaagcctcttcatcagttaattgtgcactcatcggttagctgtaactattctatcttttccaaatatgtctcttataacacgaacatcacgatattggttcatttcaagtatgtgtgctgtctcccggccataggcctggttgatttcaaaataaagtttcccacccggcaagagtaattcacttcctagacgggcaatacgattataaaaccgtaaaggatcctcgtcaggaacaaacagggccagccccggttcccaatcaaggacattagcgtccatttcgttcttttccgtttcggtcacataaggcggattgctgacaataacatcaaaagacggtatctttttccagtcatcggccagaacatctctttgtagaaatctcacccgagcttccaaggcgtcattgtttttacgagcaatagctaatgcttcttcggaaatatcccaagcttctacttctgcatccagaagttttttatccaaagagatcgcaatgcatccgcttcccgtacctatatctaatagacgacgagcattcggattctcctctactattagttctacaagctccgcagtctccggccggggaatcagcacgctggaagcaaccttaaaattccttccacaaaactccgcaataccacgaatgtactgtataggttcatttttctgtaaacggaatataatgttttctaattcacgctgtttgcattcggataaaattatatctttgcccatgtaaatatcgagcgcatctaaacctaacatgtcgcaacaaatcagcatcgaaagggcttttacctcctccggtggatagatttcctgcaaagattggcgaatgtaagcggtgatacgattcatattttcacaatttcggagtgcaaaagtaagaataatatggcgaagagcaccaaaatggaagaagaaaaatacatgagacgttgcattgagcttgcaaagaatgggttatgcaacgtatctccaaacccgatggtaggggccgttatcgtatgtgacgggcgaattatcggcgaaggttaccacattcgctgtggagaggcgcatgcggaggttaatgcgatccgttctgtcaaagatgagtcattattgaaacgttccacgatttatgtcagtctggagccttgttcccactatgggaaaacgcctccttgtgccgatcttattatagagaagcagattccacgcattgttatcggttgtcaagaccctttttcagaagtggcgggacggggaattcagaaattacgggatgccggacgagaagtgacagtcggtgtattagaggaagaatgtaaatcgctgattcgccgttttatcacttttaatacgcttcaccgtcctttcattacactgaaatgggcagaatcagccgaccactttattgatatagaacgtacagacggaaaaccggtagtcctctcctctcctcttacttccatgctagtgcataaaaaaagagcggaggcggatgcgattatggtaggcaggcgaactgctttattggataatccgtcacttacggtacgcaactggtatgggcacaacccgatacgcgttgtgttagatcgcacgctatccctccctaatgatttacaaatattcgatggcaacgtgcctacatttatctttactgaaaagcaacaggcagaaaaaaagaacatcacatatatcaccatcaactttagccataacccactgaaacagatcatggaagcattgtatcaacgaaaaatacaatcattattggtggaaggaggcaggcaattgctgcaatcattcattgataatgagctatgggatgaagcctatatcgaaaagtgccccagccggttacactccggtgttaaagcacctcaaatggacgataattttagttattcgatagaagaacacttcgaaagacaaatttggcattatgttcgtcgaatatagctaagatagttctattcagggggttttacgtcgataaaaacagtgttattatctataattttatataaaacttacctgtaatgttcattatcggaaaaaatgtttctatttttgcaacttgtaaataaacacaatctttcaaatgaaaataaagtttttatcattcattgcgagttttttcatggtgtcatttgttataacgtcatgtcttgatgacgataataacatcgaatatagcccggatgcaactatacatgcgtttgcacttgacacagcaggccttgggagttataaattcacaattgaccaattatcatgtgaaatctataacgaagactctcttcctgttcatgctgataccatcattgacaagattttaatcaaaacattaacaacggcatcaggtgtcgttacgatgaaggacaaaagcggaaacgattccgttttaaacatcaatgattcgatcgttcttcggaaagaacttactataaaagtatggtcaacagaagcattagcgggtatatctcctaatcaaactaaggaatacaagatcaaagtaaatgtgcatgactatgatccggattcgttaaggtggaaatatatgaataaaatagatgaccaaattgtaggagaacaaaaatctattatttttggaagtgaagttctcacatactctgtagttggcacaaagttatatgcatacaaaaactctttaacaaactttggcagttgggagtataaagaaatagagggattaccaaaaggcaaacttccgacttctatcattgccttccaattcaacagaagcagaaccatgttatatgccacctccaatggtgatggtaaagtatatgaatctgcagatggagaaaaatggaatgaatcaacgatgtttggtgagggagtggaattgctactagccacattgactaataacgatgtcagcagaatttgttatataaagaaaggagcagataaccaacgctatttctattatcaaacaaatgatgtaccaaaagagactttggataaagctgaaaatggaggaaaagtgccatctaaatttccaactaaaaatatatcctatacagtatataagtcttcgacaaatattaattcagtccttctagtaggagatacagaaactgcgactttggctgatgacagtaaattagaaacgaccattgtatgggcatatgacggaaacaaatgggttgagttctcaactacttcctctgttgcatactgccctaaatacactcaaccatctattatatattataatgacttagtatacatatttggtcaagacttcagttctatttatgtttccaatcaaggattattctggaaaaaggcgaatcctaagttctctttcccccatagagattggagcaaaggaggaactccagatcccgatgtagatcctgaattcagaggcaaaaccaactattcaatggtactagatcctgacactcaaaatctatggattatctttagtaaaggaagtgcaagttttgaagaagaggtagagaaagaagaaagtacaaaggcaaccacaactgaaccacgcacatatgagcatgattcagaggtatggcgtggtcgtcttaatcagctatggtttgatttggcaaatgccaagaaataaaaacgtatacgtttaaaataaaaagatgtcctatatagaacaaatagacaaaactcggataccacaacacgtagccatcattatggatggaaacggacgatgggcaaaacaacgaggggaagaacgtacttacggtcaccgtgctggcgcagaaacggtacagaatattactgaagatgctgccagactggggattaagtacctgacactttataccttctcaaccgagaactggaatcggccgcaagacgagatagcggctttgatgaatctattgctagaatctattgaagaagagacactgatgaagaacaatattcgcttcaacgtaatcggtgatttcaagaagttaccggttgaagttcagaaaagtttgacgtcatgtatagaacgcacatccaagaatagtggaatgtatatggtactagctcttagttactcatcccgttgggaaataacagaagcggtacggcaaatagcaacgcaggtaaaaacgggagaaatatctcccgagcaaataaccgatgagtgtatctcatctcatctggatactaattttatgcccgacccggatttactgatccgcacgggaggagaaatccggttaagcaattatctcttatggcaatgtgcttattcggagctttatttttgtgataccttctggccggacttcgacaaagaagaactctacaaagccatttgggaataccaacaaagggaacgccgattcggcaaaaccagtgaacagatcagctaatataactcgaaacatcaaattataacataaatgcattatcgtatttcctttatattcataacgtttgtctgcctgtgctgctttgcgacaacaggcgttgcgcaaaatgctaacactgatgaagactcaaaacctgtcatcttatactccggaacacccaaaaagtatgagatagcagatattaaagtcgaaggcgtaaagaattatgaagactatgtattgattggactatccggactatcggtaggacaaacaattactgtgccgggtgacgaaatcactggagcaatcaaacgttattggcgtcatggtttgttctcaaatgtacaaatcacagccgagaaaatagaaggcaacaaaatctggttaaaaatcagtctgacacaacgcccacgtatcgcagatgtacgctaccacggtgtgaaaaagtcagaacgtaccgaccttgaggccaagctaggaatggtaaaaggtatgcagattactccgaataccgtagaccgtgccaaaacattgatcaaacgttattttgatgacaagggattcaaaaatgccgaagtaatcatcgcacagaaagacgatccttccagcgagaatcaggtgattgtggatattgatatagacaaaaaggagaaaatcaaagtacacaaaatcaccattgcaggaaacactgcaatcaaggcttccaagctgaaaaaagtaatgaagaaaaccaatgagaaaggtaaacttctaaacttgttccgcaccaagaaattcgtgccggaaaactttgaagcagataaacaacttatcatcgacaagtataatgagctgggatatcgtgatgcaatgatcgttaaagacagcgtttcacaatatgatgaaaagacagtagatgtatatttggatatagacgaaggtcagaaatactatcttcgtaacgtgacatgggtaggtaatactctttatccgtcggaacagttgaacttcctgcttcgtatgaagaaaggcgatgtatacaaccagaagttgttgaatgagcgtgtttctacagacgacgatgctatcggtaacttatattacaataacggttacctcttctacaaccttgatccggtagaagtaaatatcgtaggcgactctatcgacctcgaaatgagaatctatgaaggccgtcaggctactatcaataagattaagatcagtggtaacgaccgtttgtatgaaaacgtcgttcgccgtgaacttcgtatccgcccgggacagctgttcagcaaagaagacttgatgcgttctttgcgtgaaatccagcaaatggggcactttgacccggaaaaactgcaaccggatattcaaccggatccgatgaacggaactgttgacataggcttgcctttgacttccaaagccaacgaccaggtagagttctctgccggttggggacaaacgggtatcattggtaagttgagtttgaagtttaccaacttctccgtagccaacctgttacacccgggtgaaaactaccgtggtatcctgccgcaaggtgacggacagacattgaccatcagcggacagacgaatgctaaatactaccaatcatacagtatttcattcttcgatccatggtttggcggtaaacgtccgaactcattctctgtatcggctttcttctctgtacaaacagacatcagtagccgttactacaattccagctatttcaacaactactacaacagcatgtatagtggttacggtggttatggtatgtacaattacggtaactataacaactacgaaaactattatgacccggacaagtctatcaagatgtggggactttccgtaggttggggtaaacgtctgaaatggccggatgactatttcactctttctgccgaattagcttaccaacgctacaacttgagcgactggcaatacttcccggtaaccaatggaaaatgtaatgaccttagcatttcattgactttggcacgtaactctattgacaacccgatcttcccccgttcaggttcagatttctcattgtcagttcagcttacaccgccttactcattgatggacggtaaagactataagggatattatagtaaccctgaaacaggtagcattacccaggacaacatgaataaacttcataaatggatagaataccacaaatggaaattcaaaggcaaaacgtatactccgttgatggacccgattgcacatccgaaatgtctggtgttaatgacacgtactgaattcggtttgttaggtcactacaaccaatacaaaaaatctccgttcggaacattcgacgtgggtggtgacggtatgaccggttattcaacttatgcaactgaaagtatcgctttgcgcggttacgaaaacagctcattaactccatacggatctgaaggttatgcttacgcacgcctcggcattgaattaagatatccgttgatgctggaaacaagtactaacatttatgtgttaggtttcctagaagctggtaacgcatggcacgatatcaagaaattcaatccattcgagttgaaacgttctgccggtgtcggtgttcgtatcttcctgccgatgattggtatgatgggtattgactggggttacggtttcgataaagtatttggttctaaacaatacggaggaagtcaattccactttatcttaggacaagaattctaatgtatcatcaaaaactaaacgttatgagaaagtctgttctattaatcatgatgctgtttgctgtcagcatggcggcaaatgcacagaagtttgcactgatcgatacggaatatatcatgaagaatattccggcagctcaaagtgctaatgagcaaatgcaagaagctacgaaaaaataccagagcgaagtagaagccctggcaaaagaagcacagaagatgttccaggactaccaggcaaaatcttccactctttctgccgcacaaaagacaaagacagaagatgcaatcgtagctaaagaaaaagcggcagccgagttgaagcgtaactacttcggtccggaaggcgaattagccaagatgagagacaagttgattactccaattcaggacgatatttatgaagccgtgaaagctatatcacagcaacatggatatgatttgattatcgacagagcctctgctacaggtataatatttgcaaatccacgcatagatattagtgatgaaatcctaagaaaattaggatattcaaattaatttcatacatttgcagctggaaataactaaaaatcattcaaataaattatagaactatgctaaaaaaaattgcacttgtaatgttgcttgcacttccaatgggtgtatttgcacagaacctgaaattcggccacattaatgcacaggaaatcatcactgtgatgccggaattcaccaaagctcaaaatgacattcagactttagaaaaacaacttactgctgaacttcagagaacgcaggaagaattcaacaagaaatatcaggaattccaacaagctatcgctaaggattctcttcctcccaacatcgctgaaagaagacaaaaagaattgcaagatatgatgcaaagacaagagcaattccaacaagatgctcaacagcaaatggcgaaagcacaaaatgatgccatggctcctatctatcagaagttggacaatgctatcaaagccgtaggcgctgctgaaggtgtaatctacatcttcgacctggcaagaacttcgattccatacgtaaacgaatcacagagcatcaacttgactagcaaggtaaaagcaaatcttggtatcaaataagaactgaccaagaataaagaaataccaaaagggaaagagaaagaaggatcaacttctttctctttccctttttttggcgtacatttgcgtatataaatcaagtgtgtcatgaagcaacatctatcccatacgcccggaccgatcggagtatttgactccggttacggaggtctgaccatcttagacaaaataagagaagtattaccggaatatgattatatctatttgggagataatgcacgtgctccttacggaacacgttcttttgaagtcgtatacgaatttacccggcaagcggtcaacaaactatttgatatgggctgccacctggttatattagcttgcaatacagcttccgcaaaagctttgcgcagtattcagatgaatgatttaccaggcatcgatccggctcgccgtgtgctcggcgtcatccgccctaccgtagagtgtgtcggagagataagcaaaaaccagcatatcggtgtactggcaacagcaggcaccatcaaatccgaatcgtatccgttggaaatacacaagctatttcctgaaatccaggtcagcggcacagcctgtccgatgtgggtatcactagttgaaaacaatgaatcacaggacgaaggagcagactattttatccggaagtacatcgaccaattgctatcaaaggatcctcaaatagatactgtcattctcggatgtactcatttccccatacttctacccaaaatccggcaatatattccagagcatgtcagtgtaattgcgcaaggcgagtatgttgcggaaagtctgaaagactatctgaaaagacatcccgagatggatgcaaaatgcacgaagaatgggaactgccagttttacacgaccgaagcggaagaaaagttttcagaatcggcctctactttcctgaaacagcagattaatgtaaaacacatcacgctcgaataaaatttaagaaaaaaagtaaccatttctctctcttttttgttatatttgtagataacccctaataagcaagatcatgaaagaagaagattatagcaaagcaatagaagtattctccggatccccatgggaagccgagatcatcaaagggctattagaaagcaatgacatccgttgcgtaatcaaagatgggattatgggtacactggcaccctatatcgctccttccgtatccgttcttgtcaccgaggatcaatacgaagcggccaccgcacttatcaggagccgggccgagaaagataacgactgatgcggtcgagcccttcgcggatattctccaatgagtttgcataggagaaacgtacatatccttcgcctcccgtaccaaaatccaccccgggagtaatgccgacgtgtgcatgttcgagtacatcgaatgcaaaacgataagagtcggtagtaaatttgcgtgcgtcagcaaaaatgtaaaatgccccttgaggttctacttttatttcaaaacccatttcccgaaggcgggcaatcatatatcggcgacgctcatcataaacctgcttcatccgttccacgtccggttcagcctgccgcaatgcggcaatccccgcctgctgggcaacactggacgcacagataaacagattttgctgtaacttttgcaaagatcgcatacaagatttaggtgcgatcaaataacccaaccgaagccccgtcatcgcaaaacgtttagagaatccgttcaggacaaaagcctgatcggtatattcaaggatactgtgtgcacgcccttcatacacaaggccgtgataaatttcatctgaaatgacaggaactcctaatgcagctacgtctttcaagaatttttcatccaacaacattccggtcggattcatcggagaattgataaagatagccgcagtatgcggattcacacatttgcggatagcctctatgtcgtattgtagatattctttagacaaaggaaccaaaacaggtttggcttgcgtagccaacacaaaattgcgatagcaagcgtaccccggattggaaagaatcacttcactatccggattgcagagcaacatcaatgcaagaagaatagacggagaagacccggaagtcacgacaatacaatccggatctaccgttaccccatattcgcgcagataaaaagcggcaatttcccgtcgcagttccggatcacccaaagaatgtgtataatgagtcagatgacgatcataagccgcttttgccgcttccgccacacaggccggcacatcaaaatcgggttcgccaacttccagatgaataatatcaatgccttgtttttgcaattcgttcgccctctccaacacatccattacgatgaaagaggtcatctgttctacttgtgggtttgtatgtttcattgtttatcttttctctatctgactgcaaagataattctttttagcctgttttggtaacatatcggcaaaaagctctatatttgtgctttcaaatcgttagtaagaatgaaacaggaatttacacgaatcgcagtaaaagtaggaagcaatgtattgacacgccgcgacggaacgctggacgttacccgtatgtcggcacttgttgaccagatagcggaattacataaatccggggtggaaatcattctgatttcttcgggagctgttgcttccgggcgcagtgaagtgcatccacagaaaaagctcgatagtgtagaccaacgccagttgttttctgccgtaggtcaggctaagctcatcaaccgttactacgaacttttccgcgagcatagtattcctgttggtcaggtgttaaccacgaaagaaagttttggtacccgccgccattatctgaatcagaaaaactgtatgacggtaatgcttgaaaacaatgtcattcctattgtcaacgagaatgatacaatttctgtcagcgagcttatgttcactgataatgatgaattgtccgggctcatcgcttccatgatggatgcacaggctctcattatcttaagtaatatcgacggaatttacaatggttctcctgctgatccgggttcttttgttatccgggagatcgatcacggaaaagatttatccaattatattcaggcaactaagtccagtttcggacggggaggaatgttgacgaaaacaaatattgcccgcaaagtagctgatgaaggaattacagtgattattgccaacgggaaacgggataatattctggtagatttgcttcagcatccgaaagaaacgctttgtacacgttttatcccttcaaacgaaccggtatccagtgtaaaaaaatggattgctcatagcgaggggtttgccaaaggagaaattcacatcaacgaatgtgcgacagaagttctaaactctgaaaaggctgtcagcatcctccccatcggaattactcacgttgaaggtgaatttgagaaagatgacattgtgcgtatcatggactttcaaggaaatcaagtgggcgttgga

SEQ ID NO: 8061 - DNA, 21721 bp, Unknown
  gut microbiota DNA sequence
cttcctttcacaaatgagacacaattacagctaaattacatatatacccattattttagtcattttgctataaaattaatagaaattatctccgaaatactacaatttctaacttttattcctacatttgcagccaattgataacttattaacaaattacatatataccatggctaaaataacgaaagaagccgctttgctctatcactcacagggcaaacccggcaagattgaggtagtgcctaccaaaccttatagtacacaaaccgacttatcactcgcatattcccccggtgtagcagaaccttgtctcgaaattgagaagaacccgcaggatgcatacaagtatacagctaaaggaaatcttgtagctgttatttctaacggtacagccgtactcggactgggcgatataggcgcattaagcggcaaacctgtaatggaaggtaaagggctgcttttcaaaatctatgccggtatcgacgttttcgacatcgaagtagacgagaaagatccggagaagttcattgcggcagtgaaagcaatcgctcctacctttggaggtatcaacctggaagacatcaaggcgcccgaatgttttgaaatcgaacgtcgcctgaaagaagaattagacattcctgtaatgcacgacgaccagcacggtactgctattatctccagcgccggtttggtaaatgccttgcaggtggcaggaaagaaaatcgaggatgtgaaaatcgtcgtgaacggtgccggtgcatccgcagtatcttgtactaaattatatgtatctttgggcgctcgcctcgaaaatattgtcatgctggatagtaaaggcgttatcagcaagacacgtaccgatctgaacgaacagaaaagatattttgcaactgaccgcacagatatccacacactggaagaagcaatcaagggcgcggatgtattcctcggcctgtcaaaaggaaatgtgttgagtcaagatatggtacgcagcatggctccgatgcccatcgtattcgcattggccaacccgacaccggaaatctcttacgaagatgccatggcagcacgtcctgacgtactgatggctaccggacgttccgactatccgaaccagattaataatgtaatcggtttcccatatatcttccgtggtgctttggacactcaagctaaagcaatcaacgaagaaatgaagattgcggccgtacacgctattgccaacctggcaaaacaaccggtacctgatgtagtcaacgcagcctaccacgtaaacaacctttctttcggtgcggaatactttatcccgaaaccggtagatccacgcctcatcaccgaagtttcctgcgcagtggcaaaagctgctatggaaagcggagtggctcgcacagaaatcaaagactgggacgcttactgtgttcacctgcgcgaattgatgggttacgaatccaaactgacccgccaactgtatgatactgcccgccgctcaccgcaacgtgtcgtatttgccgagggtatccacccgaatatgctgaaagctgccgttgaagcaaaagccgaaggtatctgtcatcctatcttattaggaaacgacgaagctatcggaaaactggcagaagaaatggagcttagcctggaaggcattgaaatcgtcaatcttcgtcacccggacgaatcagatcgtcgcgagcgttactcccgcatccttgcagaaaaacgtgcacgcgaaggatttacctacgaagaagccaacgacaagatgttcgaacgcaactacttcggtatgatgatggtggaaacaggagatgcagacgcattcatcaccggactttatacaagatatagcaatacgatcaaagtggcaaaagaagtgatcggcatccaaccgggcttcaaacacttcggtaccatgcatatcctgaactccaaaaaaggtacttacttcctggcagacacattgattaaccgccaccccgatacggaaacattgattgatatcgccaaactgtccgataaaacagttcgtttcttcaatcacacaccggttatctctatgttgtcatactctaacttcggcgctgataccgcaggtagcccagtgaaagtgcacgaagcagttgctcacatgcaggaagcatatccggaattggctatcgacggtgaaatgcaggttaattttgccatgaaccgcgaattgcgtgataccaaatatccgtttacccgcttgaaaggtaaagatgtaaatactctgattttcccgaacctaagttcagcaaacgccggttacaaactgttgcaggcaatggacccggatacagaattcatcggccctatccagatgggattgaacaaacctatccacttcaccgatttcgaaagttccgtccgtgacattgtgaatatcacagccgtagccgtgatcgatgccattgttgacaaaaagaaaagaggagtgaaatgaaacgcccgttatccaaatcacaaatagtttgcatcagcctgctttggttggcgctttgctatttagttctaacaaaagccgaacgaattgacgggatgacgatagtaatgcttgtcatttcggcagcattagtatttattcctgtttataagtcgatcaaaaagaacaaataaatatcttttttcctatttttaatgcgataaaatatcaaatttgatgttttatcgcatttttctttataaaatgtttgctagttcaatttttatctttacttttgcaaccggaaataaaaatccgatgtacccatatacaagtgtgcaaattgctatacggcagaaaagcacatagtcgagcggcacatgagcaaattgtcaaattagcacattatttttatatcaaccaattaaagaaaaaaagattatgaatgcagcaaaggtattagacgatctgaaaagaagatttcccaatgaaccggagtatcatcaagcagtagaagaagtactttctactattgaagaagaatacaacaaacacccggagtttgataaagtaaacttgatcgaacgtttgtgtattcctgatagagtatatcagttccgcgtgacttggatggatgataaaggtaatattcagaccaacatgggttaccgtgttcagcacaacaacgcgatcggtccttacaaaggcggtatccgtttccatgcatctgtaaacctttctatcttgaagttccttgcctttgaacaaacattcaaaaactcactgactactctgccgatgggtggtggtaaaggtggttccgacttctctcctcgtggaaagtcaaatgccgaagtaatgcgctttgtacaggcattcatgctggaactgtggcgtcacatcggtcctgaaaccgatgttcctgccggtgacatcggtgttggtggccgtgaagtaggtttcatgtttggtatgtacaaaaaactggctcatgaatttaccggaacattcacaggtaaaggccgcgaattcggtggttcactgattcgtccggaagctaccggttatggtaacatctacttcctgatggaaatgctgaaaacaaaaggcactgacctgaaaggtaaagtttgtctggtttccggttccggtaacgttgctcaatatacaatcgaaaaagtaatcgaactgggtggtaaagtagttacttgctctgactctgacggttatatctacgatccggatggtatcgaccgcgaaaaactggattacatcatggaactgaagaatctgtaccgtggccgtatccgtgaatacgcagaaaaatatggttgcaaatatgtagaaggagctaaaccttggggtgaaaaatgtgatatcgctcttccttctgcaactcaaaacgaattgaatggcgaccacgctcgtcagctggtagcaaacggttgtatcgctgtatctgaaggagctaacatgccttctactccggaagctatcaaagtattccaggacgctaagatcctttacgctccgggtaaagctgctaacgccggtggtgtatcagtatcaggtcttgaaatgactcagaactctatcaaattgagctggagtgctgaagaagtagacgaaaaactgaagagcatcatgaagaatatccacgaagcttgcgttcagtacggtacagaagccgacggatacgtaaactatgtgaagggtgctaacgtagccggattcatgaaggttgctaaagcaatgatggcacaaggtatcgtataatcagcgaaagatatataagctatagtttatttaaaggctcccgccttccgaaaggaagtgcgggagtttttataccctaaagggtgtaaaacagaaaaattacattatatttatacccaaaagggtataatatgggctcagtcattattcttggggatttaacacatatttggctacttagttgaagttgagtcttatttcttcattgtgttcttccgcgttatgagcaaaattcggaatgaataaaagaaaatatatttatattttgtccataggcaaaaaccgggtcaccgttccttttaaaggaacgccccgatgcacaccgagaaacgccccgttcctttaaatgaaacggggcatttgttttaaaggaaaaaacaggtggcacatcttgttgtataacagcgctttatcttttcacagttatatagtaaaataattaagaactttatttacaatatcagttaaattcgctattcttacaaatgaattatctatggtttgaatgtctttgaaataaacaataaatatttagtggagcgttttagtactgaaaaagcagattttaagtacttcttccatctgttccatgtactttattacagcagtacaagtacctattttcttcaactcttgtacttctcccagttgattcatctacttcaaaaaaccaaatacaagccaaatactatgaaaagatacgaaacttgagcctattaattgaatatttaatcattcctttcctctccttccgaaaggaagtgcgggagttttttatcaaaaatcacctgaagttcattcaaaatccgtatctttgctcctcataatttactaattcataatatataagatgaaatttacaaatgtattagccacaaccctgttatctttgttgagtactgcatgcatacaaaacgaagaaccgaataccgaagcagacattttaaaatgtattctacccaaagaaatattcgaatatgacaatacaaactattacgaaccttacgatgaatccataaatgcttatcccctttatatcagtgtaaatagcaaagctacccttacacaattggctccagaatttgtattaacagaaggtgccactatcgaacctgcaagtggaagtatccaagacttcactcatcccgtacgttataccgttacctcagccgatggtaaatggcatcgcacctattccgtcagtatttcagatgatttgcaaattatccccgagcagtttcattttgataaactgagttccaaaagcagcaaataccacattttctatgaagagaacaaagcaaaaggtgaatttatggaatgggcaagtgccaatcaaggatatatgctagtatccggaaatagtcctgctacagaataccccacatcacaagccgacggaggaattgagaacagtaaatgtgccaaactggtaactaaatcaaccggaggattaggaagccttgttggcgctcccttggcagcaggaaatcttttcatcggaacattcaatttcaattcttctgtcagcgatcctttaaaatcaaccgctttcggaagaatattccacaaaaaaccgctccgtctaaaaggatattacaaatacaaggcaggtagcacatatatggatggtacaaacgaaataccggaacaaaaagacaatttcattgtgtatggcatcttttacaaaactgatgaaacacttcgtaccatggacggatatctagccatcaatgaattcaaagatccacgcatgatagcattggcacttcttccagaaaaagaaagaaaagaaactgatcaatggaccgagttcaacataccattcgattacaacaaatatggaaaagaagtagacatggaagctttatcacgcggagagtataagataagcatcgtactttctgccagtaaagacggagatcgtttcaaaggggcaatagggagcactctttatgtagatgacctagaattagtttgtgaagaataacctaaaaacagaaaaatatgacacaaagaaacctatatatagcttttatatttacaattattagcgtgtattctgtctctgcacagaccaaccggaccaaaaccttaattaatgcagcacttcacggttgggagtatgaagttagagccggattcagtatcggcggaacttctcctattcctttgccagcagaaatacgatctatcaactcttataatccttcattagccatcagtttggaaggaaatatgactaaatggatagagccaacgaagaagtggggtatcgttaccggaattcgcttggaaagccgcaagatgaagacagatgctacagtaaagaattataatatggaaatcattgctagcgatggcggacgtttaaaagggaattggacaggaaaagttagtacgaatgtaaataattcatatctcacattgccagtattagccgcttacaaaataaacgaccgttggcacatgaaagctggtgtatatgcatcatacatattggaaagagaattttcaggaaatgtgtacgacggatatctgcgtgaagaaaatcccactggtgacaaagtatcaattgagggcgataaaagcgcaaagtatgatttctcggaagagcttcgccactttcaatggggagttcaggcaggagcggattggttggctttcaagcatctaaaagtgtatgccgatctcacgtggggattgaatgacattttcaaaaaagacttcacaacgataagcttcgctatgtatcctatttatctgaatataggatttgcgtatgcattctaacgaaaaatatcatcctgttttatagcaccatgagaaagggcagtccatttttgaggactgccctttttatgatgctatttttgtacaaaggaaattattattatatctttatttcaagatatttgtttctgctgatggttgcagagcggtaaacattattccaaacttaacttctgttgtaccatctattaccttcggaagactttttaatactggcttcaaagctttaactaaagatgccatatcaccagcttgagcctctagcatttccaatagtccgtttacaaactcttcatcctcaaacaacggttttacagctttcaatagaggcaataacacgtcttctccaacatagactttcatacctccatttccatcttgctcataataaagaggaattccttcactcaacatcggaatcaatttcagtaactctttaatgtctacagaagatattcccgatgctcgacttaaagttgtaactgacatagtcgtatccattatttgcgacagatttaaaaagagtttaatctgattctcctgttctcccattctatacatagccaaattcaaatctgaatcattccattccgcatcagcaataccatttttataaactgcctgtatatttccatcgggcaggaaacgtacttccttcaatatagctgataacaattgggggattgatttattatcaaccactttagcggtaaaaatagctctaaccaaaatactcccccatatcggatttgctgaagtcttccaaacataatatacaggttcgacactcttctgtggcaccaaattccatgaagtatcagcaaagccattttcaggcaatgccacgttcaagtccaatttcaaaaagctctttgtcgctgaaccgttataccgaataatacctccgttctgctcctcttctccggaaaaagtcaccatgtcaccatctatattcagagtaacatgaagttcagttgtcttttctcccgggataactcccggactcgcaaacttcaacagatctgttataccggctctgctattcatagccactgaacctaaaatatcagataaatccaccaaggctcctgacaatatcaatcgggctttggttgcatctgctgcatccggaataaattctaccttcttccctaacataggcttcccactataagtcaaagccaaaccacttacatctgtaaatgtgaaattctttattggacacactatagtttcgtctttatcgctacaagatacaaaacatattgccacgcataaaagaaaagtcaaatagcaaaataattcttttttcatttatttctatcttactaaaggattaataataaacaattttcctcaccaaacattcattttacaaagtaactaattttaatttacctacacaaatcttatttttatcaatagttgtcaatacattccataatatacctaaaaacgaaaaaggttggaagactaatgacgtttccaacctttttaattatcgcataaatcctgctattattgtttcatcaaatccaaaccaatatcaaaggtctttgtctcactccagtaacctgaaattatttgtatcagcgcaactgctccagcagcctctgctggaatcaaattagcactaaccaacgcctcccatacataaagcaaatcgttttttataattggttctccataatcatctttttctcctgtgtcacggagtgtcataaaagtatcaaaagccgatttatccaaatacaaataagtttttccattttcttctttcttattcatcggaataccatttaatgcccatccctgcaactgacgaatagaagcatcagttacattcgccaaatcaatctgaaacaaacttttcaataattctttcaacacagcaggttctcctgtcagtacctgattgatgatggtttccaaactgcttgcatcctgacctccaagagcagcacccaaaatattagtaatatttagttttactactactttaccattactttcagaccatgtagcaagtccggcaggtgaattcacaaatcccgaagtggcagccaatgaagtaatctcagatttttctggaaacattccacccattagtcccgccatggcccaattcatcaatttatctgtaccctgcaaagtcggtttatccacataggaagcaataatatttccgtcctcactcatctcaatcgtattcaacacctgaggaagcatagtcgcccccatcatacgaaacattccacttgctgctactgtaaacggatcttctttctttgcatcccattttgcatacaaaggacctgccttcggaaaatttttaatagggtcatctccttctgccaccacaaaatctgctgtttcataatcactcaagctatacacacctaccaaaggatttacaggattgggagtgtcctcatcatcactacaagaaataaacaaagttgctgtacacaatacggtaaataagtaataaaataaattctttctcatttctattctgcttttaattaataaacacatctgtgtgatattcccatcacacagataataatatttaaacggttgcaaaataactattattttcagatatccacaaggtctatatttcatgtttctgttctatttttaaggaaatacatctaacatcaaccatgaaaaacaaaactttccgctgattatattctgtttttaataatcagcggaaagttaccattcaaatttcacatataaatatatcaatagagtctattcgtaagcaatagttagtttttcttaataggtaggaacatgtaaggatatcactttcattctaacaccatatattataaaattgttatcaagggaaatgcagttgctacaccccaaatctctctcacgatttacaactggcccctattccaccttaagcctccggcatcaaaaccacaccctgcttcttctttccatccatcttgaccaccatcggtttctcaaagcggacatgacgaagatatttcgtttcttccaccgcaggttgcgcattgaggaagtcctgattatacacaccatcattcataaaggcattgatagtgaaatatccaaccccgaacgaagtcagattctgaaagaaatgtgttccttgactgggatctacccgatagttggtcagtccggcttccacaatcacacgggcagccgagatatgaggccacttcacaggaataccgagccatgtatcactgcttccccaacgtcccggaccgacaagcacataattctttccttcattcaagaactgttggttgatcttttctatctcccaagcaattgcctgattgttagaggcactataattatcggtttttacatagaccacatcataaatatcattcatgataccgtgtcccaacgaattatatgagcggagaatcacatcttcatccggtatctcgttcaaatcttcatccagcatttctttactgtctacgataggacgtatctgtaacagatagaaggttccggatttatcatgttcgcgacttaacgttgctgcaaattcaatttcaaccggacggcgcatctcctgttcaccatatttcaagaccaactgcagaatacgagccaacgggaaaacatcatgttgcaggatattggcaaaagtaatcaccttgcgccccccaggatacagaccatctcggataatctgatcgtacggatcatacgtagaggcaatataacgcagggcaccatcgttttccgcctctttgacatggagtttcagtaaattgaaaccatcgtcaatagaaaaatcatgtccggcatttttcaagtccaaagcatagaaacgggtttgggtttctttcagggcaatttccatttcgctggtttgcaacacctgattgggatgatagggagaaaaacgaagggtcataccaccgtctacaatatatttccctaatcccaaagccagattaaccgttccttcttcggctttttcatctcctaaaggataataattcagtgaacgagccacacccgacatagacggataataacggtcgccatattgattgccaactacctcctgcaagataacagccatcttttcctgatcgatcacattcgaagtagcctgcatatacgctttgctgtcacggaaatagactgatgcatacacccctttgatggcatccgaaagcatgcgcaacatttcataccgatcatccagataaggaatcatgtatgtgttatagattcctgcaaacggctgataatgagaatcttcaagcaaagatgaggaacggatggcaatcggagatttcactacatcgaagaaagtaaagaagtcctccaccaagcggtcaggcaactttgccttcagaaagtatttcagaatcgtagcatcatccgcatctgacagcgcaatctgatacagattattagtgtccataaattcatcaaacacatccgtacaaagcaccaccgttttaggaatagcaatacgtgcgttctcaaactcttcaaactccggatgacgcttcaccatattatcaataaacgccagtccacgcccttttccgcccaaagaaccatccccgatacgggcaaagttagaataacggtcgaaacggtctcgcttaaacacagccacgactccctggttcttcatcttacgatacttcacaatcgcctcaaagatgattttccggtgagcatccacatcttgaagactattccaggtaatcggttttaaaaactcggctaccgggaacatggcacgagaatagaaccaacgcgacacatgattccggctgatatgatataagaaagactccgcaggtacggcaaaaagaatgttttgcagttctttcagattccggacacgggcaatctcttccccggtagccgggttacggaatataaaatcaccaaaaccaaaatcatcggaaacgatacgacgcaaatcgacatccatcttttttgagttcttatcaataaagctagcgccgtacttagcggcataagacgaattttccgattcggacgactggataatcaacggaacaaacggatcgttcttgcgtatctcggcacacagcttgatacctgccagaccgtctttctccccccgctccactttcgggaaacggacgtcggtgattactcctaatatattattttgatacttatgataaatttccattgcctcctgatacgtacgtgccagtacaatcttaggccgcccgcgcatacgaagtgtacgctggtgcgcattcaaggcttcagtagagaactcctgactctgcttcaacacgaacttatacagattcggcaaaatagaagaatagaaacgaatgccatcctccaccaaaagaatcaactgcacaccgacttcctgcacatcgtgttccagattcatcttgtcttctatcaatttgataatagacaccagcaggtcggtattgcccaaccaacagaacacatattcaaacgcactcaaatcttcattgataatccgtttggtaataccatggctgaaaggagtcaggatcacgataggaatatgctcatatttctcttttatatgacgaccgatatcaaaactgtcattatcccccgtgctcggcatacaaatcaccaggtcgaacgacatattttccaactgcgccaatgcttcctcctctgtggatacctgcgagaaacgaggcggataacgcaaagataaagaggtgtattcattgaaaatcttctcatcaatacgcccgtcatcttccaacataaaagcgtcataaggattagcgattaacaacacgttaaaaattcgccttgtcatcaggttggcgaattgtgtatctttgaagtaaagctggtttaatttatatttactaagcataaagtcattctcctttcttattccaaatcgtcatatctccaaaatcatgtttcagcaaatcgttactatgaataatggcatatttaaatcccaaatattcactacgaatatccaactgttcttttataaccggataataatattctttctcacctgacatatattcatcaacaacataagaaaagaaattcattttttgaataaattcatcataaaatcgttgctcacgacaattcctataagatagttttccattaaataataaattcaataactttatcgttgaaagtacttcagaagttctattatcactatcaaatattgctttctgattaacaaaatcatttgaatgttctattatagtttcgatatcatattgagtcggatctaagatatcatcatacttattcgactttttattgttacagtatccacaagctacaaataagttttcccatgtttgtttcaagtctccattattggcttgcgatttaaaatgctctacttgataatcagttgtcaaacgccgttcgcatagataacatttatcattctgatccatcagtaattgtttgcagacctcgtccgtattataactcttatctaaagtttgtggcttatctgcatttttacaaattctaatcatcttaattaattcttattttgccactctcttttcagatcataatatttagcttttacagcaggagcaactgcttccggaatcttatcaaaatcctgcagatacatttccaactcacttttatccgaaatagaaagccgatcggaacgaatcaattcttccatccgttgtaaacgcatttgaatctcactggagtctgtacgaacaccaaagtaaccttctgctaatgcttcataagaataatccgttaagtcttcaattggttcacgatgctccaaatcaaaagcaatagcattctctaaagaattaagaataaaaggggaatgagtagtgacaacaaactgtatattaggaaaaatagtagtcaatatcggcaaaatcactcgttgtagttccaaatgaagatgcgtttctatttcatcaatcaacacaattccttctttctcgtatgcacggaccacattattctgtgattgcatttttaaaattaaatcggctacaatgtctaatgcagccgaatatcccgctgatagttcggtgaatttaaacgactttccgcgtgtttgaataaggaaagagtaatctttataattgaaatcaagttctaaggttgtatcatcaaatatctgacgaagaatatttcggaagccgacaaaccattgacgaatataatcagcatcctctgtttttccttcattacgagctaaggcctcttgcactttacagtcaaccataaaattcaagaactgatctactttattatgtttcagatcagtcttcatcttcaaatccggcttaacaggattcttaggttctacaaaaagagacttacgttcatcagcatagtaggctataataaagtcctgacttaaaaaatccttaggtatagagtatatatcatggaatgaaagttctacttttccataaaattcttcaattctatttttataatattcaacgttattctggccggaagcaatacttttcgaatcaccagtggtctcagcttgctgcaaccatgcttgattagactctaaatatttcttaaaatctaagaaactcaacatcttatcattacaaaccttacttaaatgctccacaattgcattcaacagaatagtcttaccacttccgttctttcccgtaataatcagatgttttttttcattttcagagattggtatacaaaagttctccaaatgaaaaatatgattaaccttgatactcgtaataaaattacccatagtcctttatacttgatgattacttttgcaaagttaattctttaaatctcattttccatcatcttctttataaagtttacttgtttatctcttattattttgtagatttgtaactttaagtttattcaaaaagactttttattcacatgaaaaaggtaactttattaatgagtggaatcatggtgatgtcatgcgctccccaacaaaaaaagctggtttaccccgagacgacaaaggtagacactgtagatgtgtacttcggcacacaagttcccgacccttacagatggttggaaaatgacaccagcgcagccactactgcctgggtagaagcacaaaacaaagtaacgaatgagtatcttagccagatcccgttccgcgaaaacctgctgaaacgattgacaacactggccgattacgagaaaatcagtgctccgatcaagaaacatggaaagtattatttcagtaaaaatgacggtctgcagaaccagagtgtattctatgtgcaggactcattggacggcgaaccgcgtgttttcctcgatcccaacaaactatcggacgacggaacagtggcactgaccggtctttatttctcaaacgacggcaagtacaccgcttacagtatttcacgcagcggttcggactggtctgaaatttatgtaatggataccgaaagcggaaaactactggaagaccacatcgaatgggccaagttcaccggtgctgcctggcagggagacggtttctattacagtgcctatgatgcaccgtccaaaggaaaagagttctccaacgtgaacgagaatcacaaaatctattatcacaaaatcggtgagccacagtcaaaagataaactgatttatcagaatcctgcttatccgaaacgtttctatacatcgagcaccagtgaagacgaacggattctcttcctaacggaatccggcgccggaagaggtaacaacctgtttatacgggatttgaaaaagccgaattcacccttcatccagctgacttcagacctcgactaccaatattacccaatcgaagttatcggcgaccagatttatatttataccaactacggtgcaccgaaaaaccggatcatggtagctgacatcaaccgtccgaagctggaagactggaaagagctcgtacccgaatcggaagctgttctttcaaatgcggaagtgatcggtggcaaactgttccttacttatgacaaagatgcctcgaaccacgcatacgtttacggtctcgacggtaaacaaattcaggaaatccaactgccgtcactcggttccgtaggctttagcggcaacaaagacgacaaagaatgtttcttcggattcacttcattcaccataccgggtgctacctacaaatacgacatggatcagaacacctacgaactataccgtgccccgaaagtacaattcaactcggatgattttgtgaccgaacaagtattcttcgccagcaaagacggcgtaaaaattccgatgttccttacttataagaaagatttgaagaaagacggcaagaaccctgtattcctctacggatatggcggcttcggcatcagcctcaacccgggcttcagcgccacgcgcattccattcctcgaaaatggaggtatctacgcacaagtaaacctgcgcggtggtagtgaatacggtgaagattggcacgtagccggaactaaaatgcagaaacagaacgtattcgacgatttcatctctgctgccgaatatctgatcgaccagaaatatacgaataaagataaaatcgccattgtaggaggttccaacggtggtctgttggtaggtgcctgcatgacacagcgtcctgacctgttccgtgtagcgatcccgcaagtaggtgtaatggatatgctccgctaccataaattcactatcggctggaactgggcaagcgattacggcacaagcgaagacagcaaagagatgtttgaatacctcaaaggctactctccactgcacaacctgaaaccgggcacgaaatatccggcaacactggtcactaccgccgaccatgacgaccgtgtagtccctgcccactcattcaagtttgccgctaccctgcaagccgacaacgacggtaccaatccgacactgatccgtattgacagcaaagccgggcatggcgcaggcaaaccaatggctaaagtactggaagaacaagctgatatttacggattcatcatgtataatttaggaatgaaaccaaaattctaaagcgacacttcctatttataaacacatagaagccccgtaacctgtattttacattacaggctgcggggctttgtgtttttcagcagaagaaattgacattttatcattatttaatcaaaatatccgcattaaaacaagcaactttgaaaaattttcctatatttgcagtgagttagttgacattttatcagaattaaccttttaaaatatagtatcatgaacatccagaaaatcatgtcctctttggaggctaagcatcccggtgaatctgaatatcttcaagcagtgaaggaagttcttctttctatcgaagatatatacaatcaacatcctgaatttgaaaaagctaaaatcatagaaagattggtagaacccgaccgtatcttcactttccgtgtgacgtgggtggatgacaaaggcgaggtgcagaccaacctcggttatcgtgtacaattcaataatgcgatcggtccttataaaggtggtatccgtttccatgcttccgtcaatctttccattctgaaattcctcggtttcgaacagacattcaaaaatgcactgaccacgctgcctatgggtggtggaaaaggtggttccgatttctctccgcgcggtaagagtgatgctgaaatcatgcgtttctgccaagcctttatgttggagttatggcgtcacctcggaccggatatggatgtaccagccggtgatatcggcgtaggcggacgtgaagtaggttatatgttcggtatgtataagaaactgactcgtgaatttacaggcacattcaccggcaagggattagaattcggaggctcgttgattcgcccggaagctaccggtttcggtggtctgtattttgtaaatcagatgctacaagcgaaaggtattgatataaaaggtaagacagtcgctatttccggtttcggcaacgttgcatggggagcagctaccaaagctaccgaactgggtgccaaagtgattacaatttccggcccggacggatatatctacgatccggatggtatcagcggcgaaaagatagactatatgctcgaacttcgttcttcgggtaatgacattgttgcaccttatgcagaacagtatccgaatgctacctttgtagaaggcaagcgcccgtgggaagtgaaagcagacatcgcacttccttgtgctacccaaaatgaattaaatggagaagatgctcaaaatctcataaaaaatgacgtactttgcgtcggagaaatttccaacatgggatgtactcccgaagcaatcgacctctttattgaacataagataatgtatgctccgggtaaagcggtcaacgcaggcggtgttgccacttccggtttggaaatgtctcaaaacgcaatgcacctaagctggagtgctgccgaagtggacgaaaagctccatgcaatcatgcacggcatccatgcacaatgcgtgaagtacggcacggaacccgacggatacattaattatgtgaagggtgccaacattgccggatttatgaaagtagctcacgcaatgatgggacaaggcgttatttagaagactttgtttagttgtatttgtatttgtggtttgcgctgctcgcctcctgtgacaggacgcgggtagcgctatttttttgagattaacattattttcgctggaattaattatctttgtggcatgataggttaaataatggtttgtgaatttgttatatcagataaataactcacaactaataatttaccattgatagttttgtaattaataatcatgtaataaataaaaaatgctacaacccgaattgaaatttcgccgtgacaagattcgcagtctgatggtgtcacagggcattgacgccgcacttatcacttgtaatgcaaatttaatttacacgtatggctgtgtagtcagtggctatctttacctcccccttcattcgcctgcactattatttttcaaacgccctaataatatcacaggagaacattcgttctcgattcgcaaaccggaacaaatcgttgacctgttgaaagaacaaggattgccgatgccaaccaaactgatgttagaaggtgacgagctcccttatacggaatattgccgtctggccagcctgtttccggaagcagaagttgtaaatggcaccccgttgattcgtcaggcacgcagcgtaaaaacacctgtagaaattgagatgttccgccgttcgggcattgcccacgccaaggcatacgagcagattccaagcgtatatcgccccggtatgacagacatcgagttttccattgaaatagaacgcctgatgcgtctgcaaggttgcctcggaattttccgggtattcggacgcagcatggaaatattcatgggtagcgtactgaccggagacaatgccggatacccctcgccctatgattttgctttaggtggacagggacttgatcctgctttgccgggaggagcaaataaaactccgctaaaggaaggtcagagcgttatggtggacttgggaggtaacttcaacggctacatgaacgatatgagccgcgtattctcaataggaaagctgcccgaagaggcttacaccgcccatcaggtttgtttggatatccaaacaaagatagcttccatcgccaaaccgggcattgcttgtgaagtgctttacgacatagctgtcgaaatagccaaagaagccggatttgccgacaaatttatgggaacagggcaacaagccaagtttatcggccacggtatcggactcgaaattaatgaagctccggtattggctccccgcatgaaacaacaattagaaccgggcatggtctttgccctcgaaccgaaaatcgttattccgggtgtaggccccgtaggtattgaaaactcttgggtagtaaccaatgaaggaatagaaaagctgacgaactgcaatgaagaaatcattgaattaagttaaacagatgatgaaaaagatgtgtccggcaaagaacggacacatctttttctactactaataacacacttaacccccaaaaaacaatgaaacaacctttcattctaacctttatgtccactgttgcctgtgctgtaacagccactaacaaagcaccggaaaacactacaccgccccaatcaaatactccacccaatattcttttcattctctgcgatgacatgggatatggagatttaggctgttacggtcaaccatttatccgcacccctcatatagacacgatggcgaatgaaggtatgcgttttacacaggcatacgccggcagtcccgtcagcgcgccttccagagcttcattcatgacagggcaacattcaggccactgtgaggtgcgaggcaacaaagaatactggaaaaatgtaccgatcgtgttgtatgggcaaaaccaagaatattcgatagtaggacaacatccttatgattccgaccatgtaatcttgccggaaataatgaaagacaatggctataccacaggtatgttcggcaaatgggcgggaggatatgaaggctcgcgttctactcccgacaaacggggaatagatgaatactacggttacatctgtcaatttcaggctcatctctactatcccaatttcctgaaccgttatagtaaagcgttgggcgacaccggagtggtgcgggtggtgatggatgaaaacatccaatatccgatgtatggtcccgactaccagaaacgtccgcaatactcggccgacatgattcatcagaaagcattggagtggctggaccaacaagacgacaaacaaccgtttttcggcatactgacttacaccttacctcatgcggaactcgttcaaccggaagattccatcctgaatgaatacaaagccaaattcaacccggacaaagagtttaaaggaagcgaaggctcacgatacaatgctattacgcacacccatgctcaatttgcaggaatgattacccgtctggattattacgtgggtgaagtcctgaaaaagctgaaagagaaagggctggacgaaaacacattggttattttctccagtgacaacggccctcacgaagaaggcggagccgaccctactttcttcggcagagacggaaagctgcgcggattaaaacgccagtgtcatgaaggaggaatacgtattccgtttatcgcgcgttggccggggcacataccagcaggtaaagtgaacgatcatatctgtgctttttatgatttaatgcccacattctgcgaagtgatcggcatcaaggactacgaaaagaaatatcgcaataaagaaaaagaagtcgattatttcgatgggatttcttttgctcccacactgctgggtaagaaaaaacagaagaaacatgatttcctgtattgggaatttgatgaaacagaccagattgccgtacgcatggacgattggaaggtggtggtaaaaaaaggaacaccgttcctctacaacttaaaaacggacattcacgaagatactgatatagcactccaacatccggacgttgtagaaaagatgaaagctatcatcttcgaacaacatacgcccaatccatatttctcggtaacactacccaaacagtaaacgtacggataaagaaataatgagtaatcagcagttagaaagcaaggtttcattcatttccgcacagttttgaataaaataatagagtattctgga

SEQ ID NO: 8062 - DNA, 4694 bp, Unknown
  gut microbiota DNA sequence
gatttgatgggatattgggtattttcgaaaggtattggaggcactaccgtttttgagaactggggaaatggcggtaacggactggatgcgcaagtttgtctgcaaaatataaacgaaaataaaccagcctggggagcggaacttcctgcaacttataatggagataagagccgctttgaaccaattgaatgtcctcattcatactaaaactaggaatataataatatgagaaacaatatgataacaaaaaaactaatcaaatttgccctgctgttttttcttatcggactgacggcttgtgacaataaactgaatccgggatttgatccggatgattatgaaccgattgttccgcctgaacctgttagaacaatggatgcaatggctagtggcgagcgggtagtactttcgggtgcttcgttgacggatattgttctgaaatggacgcctaccgagaaacacggaaatacagtatatcgttatgaagtattgattgatacgatcgggggagactttaccaaaccggtagaaacgattttttctgacaataacggtttggaatcacagttgactttgacccattatcaggcaaatacaataggtaaactggctaaattccgttgcaataccaacggtacactgcgttggaaggtgcgtgcttattgcggattggatcaggctcttagtagtctggaaggctatttcgtgatcttcatgatggatggcatcgatgatatgcctgctgaaaatgacccggtttacatcacgggtgtgggtacggaagatgatggtgatgaagcggaagcacaacaaatgctccgtcagaatgaaggaatctatcggactttcactcagttgaaagccaaccagccatttatatttatgtctactgtagaaggtcgcaaatgctattattatgtagacgacaacggagtgttgcgtgagcgtaatgatggtgaagactatacagttacggttcctcaatcaggcatctaccggattaccatcaatatgggtgaacaaacgatcagttacgatgaaataggagctgtatatctttataaccattcgggtgggtatagacaggatttcaactatctgggatatggcaaatggggtgtgaagaattatactgcccggaaacaaacggaaagttgggcaggaagcggtgaaacccgtcatagctttaagatggaaatcaacggaacaacctaccgttggggacataaggagaaagataaagggcaaccgaatctgactaccgacaacagctattataatttatatcaactggcattgggcacagatccatgggattacagtttccgtttctgcgacgaattactgcaatggggcgaaaagcagggaaatgtctattatgctacggtgaaaaccgatgtaaccctctatttcaatgcagagtttggaacgtacacccaccgttgggtagcttcggaaacgaatgaagattaaaactgaataataatatgaagaactatatagtatcattatcaaaaagagctttgttgttaagcggtgcactggcaatatttacagcttgtgacgacggcgatctgggagacatctacaaaggtaattcatccggtgaatatgtgtcggatgtgaactggacagatgcagccgacaaaagtacgggaacttatatcaaatatttctatgagaatgccagcggacgggataccttttgcggaagcatttactgggaaaaaccgaatacaccggaaaccggagaaccggcaagcacgggcggtagcggcggatggtcgcagggacatgcattggacatcgtgatcgatgcttatatccgtcacgcaaacaatcccgaatatcaagctcatttgtatgaaaacatcatgaaacctttcctgccggcttttgatgactggaatgaacattgcggttatggtggcaaagacttctggaataacttctatgatgatatggaatggatggcactgtcttgtctgcgggtttatgaattgactggcgatcaggattactacagtgcgttgatgaagatgtggaaccatatcaagggagcgaagaatgactataaaggggtaggaggaatggcatggaaaacggatgcgccggcttcacgtatgtcttgttccaatggtcccggttgccttctggctatgaaattgtatcaacttaccgttaaggaggctaaagacggctgggaagagcaggctgcttattacctgaacttcgccaaagaggtatacaactggatgacggcttatctgtgtgatatttccaccggacaggtatatgataatcttagtattaaagatgacggaacaccgggagatcctgataaagtagccttgtcttataatcagggaacatttatggcggctgccctggagctgtacaacgctacaggtgaggatgaatatcttcgtaatgcggttgctttcggctcttaccaggtgaataagaaaatggattccaactatccggtattcagtggtgaaggaaattcgggagataatcttttattccgtggaatatttgtccgttacttcctggatatggtgaaacagccgactaacagcctttatccggaaaagaccaagaataagtttatcgctgcattgcgcagctgttctgatgtgctttggacgttggctcatcccgaaggctattatgtgtgggagtacgattgggcaaaagcaccgaccttcggtaatcgtgacaacagggaagatcgcctgacaatttccttgaatgcggaagtcccgggagcaacaatgattgaaatccgtgcccgttatgaagactgggtgcaaggtaaagcaacggaaaaggccaactgggtcggaccggatttcggtaagaaagcagaggaataagattgatttattacacatagaaaatcgaaaagaaagatgatacatataaaaagaaatatttgtctggtggctgtttcttgcactcttcttgcaggtatacctttgcagggtgtggcgcaaacgggaagaacggcaaaggtgcaggccacacaaagtaataaaataacagtgtcgggtacggtattggacaagacgacaaatgacccgttgatcggtgtgtctgttgtcgtgaaaggggtggccaatgcaggtacgattacagatatggatggtaagtttacattgaaactgccttatgcggaagctccgttggtgttttcttacctaggttaccagccgcaggaaattgttcccggtgcaaagaaggaactgactgtcttactacaggaagatacgaaagccttgcaggaagtggttgtggtaggttataccaaacaacgtaaagaaacgatgatcggttctgttgctaccatcacgacaaaagatctgacgcaaagtcctactgccaatatcaacaatgcgcttgccggacgtctgccggggttgattgtaaaccagtatgcgggtggtgaaccgggtgtggatcaaagtgaattgtttatccgtggtaaggcaacttacggtaaccagagtgccattgtcattgtcgatggaatcgaacgtgacatgagttacctcgcaccggatgaaattgaaacattcactatcctgaaagatgcttcggccactgccgcttatggtatccgtggtgcaaatggtgtaatcgttattactaccaaacgtggtaaggcagcggaaaaggcaaccgtgaacctgaaagcctctatcggtattaaccagccgatcggtttccccgaatatttaggctctgccgattatgcaactttatataatgaagccagattgaacgatgccaagatgacgggcgcagacatcagcagtttgaaccttttctctcaacaggcgattgacaatttccgccgtgcgaaaggagacaactccgatggtttgggatatgactgggattattatgattttgccttcaaacccggtttgcaggaagatgtcagcctctccatccgtggaggtacggacaaggtacgttattatgtattggccaattacttttcacaaggcggtaactacaaatattcgaatgccggtgaatatgactcgcaaaccaagttcacccgttacaacttccgttcgaacatcgatatcaacattaatcgttatttgagtacccgtttggatttgggggcccgtattaccgaccgtaatgcaccgggtacaacagccggtcgcctgatgaccatctgtgctacccagcctccatatctgcccatcctggtggaagaaaatgcgcatccgcagaatgaggaatacattcagcaaaatcctcgtggaatgctttatggtgacaatatctaccgttacaatcttctgggtgaattgagccgtaccggttatctgaatgaaaagaacacgtatctgaatggtagttttgccatgaatctggatatggaatttctgacgaaaggattaaaagcggaagtgatgttctcttatgatgcttctgaaggacgctggattaatcgcaaactggatacttacaaagacggttatcgtgaatatccgaaatatgcgacgtttatgccgatcgaaggttcggatgcttatatggcaggcggacactatacgggtgcttacaaaacgggtaacaaatatgatattgaccagactattggcaacggattcagtcataacgcttctgacggacgtactctaattttatccgaaatttcggataacaag

SEQ ID NO: 8063 - DNA, 4983 bp, Unknown
  gut microbiota DNA sequence
acagttcttgtattcgaccgataatctcgttccacttttcagggctttgtgctaccgggccgggagcattgagaaacgaacctaccttgtattcagcaatcgctttgtggagttttgcctcgtccaattggaattcaccatttatcgtctctcctaatacatcaatggcaagctcggtcatctgcccaatcttggcatcgaggtccatctttgatagaagctcttccacttgttgttctatttttgcgtcttcaggaatggcagtgggaactgcctgtttggaacaggcagtcattgcgatagatgcggtcattaatataatatttcttagtttcattatgatttgtttttaagtagcatcgtttatgtaatctgtcattcagagggatttaacccgaagaatgacaggtacttatggtatgaatgatttttaaacttacttaggaacattatttcacggttaccaggtctacataatagccatgacccgtacataagaatccgtcttcagtttgaatcttattcagtatctcttgtgtcagtaccagtgtgtattcaccgttttccgtaaattctatcttatctgccaggccagtccaccaacctgtggcaagttgcatctgatgatattcggcagttggttctatggagtagactactttcagtgttgatccggctgtgataccggcaaacacatcttttggaatcagaccgaaactcttgttggggtcaccgtccggcttatcccacgaaacgtaatggtgtcctgaccaaagtgttatttcggtagatacggtcacagtctgttcggtagtcgtaatattatcgttcaagaactgcacagcctctccgctacgggttttgcctgtcatcgtatagtttccatcagacaaatccggacaagtcagcgtaacttccgtagaagattgattgctgaattgagacaccgtctgtccgccgatagttagagaagcgatgttttcaagattgataccggaaatggtccagtccacgttggcagtagcccggttagcacctgaaatgacaagggaagcattggtcactttcaccatgtcggctccatattcattgccggcggcatcttgcagaacgatacggtaatcgccttcgcttacgcctgtcggaacgatgtattccagatagttctcgtcttccgattcaacataagtaggatcggtgattgtgtttcctcccaagaggatggctgttacgttctgtaaattactgccatataaacgggcagtcttaccgggagatacaattctctcaaaggctacttctttagattgagggtcatcagccaacggattgaccaccactaatccttcacgggaagtcttcttccctttcacagtttctacttctattttcaaattatacgtaccggctttcagactacggttgatttctttgtcggagtcggtacccgattccacttcctgcccatcaatgaaccaggttactgtggtgtaatctttcggagtcacggtcagcgcgatggataagttcgcatcccggctgatgttggcgaatgtagccaattggccgttcgttctgtcagggaataccggggcaaggatatgcggatcatcattttccgtcaccgtagcgaacggctcttcctcggtgcatgcagtaaatgtggagcctacagcgagtagggcaaatagtgcaatatatatctttttcataatggatgattgtttaatagttagttttcagtatcccaccacagaaggctgtgccaattatctgttcctcccatgcgctcgatggcttcattgtagcttttcttattataggaagattccaatacaggatagcagagacgtaccggaatttccgttccaccggtgagatattgtccgaacccatattctgccggtgatttcaacttcggataaccggaacgacgcacgtttgcccaacattcggcaggattggtgaagtgaagaatccaggcctgtgtattgatagcttcaagtttctgattgtccgtatgtccgaacgtccctctaccttgaatgaatgcatcaaactctgcatcagtagtagccgtgcaaccgtagttgtctgtcaggaaatccatagctgcacgcactccttgcttgtaaagatcttctgccgacacactgccgacattccattttttcacagtagcttctgccatcaggaacttcacttctgcagaggtcatcactacgcccggattgtcgctttttaggaaattattggcaagtttgggttccacttcacgagccatggttgctgtaacagaagggttgttaacggctaattccttacaaatatcgctgtcgtatcctgtaggccatggctcccacgagtaggcacccgggttgcgcggactgaaatcaatccctttttcaatcatctcctgggtgatgtcgacacgattgtcgggactggtggcactcatcagcccgtcataataacaacgggaaattttgaatgtacgagggtcaccggattggcgtagctgattaaagaaagtggagcagaggtaacttggattattagcggggtcgttgccgaacaataactgtgacaatgaatttccgcgataatcagagtaagcttcttgtccgaaactaaatgcgattgtcatgtatttgatgagcgcatcgcttgaggcgtccgttatcacacccccattggcagccaaagcattttcaaattccgtttgtgcctttgtaggattgacattggagattcgcatggcaaaacgtaggcgaagcgagtttgccagttgttgccatttagttacatcaccggcatagatgaggtcacctgtcactttatctttggtcggatcgattttattgacggcatcttccagctccagaaagaaagcgttgtaaatatcttcctgtttgtcatacttcggattgaactttccttcgaggaatcccaggccggcttcactgaaaggagcgtctccgtaagtgtcggtgatgatagacataagataaacccgataaatgcggagcacagagttgatgttcactttctctgcatcttcggctgtgcgatattgagcatcaatgatattcttcagggattgagtgtagaacgatgtccagatacggctcatttcattattgtctagcgtatggcgtccgccgtagttggtggtgttccaacatcccatcagttgttgggtgaatgcataatggtagttacggtagatttccatcatactaaggtctccgtacgtttgcagttgggcagtggtgagctgcgcattcgggtcgatggtagcggccttggaagggtcggtattcatgttttccatgtattcatcgctgcaagaagcgaaaaacagggcacatgccatcgtgatgattgtgatgtatttagattgtctcatgatatatctttttagaatttcacatttacattaaaaccatagcttctgcgtgaaggcaacgaaccgtattcaagtcccataccggtggtattgttgtagttggaatccgggtcgatattcgggatattcttccatacgatgaacggattgcgggcaacgaacgaaacggtcagtccgcttactacattcttcagccaggatttgggtacattataactcaacgtcagctcacggcattttacgtatgagttgtcgtaaataaacatagaaggtgcattacggcaaacgctcatccagtagtcttccggattgatgtagatgtcgttggggcgatacgttccatcaccgttgtcgatgacacctggagcaacgaatccgcctgtcggcttccagttatcggctcctttcgcaatgccggctgccaatctttcttcttccgagcgataccaggcgtcgcgtcctgccaatgtctccggacttttacccgattcgtaagcagcacgggcagacatcgaatagaggtcggcgcctactttcacatcaaataccgctaccagcgaaagattcttgtaggtaaagttggtaagcaatccacctgtccagtcccaagaggcattacccaatacgtggttgctcttgtcatattgcggcagaccggtttgcgggtcaatcagaatatctcccttttcgttccgttggaagtccgggcctacaatagaaccaaagttctcgcctaccttagcggccacctgaacgtcgagccaagatgctttttccagttcaaacatatccgattcgccatccagttcttttaccttgttgctgtttttggagaagttcagattaatgtcccaggaaaaatcgcgtgtttgaatcggtcgtgtgctaagggcaatttcaatacctttgttttctatcttgccggcattaatcaagcgatagttataaccggttgtccaggaacttgccattcccataatttggtttttactgatttgagaatagtaggtgaaatccagtccgatacggttcttcaggaatttcaattccaatcccatttccacggagtttgttttggttggtttcaagtttttgttggggatggttccgttatcgatatatccgatggtatatccgggataagcatatttggatttcgtatagacgagtcccaattgataaggatcggtatcgctacctacttgcgcccatgacatacgcacctttccgtaaggcaggaggtcgcccagttttgtcagctcggagaatacaaagctgccggagaaagaaggatacatatacatgttgttgccagtgggaagggtagacgattggtcgccacgcaacgtagcatcgaggtaaagcatgtgtttccatcccacgttcactgctccgtaaaccgaattaatctgcttgcggtaactgccgggcactacactgatctcgttgaagctcgtcaatgaagggacatcgcgtatcttcatgtcttgagcggtggtaacggtggtctggttgttcaccttatatacattgccgcccagcgtagcgttgaaatcgaaatcaccccaatggtt

SEQ ID NO: 8064 - DNA, 5185 bp, Unknown
  gut microbiota DNA sequence
attatctaataatacaatcagagtctgtatgaaagcaggaagccagtctgcactgactcaaaggaaatatcgtattaagaaacaattatccgaccttagtttctccatcatttttggagataaaggagaagataaataaaaggacaacgcactctgttatcacaaatgtttcttttgttatatttattttacaatacgctgattttcagcgacagtatttcataatattgttataatgtgttattgtaccgtataggcaaatgctgtacttttgctgaaaatcaataacaataaaactattatgaaacgaaatctacttttattcacattcatggttctttgctctagctttatcttttcaatgccatcagacacaagaagacaaataaagatgaaagttagacaaccgatagagcatcgctctactaatcaccttgatccggcacgagtttatgtcagtaattcattattagagattgaatttgagaatccatccaaagacgtaacaatcacaataattaattcagaaacaggacaaacaatctatcaggagaaaagtacatctttagaaaagtacagactcattgatttatttggagaagataaaagtgctgaatatactcttgagatatcatcgtcttcgtggtccgcaacaggagtatttacaatagattgaagtacactatgagacttattccatactacatatcagccatgctgatggtgttattctatgcatcttgcaactcccatcaaagttccaaaggtaccgagaaagatataatagctgaatttgatggagaagcaatatatgccagtgagataaacacaattataaaacaagagctttacgacgaactttgcagaattcatgaaatcaaaaagaaagctcttgagcaattgataaatgtcaaactactacagaaagaagccaataagaaacagatgacttatcaagaatatatagacgattatgtaaacgctcaaatagaacagtgcggaatagattctcttttaaaacggtacaggctagaatcaattacagaatttcgaggaaaaagtatatatagcgtagcaatagattctcctaccggtaaagccacgcgctcatttcatttgaaaggagctattgtcaacgatttactggactcactaaaaaggaataaaaagataactaaatatctctatcctccaaagagtccaagagttgaccttgataacctgcatacctactacaggggtaatctaaagtcagaagtctctgtcattataatatctgattttgactgtgaatcatgcattaatgctcattctcttcacaattcaatatatgaagaatataaagataaagtgaaatttggatatatccactattcaacaataccaacatttgctgaaatagcaagtgacgcagcgaacaagcaaaataagttctgggaattccaagactcattatatgcatatagaggatatattgattctacaactgtcttcaaaatagctcacaatatgtctatggacataaacaaattgcaaaaagacatagcaagtaacgccgggaaaaaagcaattgaatacacaatcaatcaattagtacttcttggtgtgtatgcaacaccgacacttattatcaatggtcgcctaatcgttgacaccaattcaaaaaaagaaatctgtcatcttatcgatgaagaactatcaaaataatattattaacaattaaaaaaatgtattatgaggaaaattatctttttatgtttctgtgccttattggcatcttgttcttcagatgaaggattacaagatataggcacaaatgggaaagagttggcaaacatgatcaacgactatgaacttgtattaaaaggttattctatcgatgaattaaaaaaagaaaaagatgaactaaccccaacaacacaagaagaaactgttgcagagccatggcttattaaagccatacaggattctattgctcaaatccaattctcctataacaaccacacaagaacagatgcaggagcatacacaagagcagctcccctggagggagtttttaagtatgaaacctgtgggagatatcgtgaatttgtataccatatggattgtgaagatggtggagacacatattcaacaggaaatataggagcaactagagtagatggaaatgggaatgtagagtttcacttttgtgtcatacctgcaggctatgcaacgggtggagtattagcattttatctaccaaatttgtatgcgcagaatatgcatgtagttaagcggcatcacgataatgaagaccataataacaaaaatcatattatagacaatgcaggtttagcctcatttggtccaaattatttcaataacaacaccggtttcttctggctattcggaggggggacgcgctctgataaattacctttcaaatttggggtaattgggactgctccattgcctggaccccataatattttatggattgatgatgaaaacgggaaaaatgccaatcaggctattaggtggagcgaatcaaataatgctaaaggggttgatttaccagcagaaaaaagtttttatggccttactcctggcagaaatacaatatacgaaataattcagatttagaaataattcatagaataacaatcatatctaaaccaatactatataaataatgagtcccttattctaatccttttccatagatgaaataggattagaataagggaactttattttaataaattccaaatgataataagtgattatttttcgcactttaacatttgaatatcaaatactaaagttgaataacctaaaatagtaatcgaagaaccttttggagtataatcgctactaccataaccatatttccatggaacatacacttccaaacgttcaccaatttttcttcgttgcaatacctctgacaaaccagtcgcaagcccattaaccgttaagttcgcagttcttgaaaaatcaatgctaggattcgcttcagtaaaagagccattaaacacttcccctataaagttatcttgtttatcaacataaccaccagtattaccccaaatgatataagaacctttataatatacagtaacctcatctgttgcccgcgggataatatcttgaatcactccatcacccacaggagttttctttttaaaatagataggaactccaggatatgcaatcatatgaatagaatccaactgaccacgtgtagcgatatttgcatgagcattggctattgaatctataaaagcttcattacgtgcctgccagttatcatatttgcccgtctcttccgtctcactgcaagcagtgaatgcaagagccaacaatactaaggagaataaatagatctttttactcattcgtcaaaggtttattgtaaagttttcaatagagaagtgatgcttactctgtctgcaataatgttattcagttcagagatagctacacgctcttgttgcatggtatcacggttacgcaatgtcacgcagttatcttctaatgtttgatgatcgactgtcacacagtacggagtaccaattgcatcctgacggcgataacgcttaccgatactatccttttcgtcatattggcaatggaagtggaacttcaggctgtcaataacctcgcgggctttttcaggcagaccgtctttctttaccaacggcataaccgccagtttcaccggagccaaagcagcaggtaatttcagaaccacacggctttcaccattttccaattgctcttcgcaataagatgcgctcatgatgctaaggaacatacggtcaacaccgatagaagtttcgattacgtacggagtataagactcgttcagttccggatcgaagtatttgatgctcttgccggagaacttctcatgttgagacaagtcgaagttagtacgagagtgaataccttccacttctttgaatccgaacggcatcaggaattcgatatcagtagcggcatttgcgtagtgagccagtttatcgtgatcgtgataacgatagcttgcatcgccgaatccaagagctttatgccatttcagacggatttctttccatttcttgaaccagtcaagttcagttcccggttttacaaagaactgcatttccatctgttcgaactcacgcatacggaagatgaactgacgggcaacgatctcgttacggaaagccttaccaatctgtgcgataccgaaaggaactttcatacgacccgtcttctgtacattgaggtagtttacaaaaataccttgtgcagtttccggacgaagataaatcttcatggctccttcggaagtagaacccatttcagtagagaacatcagattgaactgacgaacttctgtccagttctttgtaccggagatcgggcatacgatttcttcatcaataatgatctgacgcaattcttccagattaccgtcgttcagagccttagcaaagcgagtgtgaagtgcgtcacgttttgcctgatgctccaatacacgtccgttggtagaacggaattgagcctcatcaaaagattcgccgaatctcttggcagctttcgctacttctttattgattttatcgtcatacttagccagcagatcttcgatcaacacgtcagcacgataacgtttcttagagtctttattgtcaatcaaagggtcattgaatgcgtctacgtgtccggaagccttccagatagtaggatgcataaagatggcagagtcgataccgacaatgttctcgtgcaacagcaccatgctgtcccaccagtatttcttgatgttatttttcaattcaacgcccatctgaccgtagtcatacacagcgcctagtccgtcgtagatatcgctcgaagggaatacgaaaccatactctttgcaatgcgatacaagcttcttaaaaacgtcttcttgtgccattttcttttctatatctattaatttgaatttgcttttttcgtaaaaagtgccacaaagatagggatttatctcataaataagacagggagggtattaatttatcttattcctgaacttcttcatcgatttccggtgccaccatacgctcatattcttcccgctcctgctcccggtccgctttcttcatttctttggtcagcatctcttcgggcatatatagattaaaaggaatacgcatgcatttcatctttt

SEQ ID NO: 8065 - DNA, 3490 bp, Unknown
  gut microbiota DNA sequence
agcaatcaagaaaggatattcattgcgtcatgatgcatttggcatgacaacctattatggcagttgggagcgtaggttcgcaaaaaaatatcgtaatatctgccccattattatggaaggtggctggattgtcaaatcacatagttattggcaggatcctagaggatatcgcaaggattcacacgaggacgtaagacgcggtgagtttgatgacagcaaagaggcacatgtcaatatgatggatttccgttttggcgatacagagtcctggtttaaagatgcttttgatttagtacgccgattccttcgggaaggggggtataggctctatcccagtgaaatctctttgccgttagaagtctctaaaaaaacaactccgactattaaacattgctggaacaatttgggatgggggtactgtcctactaatattccgcaatggaatcaaaaatataaagtagctttcgctttgctcgattctgaaacgaatgaggtgcgatatacatttgtggatacgaatactgatttatcgaagtggataaaaggaagtcccgctgaatatgtatttgagccggatatgtccaaagttgaaacgggtacttatgtttgggctgtgggcctggttgaccggagtaataaagatctcatagggctggacattgccgccaaaggggatatattggattcgggctggttaaaattgtcgaaagtaagcataaaaaaataagagctataggtatgaagattaattttcaaaatatgtgcagtttgagaaaaataagttgtgggcttattttttctatggctatatcattagtcgcttgcggcagtgataatgatgaagaaggaggtggtaatggtgatgatggtttggtagaagatacttctattcctggaaacagcattgttacggtaaagcagaatcgaaatatcattttgcataatcctctttccggatgggtattatatgcgggtattggtgatggtttatcttccacattctggcaggattatgataatttcccgtcatcggaaggcactgtaaaggtctctgattatgcaaataccttataccttcgtggtgcctgggctgattttaatcctgaagaaggaaaatatgcatggaactccgattgtgataccccttcggctaagcgactgaagatgttgatagagggagctaagcaaagaaatatgaaattggcctttacttttgtggtggatagccgtgataagcactataattttactccgaattttgtaaaagaggctggcgcgaaaggatatgaaacacaaacaggttcagtaaaagtatggtctccctatccggatgatcctattttccagaaatattatgagaaatttatcagggctttggctaaggattttaatgatcccgacaaagtacagtttgtaagtggttcaggatttggaaaatggggagaatatcatagtgtatggtactatcaggtgcgtgagttgggaaaaccggagctgccgactcgtgaggctgttttcgattgggtgacagatttatattctcaagtatttgataaagttcctgtgtttgtaaattatcatcgttggataggtacaagtaaagaatgggatggcaataactatgataaagatactgaaagattaataggaaaagcagtagctaaaggatattcattgcgtcacgatgcgtttggtatgaaaacttattattctacttgggaacgcaattttatagccaagtggaagtatctcgttcctgtagtaatggaaggtggctgggtgaaaaattctcatggaaactcgattcagggagatggatatgccaattatgcagaagtacgtcagggtgagtttgatgaggctaaaacagcctgcgtcaatatgatggatttacgctataattcagactttcgtaatggagaaacttattcatggtttaatgaagctttccaattagttaaacaattctgtacagaaggaagctaccgtttatttccggacagaatttctttgcctacaactatctctaatggtaaacagattgaaatagcgcaccgttggaataattttggttggggatattgtccgacgaatattccccagtggaagaataaatataaagtggcttttgctttattggacaccaagaatgataaaccgaagtatgtatttgttgatggagaaccggaagcttgtgattgggtgaaaggtacggctaaatcatatacgtttacaacccgggttgaaggcgtgggggcaggtaaatacatgtgggctgttggtattgttgacacggcaaagcagaatgagattggaattcaccttgctgtgaagaacaatgtaacatctgccggatggttgaaattatttgaagttaccgctcggtaagtcatagtcaattgctacgagatacattaattgttggaaatgaatgtattggcaggtcatagctctccggttcgttggggatatatctccaatgaactgattgtaagtgtctggtacttagttaaatgataagtgcatggaatggctggaataagtatctgcttacgtattgcctgatatacatctgaaaactagaaataataattaactgacgaaaacattgatgagaaaaaaagttttgattttgggattgtgcctattgggagtcacacattctctttcgtcaaaagataaaaagagtattcctttgtataaggatgccaaagctccaattgaaaaacgtattgatgatttaatatcgcgtatgacattggaggaaaaggttttgcagctaaaccaatatacattgggacgaaataacaatgtgaataatgttggcgaagaagtgaaaaaagtaccgtcagagattggttctttgatttactttgatataaatccagagttgcgtaatagtatgcagaaaaaagcgatggaagaatctcgtttgggcattcccatcatttttggctacgatgctattcatggatttcgcaccatatatcctatctcgttggggcaggcctgttcatggaatccgggattggtagaacaggcatgtgcggtatctgcacaagaagcccgcatgtctggggttgattggactttttctcccatgatcgacgtggcacgtgatcctcgatggggacgtgtagccgaaggatatggtgaagatccttatacaaatggagtgtttgccgctgcttcggtgcgtgggtatcagggagatgatatgtcagcagagaaccgtatggctgcttgtctgaaacactatgtaggttatggtgcttcggaggctgggcgagattatgtttataccgaaatttcagctcaaactctttgggatacttatctgctgccctatgagatgggagtgaaagctggtgcggccactttgatgagttctttcaatgacatcagtggagtacccgggtcagctaatccttatatcatgaccgagatattaaagaaacgctggaaacatgacgggttcattgtgtctgac

SEQ ID NO: 8066 - DNA, 13373 bp, Unknown
  gut microbiota DNA sequence
gtagttaaggccgttaaggaagcttgtggtcttggtttgaaagaagctaaagacttggtagacggtgctcctagcacagtaaaagaaggtttggctaaagacgaagcagaatcattgaagaaaacattggaagaagctggagctgaagttgaacttaaataacattggcctggtaatcaggtaattcggttaggaatccttcacaagaggattcttaacctttttgtgtatatatttcaaattaagttctccaaattcattgacagatgtcttcaaatactgtaaatcaaagagttaattttgcttcgactaagaatccgctagaatacccggatttcctggaagtacaattgaagtcattccaagactttctacaattagataccccacctgaaaagcgtaagaatgagggattgtataaagtatttgctgaaaacttccctattgccgatacaagaaacaattttgttcttgagtttctggactattatattgatccgccgcgttataccattgatgattgtatagagcgtgggcttacttatagtgttcccttaaaagcgaaacttaagctttactgtacggaccccgatcatgaggattttgatacagtgattcaggacgtattcctcggcccgattccttatatgactgataaggctactttcgtcattaacggtgccgaacgcgtagttgtgtcacagcttcaccgttctccgggtgtgttcttcggtcagagtgtacatgccaatggtacgaaactttattcggctcgtattattccgtttaagggttcgtggattgagtttgctactgacatcaataatgtgatgtacgcatatatcgaccgtaagaagaaattgccggtgactacattgttgcgtgcaattggcttcgagaatgacaaagatattcttgagattttcgatcttgcagaagatgtgaaggtaaacaagacaaatctgaagaaggtgttaggccgtaaactggctgcacgtgtcttgaaaacatggattgaagatttcgttgatgaagataccggtgaagtggtttctattgaacgtaacgaagttattatcgaccgtgaaaccgtactggaagaggagcatattgatgaaattttggagtcgggagttcagaacatccttttgcataaggatgaaccgaatcagtccgatttctctatcatatataatacgttgcagaaggacccgagtaactcggaaaaagaagctgtgttgtatatctaccgtcagttgcgtaatgccgatccggctgatgatgcaagtgcaagggaggttatcaacaacttgttcttctcagaaaaacgatatgaccttggtgacgtaggtcgttacagaatcaacaaaaagttgaatctgacgactgacatggacgtgcgtgtcctcacgaaggaagatattattgaaatcatcaaatatctgattgagttgattaactcaaaagcggatgtggatgatattgaccacttgagtaaccgtcgtgtacgtactgttggtgaacagctttctaatcagtttgctgtggggctggctcgtatgtctcgtacgattcgtgaacgtatgaacgttcgtgacaatgaagtgtttactccgattgatttgattaatgcgaagactatttcttcagtaatcaactcattcttcggaacgaacgcgttgtcgcagttcatggaccagacaaacccgctggctgaaattacgcacaaacgtcgtatgtctgcccttggtcctggtggtctttcccgtgaacgtgccggatttgaggttcgtgacgttcactatacacactatggtcgtctttgtccgattgagactcctgaaggtccgaacatcggtttgatttcttcattgtgtgtatttgctaagattaatgagctaggattcattgaaactccctaccgcaaggtggaaaatgggaaagtggatctttctgataacggtctgatttatctgactgctgaagaagaggaagaaaaggttattgcgcagggaaatgctccgttgaatgacgatggtacattcgtacttaacagagttaagtctcgtcaagatgcagatttcccggttgttgaaccatctgaagttgacttgatggacgttgctcctcagcagattgcatctattgcagcttctttgattccattcttggaacatgacgatgctaaccgtgcattgatgggatcgaacatgatgcgccaggcggttcctttgttgagaagtgaagctccgatcgtaggtacaggtatcgaacgtcagttggtaagagactctcgtacccagattaccgcagaaggcgatggtgtggttgactatgtggatgctactactatccgtattttgtatgaccgtacggaagacgaagaatttgtaagtttcgaacctgctttgaaggaatatagaatacctaagttccgtaagactaaccagaacatgacgattgacttacgtccgatttgtgacaaaggccagcgtgtgaagaaaggtgatatcttgactgaaggttattctactgaaaagggtgaattggcattgggtaagaacctgctggtagcttatatgccttggaagggttacaactatgaggatgccatcgtattgaacgaacgtgtggtacgcgaagacttgttgacttcggttcacgtagaggaatattcgctggaagttcgtgaaacaaagcgtggtatggaagagctgacttctgatatcccgaatgtaagtgaagaagctaccaaagacttggatgaaaacggtatcgtaagaatcggtgctcgtatcgagccgggtgatatcatgattggtaagattacgccgaagggtgaatctgatccttctccggaagaaaaactgcttcgggctatcttcggtgataaggcaggtgacgtgaaagatgcttctttgaaagcttctccttctttgaaaggtgtggtgattgataagaaacttttctcacgtgtgattaagaatcgtagctctaaactggccgataaagcattgttgcctaagattgatgatgaatttgaatctaaggtagctgacttgaaacgtatcctggttaagaaactgatgactttgactgaaggtaaggtttctcaaggtgtgaaagactatttgggtgcggaagttattgcgaaaggttctaagttcagtgcttctgattttgattcacttgactttacttctattcagttgagcaactggacaagtgacgatcatattaacggtatgattcgtgatctggtgatgaatttcattaagaaatataaagagctggatgctgaattgaaacgtaagaagtttgctattacaattggtgatgaacttcctgctggtattatccagatggcaaaagtatatattgctaagaaacgtaagattggtgtgggtgataagatggctggtcgccacggtaacaagggtattgtatcccgtgttgttcgtcaggaggatatgccgttcttggctgatggtactccggttgacattgtgttgaatccgttgggtgtgccttctcgtatgaacattggtcagatttttgaagctgtactcggacgtgccggaaaaacgttgggcgtgaaattcgcgactcctattttcgacggtgctaccatggaagatctggatcagtggacagacaaggcaggattgcctcgctactgtaagacttatctttgtgatggtggtacaggtgagcaatttgaccaggcagctactgtgggcgtaacttacatgttgaagttgggccacatggttgaagacaagatgcatgctcgttctatcggtccgtactcattgattactcagcaacctcttggtggtaaagctcaattcggtggtcagcgtttcggagaaatggaggtttgggcactcgaaggtttcggtgctgcccatatcttgcaggaaatcctgactatcaaatctgatgacgtggtaggacgttcgaaggcttatgaagcaattgtgaaaggtgaaccgatgccacaacctggtattccggaatccttgaacgtattgttgcacgagttgagaggtttaggtttgagtatcaacctagaataaaataatgaaagaatgtgagatgtcaatgtaccgatgaaggtctgttggcatccgcacttttttcaatttccaatgattcaattatcaaatctcaattatatagagtatggcttttagaaaagaaaataagacgaaaagtaatttctcgaagatctcaattggtctggcttctccggaagaaatccttgagaattcgagtggtgaagttttgaagcctgaaaccattaattaccgtacgtacaaacccgaacgtgacggtttgttctgcgagcgcatttttggtcctatcaaggattatgaatgtcattgcggtaaatacaagcgtatccgttataaaggtatcgtctgcgaccgttgtggtgtggaagttactgaaaagaaagtgcgccgtgaacgtatgggacatatccagctggttgtgccggtggctcacatctggtatttccgttcgcttcctaataaaatcggttatttgctcggattgccgacaaagaaactggattcgattatatactacgaacgttatgttgttattcagccgggtgtgaaagctgaagatggcgtagctgaatatgatttgctttctgaagaagaatatctggatattctggatacgcttccgaaagacaatcagtatcttgaagataatgatccgaataaatttgttgcaaagatgggagccgaagctatttatgatttgctggctcgtttggatctggatgctttgtcttacgaactgcgtcaccgcgccggaaacgatgcgtctcagcaacgtaagaatgaagctttgaaacgtcttcaggtagtagaatcgttccgcgcatcacgtggacgtaacaaaccggaatggatgatcgtacgtatcgtaccggttattccgcccgaacttcgtccgttggttccgctggatggtggccgttttgctacatctgacttgaacgacctttatcgtcgtgtgattatccgtaacaaccgtttgaaacgactgattgaaatcaaggctccggaagtaatcttgcgtaatgaaaaacgtatgcttcaggaatctgtcgattctttgtttgataactcacgtaagtcaagtgctgtgaagacagacgccaaccgtccgttgaagtcattgtctgacagtttgaaaggtaaacagggacgtttccgtcagaacttgctgggtaaacgtgttgactactctgctcgttccgtaatcgtcgttggtccggaattaaagatgggtgaatgcggtattcctaaattgatggctgccgaattatacaagccgtttattattcgcaagctcatcgaacgtggtatcgttaagactgttaagtctgcaaagaaaatcgtagaccgcaaagagccggtgatttgggatatcttggaacatgtaatgaagggacacccggtactgttgaaccgtgctccgaccttgcaccgtttgggtattcaggctttccagcctaaaatgatcgaaggtaaagctatccagttgcacccattggcatgtacggcattcaacgctgactttgacggtgaccagatggctgttcacttgcctttgagtaatgaagcaattcttgaagcacaaatgttgatgcttcaatcacataatatcttgaatccggcaaacggtgcgcctattactgtgcctgcacaggatatggttcttggtttgtactatattactaagttgcgtgccggtgcaaaaggtgaaggtttgacattctacggaccggaagaagcgttgatcgcttacaatgaaggtaaggtagatattcatgctccggtgaaggttatcgtgaaagacgttgatgaaaatggtaacattgtagacgtaatgcgcgaaacttcagtaggacgtgtgattgtgaatgaaatcgttccacctgaagcaggttatatcaatacaattatctctaagaaatctcttcgtgatattattagtgatgtaattaaggtatgtggtgtggctaaggctgccgacttcctggatggaatcaagaatttaggttatcagatggcgttcaagggtggtttgtcattcaacttgggtgatattatcattccgaaggaaaaagaaactttggtacagaaaggttacgacgaagttgaacaagtcgtaaacaactataacatgggtttcattaccaataacgaacgttacaatcaggtaattgatatttggacacatgtgaactccgagttgtctaatatcctgatgaagactatttcttcggatgatcagggtttcaactctgtatatatgatgcttgactctggtgcccgtggttctaaagagcagattcgtcagttgtcaggtatgcgtggtttgatggcaaaaccgcagaaagcaggtgctgaaggtggtcagatcatcgagaacccgattttgtcgaactttaaagaaggactttcggtgttggagtactttatctctacccacggtgctcgtaaaggtttggcggataccgctttgaagactgccgatgctggttatttgactcgtcgtctggtggacgtatcacacgatgtgattattacagaagaagactgcggtacactccgcggattggtttgtacggaccttaagaataacgatgaggttattgctactctgtacgaacgtatcttaggccgtgtttccgtacatgatattattcatcctaccacaggtgaattgcttgttgccggtggtgaagaaatcacagaagaagtagccaagaagattcaggagtctccgatcgagagtgttgaaatccgttcggtattgacttgtgaagctaagaagggtgtttgtgctaaatgttacggacgtaacctggcaacgagccgcatggttcagaagggtgaagctgtcggtgtaatcgctgctcagtctattggtgagccgggtacacagttgacattgcgtacattccacgccggtggtactgctgcaaatattgcagctaacgccagtatcgttgctaaaaataatgcacgtcttgaatttgaagagttgcgtacagtagatatcgttgacgagatgggtgaatctgcaaaagtggtagtaggtcgtttggccgaagtacgttttgtggatgtgaataccggtatcgttctttctactcataacgtaccttatggttcaacactgtatgtaagcgacggcgacttggtagaaaaaggcaaactgattgctaagtgggacccgttcaatgctgttattatcacagaagcaaccggtaagatcgaatttgagggcgtgattgaaaacgttacttataaggttgaatcggatgaagcaacaggtcttcgtgaaattattattattgaatccaaggataaaaccaaagttcctaccgctcatatcttaacagaggacggtgatttgatccgtacttataacttgccggtaggtggtcacgttatcatcgagaacggtcagaaggtaaaagccggtgaagtaatcgtgaagattccgcgtgccgtaggtaaggcgggtgatatcacgggtggtcttcctcgtgttactgaattgtttgaagctcgtaacccgtcaaatccggctgtcgtttctgaaatcgacggtgaggtgacaatgggtaagatcaaacgtggtaaccgtgaaatcatcgtaacttccaagacaggtgaggttaagaagtatctggttgcactgtctaagcagattctggtacaggaaaatgactatgtacgtgctggtactccgttgtctgacggtgctactactccggcagatatcttggcaattaagggtcctacagctgtacaggaatatatcgtgaatgaagttcaggatgtataccgcttgcagggtgtgaagatcaatgataagcactttgagattatcgttcgtcagatgatgcgcaaagtacaaattgatgaaccgggagatactcgcttcctcgaacagcaagtcgtagacaaactggaattcatggaagaaaatgatcgtatctggggcaagaaagtcgtagtggatgctggtgattctcaaaatatgcaagctggacagattgtaactgcccgcaagttgcgtgatgagaatagtatgttgaaacgtcgtgacttgaaaccggttgaggttcgtgacgctgttgctgctacctctactcagatccttcaaggtatcacgcgtgctgctttgcaaacatcaagctttatgtcggctgcttccttccaggaaacaacgaaagtcttgaatgaagctgctattaacggtaagatcgataagcttgaaggtatgaaggaaaatgtgatctgtggtcacttgattcctgccggtaccggacagcgcgagttcgaaaagctcatcgttggatcaaaagaagagtatgaccgtatcttggctaacaagaaaacagtacttgactacaatgaagtagaataaatacaattcaattgactatatgaaaaggagcagttgcctgattgggcaattgctcttttttttatttcttttttactcgcgtgtattaccattagtttcaggaaaaatgtgttattttgcaggataactttttaatcatattaaatatggaagaacaaaataacaacggacaattacagattgaattgagagaagaggttgcacagggaacttatgcaaatcttgctattattactcattcgagttctgaattcatccttgacttcgtgcgcgtaatgccgggcataccgaaggctggtgtgcaatctcgtattattgtggctccggagcacgcaaaacgtctgctgcgggcattagaagataatatagcaaagtatgagcgcgtattcggtccgattcgtacttcggatgaatcccctatttctcctttgacgggtgtaaaaggcgaagcgtgaggatgatataaaaacattaaaaaagaaaaaaaagttgtagcgcattgaatattcaaatattattcgtatttttgcagcccaaaatgtatagttacgaaattaatataacaataatataaatcaaaaaacaattaaaatgcctacaattcagcaattagtaagaaaaggacgcgaagtgctggtggagaaaagtaaatctccagccttggattcatgtcctcaaagacgtggcgtttgcgtgagagtatacactactactccgaagaagccgaactctgcaatgcgtaaagtagctcgtgtacgtttgactaaccaaaaagaggtgaactcatacattccgggagaaggacacaacttgcaggaacactcaatcgttttggtacgtggtggtcgtgtaaaagaccttccgggtgtgcgttatcacattgtacgtggtacgcttgatacagcaggtgttgctggtcgtactcaaagacgttctaagtatggtgctaagcgtccgaaaccaggacaagcagctgctcctgctaagggtaagaaaaaataaggattaagacctaattaaaattaaagtaataacttacgttttagtttgttggaaatgctaaaggttgagtaaattctccggagggagagttgaagaagtcaagaagtagacaaccaagaacaaaaacattatttttcaaacaaatgagaaaagcaaaaccaaaaaaacgcctgattcttccggatcctgtgtttaatgaccaaaaggtttccaagttcgtgaaccacttgatgtatgatggaaagaaaaatacatcttatgaaatcttttatgccgctttggaaacagtgaaagcaaaacttcctaatgaagaaaaatcagctctcgaaatctggaaaaaggctttggataatgtaactccgcaagtggaagtaaagtctcgccgtgtaggtggtgctactttccaagttcctactgaaatccgtccggatcgtaaagaatcaatctctatgaagaatttgattctgtttgctcgcaaaagaggtggtaaatcaatggctgacaagttggctgctgaaattatggatgccttcaatgaacaaggcggtgcatacaaacgtaaagaagatatgcacagaatggcagaagctaaccgtgcatttgctcattttagattctaatactgtaagaaacctaatataaacttaaagtaaaggaattagaagatggctaaacatgatttacatttaactcgtaatatcggtatcatggctcacattgatgccggaaaaacaactacttctgaacgtatcctgttctacactggattgactcacaaaattggtgaagttcatgatggtgctgctactatggactggatggaacaggagcaagaacgtggtatcactattacatccgctgctacaacaacaagatggaaatatgctggtgatacttataaaattaacttgattgacactccgggacacgttgactttaccgcagaggtagaacgttcattgcgtatccttgatggagctgttgctgcttactgtgctgttggtggtgttgaacctcaatctgaaacagtatggcgtcaggctgataaatataacgttcctcgtattgcttatgttaataagatggaccgctctggtgctgacttctttgaagtagttcgccagatgaaggatgttcttggagctaatccatgtcctattgttgttcctatcggtgctgaagaatctttcaaaggtcttgttgatcttatcaaaatgaaagctatctattggcatgatgaaacaatgggggctgactacagtattgaggaaatccctgcagaacttatcgatgaagccaatgagtggagagataagatgcttgaaaaagttgctgaatttgatgatgctttgatggagaaatatttcgatgatccttctactattactgaagaagaagtattgagagctcttcgtaatgcaacagttcagatggctgtagttcctatgctttgtggatcttctttcaagaacaagggcgttcagacattgcttgattatgtttgtgctttcttaccttctccacttgatacagagaatgtaataggtacaaatcctaatacaggagctgaagaagatcgtaaaccaagtgatgatgaaaaaacatcagctttggcgtttaagatcgcaactgatccatatgtaggtcgtttgactttcttccgtgtctattcaggtaagattgaagcaggttcttatatctacaactctcgctctggtaagaaagaacgtgtttctcgtctgttccagatgcactccaacaaacagaacccggttgaagtaatcggtgctggtgatattggtgcaggtgtaggctttaaagatattcgtactggggatactttgtgtgatgaaacagctccgatagtacttgagtctatggactttccggaaccggttattggtatcgctgtagaacctaagactcagaaagatatggataaactgtctaacggtttggctaaattggctgaagaagacccgacatttactgtgaaaacagacgaacagacaggtcagacagttatttctggtatgggtgagcttcacttggatattatcattgaccgtttgaaacgtgaattcaaggtagaatgtaatcaaggtaagcctcaggttaactataaggaagctatcacgaagacagttaacttgcgtgaagtgtacaagaagcagtctggtggacgtggtaagtttgctgatatcattgtgaacattggtccggctgatgcggatttcactttaggtggtttgcagtttgttgatgaagtgaagggtggtaatattcctaaggaatttatcccagcagttcagaaaggctttacaaatgctatgaagagtggtgttttggcaggctacccattggattcattgaaagtgactttggttgatggttcattccacccggttgactctgatcagttgtcatttgaaatctgtgcaatgcaggcttataaaaatgcatgtgctaaggcaggtcctgttttgatggaacctatcatgaaactggaagttgtaactccggaagaaaacatgggtgatgttatcggtgacttgaacaaacgtcgtggacaggttgaaggtatggaatctagccgctctggcgctcgtatcgtgaaagcgatggttccactggcggaaatgtttggttacgtaacagctttacgtactattacttctggtcgtgcaacctcgtcaatgacctactctcatcacgctcagctttcttcttctattgctaaggctgtattggaagaagtaaaaggacgcgctgatttactctaaaatatctaaagcagcaggctagcgaatgactcttagcctgccgctttatcttattataaatgtattaattaaaaaaaataatgagtcagaaaattagaattaaattgaaatcttacgaccacaacttggttgacaagtcagctgagaaaattgtaagaactgtaaaagctacaggtgctatcgttagcggtccaatacctctgcctacgcacaaacgtatctttactgtgaaccgttcgactttcgtaaacaaaaagtctcgtgagcaatttgaactctcttcttataagagattaatcgacatctatagctcaacagctaagacagtagatgctttgatgaagttggaattgccaagtggtgtggaagtagaaattaaagtttgataattaaaaattagtgaaatgccaggattattaggaaaaaaaatcggaatgacatccgttttcagtgccgatggtaaaaatgtaccatgcactgttatcgaagcaggtccttgtgttgttactcaagttaaaactgtagaaaaagatggctatgcagctgttcagttgggtttccaggacaaaaaggaaaaacatacaactaaaccgttgatgggacattttaaaagagcaggagtaacaccgaagagacacttggctgagttcaaagaatttgaaacagagttgaatttgggtgataccattactgtagaaatgtttaacgacgctagctttgttgacgttgttggtacttctaagggtaagggttttcagggtgtagtaaaaagacatggttttggtggtgtgggtcaagctactcacggtcagcataatcgcgctcgtaaaccgggttctatcggtgcttgttcttacccagcaaaagtattcaaaggaatgcgcatgggtggacaacttggtggtgacagagtcactgtacaaaacttgcaggtattaaaagtaatcgcggatcataaccttcttttggttaaaggttctatcccgggttgcaaaggttcaatcgtattaattgagaaataatggaagttaacgtatataacattaaaggtgaagacactgggagaaaggttacgttaaacgaatctatcttcggaattgagcccaacgaccacgctat

SEQ ID NO: 8067 - DNA, 9879 bp, Unknown
  gut microbiota DNA sequence
ctgcgaatcaagtccgttttgtactctatgaatagcttccaaagctttatttaaagcttcgtaatgccttacatttgtcacaataatatcattttgtgtcactgtaggcaagtgtgcggtgtcaataagcattttttgcagttcacttgtgttctctcgttgtttggccgagatgaaaatagattccgtagcttctttagaaaagtcttttaatagagactgtaaattctctttttgcttgtcttcgattaaatcagccttattgaatacaacaatcaaatgctttccttcacaacgcggaataatcttctctgataactgttcgatttgagaggcagcattcacggcatctaccatccaaaggacaatctctgcctgatctaacttttggaaagtacgttcgataccgagactttcgatcgtatcattggtttcccggattccggcagtatcaatgaatcgaaaagtgattcctccgatgttgatagtatcttcgatcacatcacgcgttgtcccgtggacatcactgacaatcgctttgtcctcattcaataatacattcagtaaagtcgattttccggcattcgtttcaccgataatagctacagggaccccgttcttaatagcattaccaacactaaaagaatgagccaaccgcgaaatgacctgttcgatttcatctgctagcttccttaatgctgaacgatcggcaaattcaacatcctcttcgctgaaatccaactccagttcaatcatagaggtgaaattcagcaatttgttacgtaactccgtcaattctctgctgaaaccacctcgcatctggctcatagccaaacgatgggtggcagcagatgaagaagcgatcaagtccgccacagcctctgcctgacttaaatccatctttccattgagaaaagcacgttgtgtatactctcccggttgggccatgcggcaaccgtttttgataagcaactgcatcacctgttgaagaatataagaagaaccatggcacgtgatttccgtactatcttctcctgtgtatgaatgaggagcacggaaaagactgacgagcacttcgtcaataatctcgtccccgtcataaatacgtccgaatgtcaaagtatatggtttttgctcactcaataatttgccagtcttggtgggcttgaatatgctgccggtgatagaaatagcttccggaccggaaacgcggatgcttccgatagcaccgccctgggcggtagcgatagcgcagatcgtatcttgattcattgttttttctttttggatgagcaaagataattgtttctaagtaaaaaatggaaaattgagcacaacttgtgctttatttgtttatatttgctgccgtgcagtggtacaccaaacaaaataaaacaataatgcttatggaaccagcgatcaatttatattctccgaatgagaaaagcgaactcatacgggaaaactatcaggaaatactttctgtgcttgcagcccatcaaatagctttatgggagtatgatatcattacgggcaaatgctccttttcagacgattatttctctacactcggattgaaggataccggaatcatttttgaggacattgatgatttttatcggtttatccatccggaagatgctgaatcctatcaacaggcatttgcagaaatgctttcatcagagtctaagacctcacaaataagagttcgttgtatgggcgaacaaggggaagtgatttggctggaagatcattttctgtcctacaaagaaagttgcaaaagtcatccgggcaaactgctggcatatacggtgaacgtcacctcacaatgcgaaaaggagcaacatatcaaatatctggaagaatacaaccgtaaaattattgaagcactgccggaattcatatttatctttgatgataactttttcattaccgatgtcctgatggcaccggggacaatcttgcttcatcctgtggaagtgttgcgcggagcagacggacgatctatttattcaccggaggtcagtgacctgtttctttgtaacatccgggaatgtttgcgtgacggtaagttgaaggaaatagaatatccccttgaagtggatggaagtctgcattattttcaggcacgtatcgccccattcgaaggaaacagagtacttgcgctgatacatgatatcggagaccggattcagcgttcgcaggaattgatcgaagctaaacgtcgtgcggaagatgccgataagatgaagtcggtctttttggcaaatatgagccatgagattcgtaccccgttgaatgctattgttggtttctcggagattatcgcggtgacagagagtgaagaagaaaaaatggagtatctggaaataatccagagaaacagtaacttgttgttgcagttaatcaatgatattttggacttgtcccgtattgaatccggaaagtcggagatgcatttccaacaggtagagattgcaagtttggtggaagaagtggagaaagtgcaccagttgaagatgaagtcaagcgtagagttgaatgtgattcgcccggaaggagaatactggacttctaccgaccgaaaccgggtgatgcaggtcttgttcaacttcctttcgaatgccattaaaaatacggaaaagggaactattacattagggctgaaacatgaaggcccctggctgaaactatttgttagcgatacaggttgcggaatatccaaagagaagctcccgcaaatttttacccgttttgagaaactgaatgacttcgtacaaggtaccgggctgggactctcaatctgtaaaagtatcgtggaacgtctgggcgggcgcatcgaggtaacttcagaattggggcaggggagtacgtttgcactctatttgccttatcaggaagtaccgaaagaagttgttgaaagaagacttccgcataaaaaggatgttgaagcggataaacgtaaaaagatattggtagtggaagatatagagtcgaactttgctcaactaaacattcttctgaataaagaatatattatctcatgggtacgcaatgggcaggaggctatcaatagtttcatccgtgaaagcccggatttgatactgatggatattcgtatgccggtgatggacggtattcaggctactgaaaagatccgtacgatttctttgaccgtgcctattattgcagtgactgcgtatgctttctataccgaacagcaacaggctattcaagccggatgtaacgccgttatttcaaaaccctattctttggagaggctaagagagacgatagaatcttatatcggataattaattttctaaaagagaaccaacattctgaatattgtagtgttactattataatagtagtaacattataatagatttgaatatggagaaagtgaaaaagatagtccttatcggagcaagtggctttgttggttctgctcttctgaatgaggctttgaatcgtggtttcgaagttacagcagtagttcgtaatccggaaaagataaagatagagaatgaaaatctgaaagtggtgaaagccgatgtagccgtgcttgatgaagtggccgacgtttgtaaaggcgcggatgccgttgttagtgcgttcaatccgggatggaataatcctgatatatacgatgaaaccattaaagtttatctgactataattgatggagtgaagaaggctggcgtcaatcgttttctgatggttggtggtgccggttctttatttatcgctccgtgcttgcgtttgatggattccggcgaagtgcccgaaaatatattgccgggagtgaaagccttaggagagttttatctgaacttcttgaagaaagagaaagaaatagactgggtgttcttctctccggcagcagatatgcgtccgggagtgcgtacaggacgttatcggttgggaaaagatgatatgattgtagacatcgtaggaaacagccatatctctgtcgaagattacgctgccgcaatgattgatgaattggaatatccgaaacatcatcaggagagatttacgattggttattgataaaaaatcagattaaaaataattgtgtgataaagtgacgctatccttctcggataatgtcactataatcgtattatagcgttactatcacggcgtcatagtgatactatgttgaagataggctaaatgataaaaatggactgtctaacaagtcccttattaagaatttcccccacgctataactatttgtagcgtgggggaatttcaatatttagaactcgttaggcagctctataattctattctaacgattacatttttattctttcagaagaacgtagctctatattctgtcaagtacagttttaatcagtgtatcaattgtatttttatatcctgtattggcctctttaataagtcggttggctatcaccatgcagacggtcatagccttgtgccccatcaaccggctaagtcctgccaaagccgaactttccatttcgaagttggtaatcttatagcctttatattcgaaagattcaattttatcattctgtttcgggtctgccaatggaacacgaagttcacgtccctgcggaccaaagaaacctccggcagcgattgttactccacgtaccatgtcctctttggcaatccggtcaatcagttcttcgctggcatcaatgacataaggagcaggcgcgcacatatttcccgaccaacccatgtgattgaggaacgcacgctcaaaaggtaagtcgcatacagcatttcgtccggcatagaaattcagcaatccgtcaaagccgatagacttctgcgaacacacaaatgttccgacaggagtgttgggctgtaagccgccacatgtgccgatacgtactaattccagctggcggaactgatccttttcttcgcgggtattaaaatctatattggcgagtgcatccagttcattcatcacgatgtcaatgttatcgcaaccgattcctgtagaaaccactgtaatccgtttacctttataagtacccgtgatggttttgaattcgcggctttccacttcacattctttgttttcgaaatgagaagctacgagtgctacacgtccggggtcacctaccagaattactttgtctgccaaccattcgggctttacgtgaagatggaatactgaaccgtcttcattgataatcaattcagaggatggaaagtactttttcatgttattgaagggttttagttttataataggatttgtatctataaatagaaacgccggaaccggatttaagttcagaagaagccactatctttttcctttagaaaaggggagtgcgtcttacaactgaaatgaaatcggattccggcgtttgtgaacgattatttgctcaatggctgattgcctgcattgcccgttgccggcttggcgatattctcgcgcatggaggtgtcagcttcaatattcttcatgcgataataatccatgatgcctaggttgccgctgcggaaagcttcagccatcgctttaggcacttcagcctctgcttcgatcactttagcacgagcttcctgtgcttttgctttcatttcctgttcggaagcaactgccatagcacgacgctcttcggcttttgcctgtgcgatgttcttatctgcgttagcctggtcaatttgtagagcagcaccgatgttcttacctatatcgatgtccgcaatatcaatagacaagatctcgaaagccgttcctgcgtccaaacctttacgaagtacaagtttagagatcgaatccggattctcaaggaccgatttatggttttcagaagaaccgatagatgaaacgataccttcgcctacacgggcaaggatcgtatcttcacctgcaccaccgaccaactgacgaatgttggcacgtaccgtaacacgtgctttggctatcagctgaataccgtcttttgcaacagccgtaacaggaggtgtgtcgatcactttcgggtttacagacatctgtacagcttcgaatacgtcacgtcctgcaaggtcgatagcggtagccatctggaaaggtaattcgatattcgctttcgatgcggataccaaggcgtgaaccaccttttctacatgtccgccagccagataatgggcttccagttcatcacgggtaatgtttttcagaccggctttgtgagcctcgatcattcccggcacgatgatgtacggcggaacgttacgtatacgcattaaaaatagttgtatcagcgagatgttaactcccgacacttttgccgacaaccagaggaagaacggcacgtaatggaaaaatattatcaagaagataatacctccagctatcagaaagataggcaagtagaaagatgattccattgatgttattattaagtgaatattattctttgtgtttttcaaccatgattgtaccgtcggtgatgcggcttacaataatcggagtcttttcattgaggaatccgtctattgattttacttccacaatttttccgtttatttcggcataaccgatttgtgccagacgtgtggtactgattcctgtatcacctactttaacgctgtcttctgcgctacggtctactttcgaatcaatatcctttttcaatgccagtttgtccagcatcttcgatcgcataaaccaaatcaatgatccgatgcaggcaatcgccgatatgccaagagtgataaatcctcctgccatgcctaaattggcaaatgcatagtagttggcataaagaatgcaaaccaatgcagaaattccggccaggctaatgcccgggatgacgaacagttctaccagaaacagtatgactgcggcaataatgagaacggcgataatgagtatatccatagttcagagttattaatttattttgttttttctgcattgcgtacattcacttcgagagtatccagctcttcggacatttgcagtacccgcttttcgaggtcgaggatagcaggagccattttctcttttccctgttggttggcaccggcatattgttgacgcaggctattcagcttttcttcttgctggtaatagtctttctccatctgctggtaacgctggaaaagtgactttgcttttgcggatttaaagtcgctcatcagatagtaagtcgtatgatcgtcaatgacaaattcaaagtccatcgcacgacgttctttaggcttatgactgatggcagcttccagacgttgcaatgcttcggttacagcttgtttgtctttccaggtttctttcagcgaatgaatctgtgccagacgaataatctgttgctgttccattgcttcataattataagtctgcttggaagtgttaggaatgaacacataaatacatacctttccttcgggttggaaacggtcggaagcaaaccatccgagattgttgtattcgtcaatgacgtacatataatcattgtacggtgaattgaacggcatacctacattgtccggaacaagataagtgtcggtattcgtgttgtaacgggtgacaaagatgtcgtagccacccagtccttcaccatcgctggcatagtaaaccgtgacgccgtccgatagaacgaacggataatttgcgtttccggaagcgttgatgctacccggtaacgggcgtccgtcactccattcattcagcaatttgttttttgagaagatgtcaagattaccgttctcgcccttttcgctataatagattttatttccaatttctgtttcatagacagttcccggatgatctccttctgtcttgaaaaaatcattgaaggtaaacaatttacccgattcttcactaattttgtatgcatggaggaaagtcgccttgtctacaacgaagctgtcaatgatacatacatcttccactcccttcaacatccggaggtcagctttgctcttttccagaagtttctccgcttcttccgtcgatttcttccgtttgcttaaatctgcgatatattcttcaaaacagtttactgcatcttcgaaacgatacgtttcattatatgcttgtcccagatagagttgtccactggtaacacgttttttcactgctatctcaagaggtttcacagcttcttccgcttctccggttttcaggcaacatacgccataccaatagttataattcccgttcgacggttgtgatttagcatactttttgaagacaggcttggctttttcatagtcacccttagtgaatagggtgcgtgcctgttccagcgtttgtgcagatacttcacaaaggaagaggctgcaaattaaaaatagaatatattttcctttcatcgttttgagcgtttatgagtgacgggtagattgaaaacattactgctttcgggcaccggtccatttatcaattgttcaaaagtacaaatttattagaaataaaccctttttcagtgattctattatgttaattcttctttaaatcattcttttcgcttacttttgcagccgattttcaaagatatgacacaatttacggaagaagagaagaccattcgccgcattgaacggcggtttagcaaaggagtggtgcaatatggattgatagaagaaggagacaaaatccttatcggactgtcaggaggaaaagattcgttggcgcttgttgaactgttgggtagacgcgcacgtatctataagcctcgtttttctatcgttgccgttcatgtagtgatgaagaatattccttatcagagtgatacggaatatttgaaagcgcactgcgaggcgtatggagttccctttgtacagtatgagactgcttttgaccctgctaccgatacacgtaaatctccctgcttcctctgctcatggaaccgtcggaaagctttgtttactgttgccaaggagcacggatgcaataaaatcgctctcggtcaccacatggatgatattctggaaactttattgatgaatatcacttatcagggagcattcagtacaatgccgccccggttggtgatgaagaagtttgatatgacaattatccgtccgatgtgtctggttcacgaagctgatttgatagagttggcagcgttgcgccattatcagaaacaagtgaagaattgtccctatgaatcgcagtccagccgcagtgatatgaaaggtgttttgcgacaactggaagcgatgaatccagaagctcgttatagcctttggggcagtatgactaatgtacaggaagaattattaccagataaaatagattaatttgaataggttattatgaaaggattctataccattttgttgctgatcgtatccaatgtctttatgacattcgcctggtacggacatttaaagatgaaacaggagtacagttggttcgctgctcttccgctgatcggtgtgattgcgttcagttgggcaatcgctttttttgaatattcctgtcagataccggctaatcgcatcggctttataggcaatggaggcccgttttcgttgatgcaactgaaagtcatccaagaggtgataacacttgttatttttacagtgtttactactatcttctttaaaggtgaagcgttacattggaatcatttggcggcgttcgtttgtttgattgcggcggtgtatttcgtgtttatgaagtgagtcctttttaaagaatataagattataggataagtgctatacttgctagacttatcctattttcgtattacttgatagatttaaaaaccttatcaatgcatcgcttcttctgttccatgtttggatgaacatagagatttaatgtagtagcgatatctgaatgtccaagtattacacttacagttttgtagtcgcaattgctttcaatgcaacgtgtggcgaaactgtggcgcgcacagtggaatatacac

SEQ ID NO: 8068 - DNA, 13809 bp, Unknown
  gut microbiota DNA sequence
atcagtactgttatcagctgttgcacgagtcatcatctttgcgcttgatgcaggggcagtaacaatcaatacattttcttttccagcttccttagagaatttagcactccatccttctggagcagtaatcattgtattttctactcctctcatggtcatggtaaattctttcgtttcacctgcagaaaactcttgtatttgttctaaatcttcagccgcaaaactacattcaaagtcgctgatgatagggatacgtatggttggagcatcctcacccgcaagtactaagaccagttcgttgttttctactgttacactcttgaagtttttgtcttctgccggagcggaaccgtcaccagttgcgctgactttgtcagtagttccttctttgtatatatattcatagttttttccttcatcatagctaacctgccagtagccttcactatctacattaaatgtaggagtcttgccactctctccattagctttcacaggttgtccgtttacagtcagacgctccggagtttcatttttgttgtaaagaacagtccagtagccttctgaatcgataccgataatagggcataacaggttattatcgtttttcatatatagatttactgtttttccattgctcaaagtgagtgtgtaggaatcagacttttcctctatattagtaataaatgttccttcattataaagttcgcgaagagcttctgtgttactatttatatcacgtacttgtgtctcgagtgcggtaacgcgctttttcagtgcgtctacatcatcttccaaatcgtcaatgttggtacatgctaccaggcatacagccaataacatgaacatactccatacttttttcatgattatattgttttaaagttattattttaaagaggatagccaggaaggaacatatcccaaacgtttacgtaattgagcctcatagagtgaatatggttccacagcagttccgttactttcgagtcgcttcatttgagtagcatcaaaatctaaaggacttccgtggaaaccgacaatgataggaggcataaatttccaccaaaagccgttactatcccaccaggtaaatttaccttctgtatcgatgtcctgatctgtttgtacatttgttgcatagaaattccatattgtcagattctccatgtgatttggcatttgagcagagtctcctccttgtctccaatgcatgaaaccgccagtacagcagtcaattaatgttgcacgtggctgtgtggcatgtgattcaaagcaagaatcatctccccatttcacattccatattacagcacccatgctttgctttgaaacaccgcaagcgtgatattgaccaacgttcgttttatattccagcaatgtgctttcaccctctccttttctaagtgtgtagccattgctgttttcggttacttttccaataaagatacgggaagaagcttgcgagcggatagaagcatgtccacgattaccaccaatagtgatgtcataagcagaacaattggcagagtttgtgattgacatggcttcactaacactttcaaaattaacccgacgcatccacgaattggtcagacgtacaaaatcgatgagcttaaaaccaccatcgtcaatgtcagagccgtggtgaatgaacttctctttggcatgtcctttaaatgtaaggtcttctacgccaacattggcataattggtgaatttatgtacattccatccccaatctttattaatagcatgcatgatgggttctttaaaggtaacactgttaccactaatcttttcaatctgatggtattcgaatatttgaataccatttgttttgatattgggagtaatgccttgttgtaccttaatatcttgccattggtaaggagatagttcggaattaataacatcattatccgtgtttcccaactctggggttcccagtacgagacatacccaactgcctgcacttactcctgttaaactggccgttatggttttgctgcctatgggagcatcttcagtgatagcaccaattgattcttttaatcctgtattatgtttgaattccatcatgacaggagcattccacatttcttcagttggtttgggagaattatttgcagcagtcatttcgagtgtcgttttgttttttccggccccttttaaaacaatattactcatcgatatacgaatcctgcgatctttagatgcttcgtcttgtagaatataattcccttccgggaagtagataatagctttagcgttttccttaatatatcgatctgtcatattattgagatcttcttgctttgtttcacttgctatttcttccaataccttcatgaaagctgctctgtcagatttaccgtcgtttggaatagctccatatttgggatctgtaacatcgtataccttatatccttgtgctattaatgtttctatttcaggaggtgctatttcaccatgtttatatccggcgtatgaaaagtccaataatacattctgttgatcttcgtttacaaattgttgccaggcttctgctccggcttcattggaaagttgtttcacttcaatagaaacaatacggatataattctttgatgaagtaagtacaatcttaattgtttcttctacgtcttttacaacagttgcttgtggtgtgatagttaataagttctcggataaaagaacatcccatcctttaggagcttgtattgcagcttgttgtacgtcattctgttctattttatactctttatggctctcattgggggcaaaaacttgcacagcttgttcactgtcagcatcattgagaccataaatgatcagtccgaagctgtcgtctacagggaaagtatatgttttttcaccatcggccagggtgaatgagaaagtatggtttgcttcattatattctaccttactgaatatgctggttcctccctgacttccaccttcggccttagttcctaagcttgtatatgtttgtccattatcgtagctcacttgccaatatccactggaagatacgctgattaatggagttgccaccatattgccttctccatcacggggccatgctgatactttctctccatcggctcctggcaggtatttgaaatctgtatcattacttgttttatatatccagtagccttcttcgtctacggaaaattcagggacagacgcttgtactgcttcactctccatgattttaatgcttgttccgtcactaagttccagcaaatatcctaagccatctttagtcggagtaattccgataatgattttgtttttttgcataagggcttgcagactggcaaatgaagtattcagtccttccgttgctttttccaaagcagcgacacggtctttcagagaattgatgtctgcttccaggtcgtctgttttttggcatgattgcatgattgccaacatgctgcaaataccaaatagtaataggtaggtaatgctcctgtttttcatacatttattatttcgggttatttataattttcacagtggcaaagataaccggataaaataagagtatatggataaaaaaattcaggaatacgatgaaataatacattttacacacctctgtgatagattgaggctttatgtattattagagcaggtctacccattgctcattgcttaatataggcaatgactcactgtcggcaacaaatgtttccgccagttttcgtttctcatcttgcagatgcagaatcttttcctcaatgctgttttgtgtaatgaagcgataggcaatcacctgcttgtcctgaccgatacgatgggcacgggcgatggcttgcgattcggcggcaggattccaccagggatctatgataaatacatagtcggcttgtgtaagattgagccccacaccccctgcttttaatgaaatgaggaatgcttgaacatctttttgctcggtgaaatgggcgatttcggaaggccggttgttggttgctcctgttaatagggcatatttccagcctcgttctcggaaagcttcagccaagacctccagatgtttgacgaatgaagagaaaattaggactttgtgtccttcgctttgtaatgtatcgaatgtttcgattatctgtgcggtttttccggatgttccggtataatcaggaagaatgagttgcggatgacaagagagttgccgtaaacgcaaaatgccatttagtacactaaacgaatggagcctgttcgtactttgagagtgctggagaagtatgtttcgcaggctgtttttctcctgctcgtaacacgtgttctgctcttcagtcatgtcgcagtagattgtttcttccgtaagttcaggaagttccggagctacctctttcttgcttctgcggaggatgaatggggcagtcagttgttgcaactgcattcgtacgcgttcgttttcctggcgaatcggcattatgaactgcttttggaaagcactttccgtgcccagtaagtccggttgtataaaatgaaattgagcccacaggtcctttaatgagttttcgataggagtacctgtcagtgcgagtcggtgtttgctttgcagttgaattgccgaccggaaggtgagcgattcgctattcttgatattctggctttcatcgagcacgacgtattcgaaacggtaggaagagagtatatcaatgttgtttctcatcatgccatacgtagtaaagatcaagtgaaaatgaccgaagaatttttccggacgtttcttgtctatagccacggtgttgttgtattccatcattgagagccctgtaaagcgcttggcttcccgtcgccagttgtgaagtagcgatgtggggactacaattagggtagcgggttgtttgggagcggatggcttatatatgtactgtagcagggtaagagtctgaagcgtcttcccgagtcccatgtcatctgccaggcatccgccaaatccttgtttatggagatgtaccatccacgagaatcctttctgctgataggggcgtaacgttgctttaagcattcttggtacggcaacgttatgtatttgctgcttcgcggggaattttttcactccatcctcacccaaagctgtctgtacggcacctataaatgcatgtttcaaccgaatacctttttctgtttgtactcccatctccagtaagttcgcatatttgctgaaccactcttcaggcaggagaatcatacgcccgtcaggtagcagatattcccgcttttcttcgaggatatgtttgcggaaacgtgaaaaaggaatgcgcagattaccgataacaacagtgatgtgcagttcgaaccagtcaacctcatcatcgcagctttgctcgatgcgtatctcatccagacaatacaacgcattccctacattactggtaaggtgaaaggattgctgcaacatctcccgatgattgttgatccattcgacaattgtcttttccggagctttggcagatagttggaagtgtgtgtcattgagttgttgcagaccggcattcgttaagagttggactgcttgttcttccactgtaatgttacgccggaaaaagccgatttcaccggatgttttccgataaatgattttcttcatttcattagcactatctggtgcaaatgtctggtctccatagcggaagacaagttgcaatgcttgtccgttgtatgtggcatcttcgaatgagagaacagcctcataggtacattcttcttcagtaatattcaaaccgtgagtctcgatatcgtgataacgtgcaatcggaataacgatgttgtctatgtatttttcaatctgcaaagcgtctacgctaatcgatcttttctttgtgaaaggtaagatacgtgcgctttcaatgtgcggaaagaaatataactccattcccaataatagagtggccggcgaggaggtcagtacaactaccggttttaactcactcaaagagaacggttgcccttcataataacactgcaactgataacggaacgttttactgtcaacatgaaacgttacgcgaatttctacgtcgtgagggttgatatgataaatatgatgggcgtataagattttgctaccggcttgtttctgataaaaaggcagtccattttcccgtatcaacgccagcatctccaacagcttcttttcgatgaacgggcgaatattatttttaattcgttccggatcttcggatagcttatgtagaaagcgtgatactgttttttcacgggagtagaggcccatcagatacttttctgtatagtatgaagcgatatcgatagcttgtctttccgcttcgctcattatgctcatagcttccggagaggcgtgaaacgcttgctccactaattgcaaggtgccatcgttcagcctttccgcaatatacggaatcagtaatatgccgagtatcggatgctctgtgaaaacgattataacttgtccgttagttggtctctctttcattctcttttaggctttaactgacaaagatacgggaaaatacttaattttgcagcatgatagaggaaaacaaacgcgtattgcttggaatgagtggcggtacagatagctctgttgctgctatgcgattgctggaagccggttatgaagtaatcggggtaacctttcgtttttatgaattgaatggttcgacagaatacctggaagatgcccgtaatttggcagaacgtttaggaatacggcatataacatacgatgcccgtgaaatatttgcccggcagattattgaatattttgtgcaggaatacctggcaggacgtactccggtcccctgtaccttgtgcaataattacctgaaatggcctttgcttgctaagattgccgatgaaatgggagttttttatattgctaccggacactatgcacagaatatacaactaaatgaaaccttttatataacgtatgccgccgattcggataaggatcaaaccttcttcttatggggattgaaacaggatattcttaataggatgctgttgccgatgggcgatattacgaaagctgaagcccgtgcctgggctgctgaacatggttttcgaaaggtggcaaccaaaaaggatagtattggtgtctgtttttgcccgatggactatcggacctttttaaaagactggttggtcagaaatggtcagatgtcggtcagtaatagtgaggcatcaatcaacaatagtcagacatcgggcagcgataaacagacttggtctgacagaatcagaagaggaagatttgtcgatgaaaaggggaactttattgcctggcatgagggctatcccttttatactattgggcagagacgcggtttgggcattcatctgaatcgtcctgtatttgtgaaagagattgatcctgaaaataatgaagtaatgttggcttctctttcatcgttggaaaaaacagaaatgtggttgaaagattggaatcttgtaaatcaggagcgtactttaggacgctctgacataattgtgaagatacgctatcgcaagcaggaaaaccatggtacgattaccgtcacatcggatcatttactgcacgtgcagcttcatgaaccattaacagccattgctcccggacaggctgctgcattctatggagacggattgctactaggaggaggaatcatagtcaatgcccgttaatcttacatattgggaagatgaacgctctgacgcaagttttttaaaacaaaacttagcttgctaatcgatataactaaggcacggattacacgaattacatggataagtttattctctttccttgtttattcgtgtaatccgtgcctgaaagaaatcggagagttgttttgacgctctctccttatacaagtaacctctgtaatggaaaaaaaacttgtagtggttatgttttggtttttggttattcttccggatgagcgctattattcagcaccagcattgcttctatatattcgcgtgtattgcttaatctgggtactttgtgttgtcctcccagttttcctttctgtgccagccagtcatggaacaatccctgacgggctacgatcacttccaatggttgcaaagcgatatctttccatcgtttggcttcatagtcagagttaacctctttcagcgtagcgtcaagtatcgaagcgaacttttctacggaatccggcattttggcaaattctattagccactggtgcctgcattttgcgttctcatccataaacaccggtgctgcagaatattcgcaaatttgtgctccggtctcggcgcaagcctttgccaatcctttttcagcattatcgacaatcagctcttcaccaaatgcgttgatgaaatgcttcgttcttcccgtgatgacaaacttatagggattcttgctggtaaacttcactgtatcaccaatcatgtatctccacaaaccacaggaagtagaaataaccattgcatagttcttgttgagctcgacttcttcaagacaataagcccgtggattttcttttcccacttcctccaatggaacaaattcgtagaaaattccatagtcgatcattaataacatggcaggatcggaaaggtcgttctgggttccgaaatatccttccgaagcattgtaggtctctacataatgcattttaggtgttgtaatcacctgtttatattgctcacgatacggtgtgaaagccactccaccgtggaagaagacttccagattgggccatacttcttctagtgcctgctttcctgtcttttcaagaacacgtttgataagtaccaacatccacgacggtacaccggacagacttgtcacatttaccggaatagtgctgttggcgattgcttctatcttggtttcccattcgctcatcaacgcaattttcttgcttggtacacgaatgaaattgataagcggatttacgttttgaatcagaatagcggataaatctcctactaaactatgattggaattgaggttcgggctatggcttcctcctagaatcagtcccttgccggagaagaaatggctatccggattgatgcggaaataaagagctgccgcgtcttttcctcctctgtaatgaatatcttccagcgcttccttgctgacgggaaggaatttacttttatcattagtcgttccggaggattttgcaaaccagcgtatctccgatggccaaagcagattctgttccccagctcgcaaacgttctacataaggcttaatttcttcgtatgtctggataggaacacgtttacggaaatcttcatagttacggatagaggaataatcgtactttcttccccattctgtttgagcggcctggcgtgttaagcggcttaacacacgatgctgtatctcactagcctgactagcatataggtctatctgttttaaacgggaatcgaaagtcttactaataatttttgtaatattcatttctgctttaacataataatgtttagtcgtgcaaaagtaacttatttatcttttttttctatctttacgacggaaataatcgttaaaaatagacgactttcatataaatcccgagttttagactaaaaaatgcgacaatgagaattggaatcttaacatccggcggggactgtcccggtattaatgccacgattcgtggcgtgtgcaaaactgccatcaattattacgggatggaagtagtaggtattcacagcggttttcagggcttgctgactaaagatgtcgaatctattacagacaagtcgctctccggtttgctcaatctgggtggaacgatgttaggaacatctcgtgagaagcctttcaaaaaaggaggcgttgtctctgatgttgacaaaccgtctttaatccttcagaatatccgggaaatggaactcgactgtgtcgtttgtatcggcggaaatggaacacagaagactgcggcgaagtttgctgcgatgggagtgaatatcgtatctgttcctaaaaccattgataatgatatttggggtacagatatttctttcggtttcgactcggcagtaagtattgctaccgatgccatcgaccgtttacattccaccgcaagttctcacaaaagggtgatggtgattgaagtgatggggcacaaggcgggttggattgccttgtattccggtatggcaggaggaggggatgtgattcttctccctgaaattgcttatgacattaaaaatattggtaatacgattctggaaagactgaaaaagggcaagccttattctattgtagtggtagcagaaggtattaggacagacggacgcaaacgggctgctgaatatattgcgcaggagattgaatatgaaactggtatagaaactcgcgaaacagttctggggtatattcagcgtggtggttcgcctactcctttcgaccgcaatctttctacccgtatgggcggccatgcgacagaattgatcgccaagggggaattcgggcgtatggtagctttaaaaggggacgatattgcatctatccctcttgaagaagttgcaggaaaactgaaattagttactgaagatcacgatttggtgattcaggggcgtcgcatggggatttgctttggctagtctcctcggcttccatagtaggttgtaccgtagaaatttcattatcggaggtgttttcttctaaaacattctccagttttgtctcgggaattacattcagttcggcttcaagttcattctcaaattcagttgacaattcagtttcagagttagttgcaagttcaaactccggttctgttgtagttgctgaatgttgtgctttgatctcttcgacagttgacataaatacgggttcctttactttctttatagccatttgggcagcattctgttgagactccttcttggaatatcccgtacctgttcctgccggaagtccttcaatgcgtacttcggtttggaagacagggttgctgtcgtgatcgagaaattgctcgattaactcaaaggaaacctccatcttatttttttggctccactcaataagtttggatttgaagttaacctcttttcgggatattttatccaggtcgatataacggttgatgatccgttgctccataaactgtttgcagcgttcatacccctgatccagataaatagctccgataaatgcctcaaaagcatttccgtacatataactgttgtgagaagaagagcgggtggaatactttatgagtttatccaagccgatttcaacggccaacttattcaaagtctcccgttgtacgatcttagaacgtgtgttggtcaggaaaccttcccgtttcccttcaaaacgtttatagacaatatctcctacgatggcgtcgaggatggcgtcacctaaaaactccagccgttcattgttgaggggacgtcccttgtcggagcggacagaagttgatttgtgcaggagagcctgctcataaagttggatattgcgcgggtagaacccgagtatccggtaaaaacaaagataagactctctatccttgcggaacaagagccttatcttatctatttcgttacgtaacacgatattactctgcgtatttcttgaagataacgcacgcattgtgaccaccaaatccaaatgtattggacaaggcaacattaacttcgcgtttctgtgctttattgaacgtgaaattaaggttatagtcgatattctcgtcgttgtcaccttcttcgtggttgatagtcggaggaacaatgccgttcttgatagcaaggatacttgcaatagattctaccgcaccggcagctcccagcaagtgacctgtcattgattttgttgaactgatgttcaactcgaacgcatgatcaccgaatacttccttgattgcttttgcttctgaaatatcaccaaccggagtagatgtaccgtgtacattgatataatctacttctttcggatccatttccgcatcttccagtgcatttttcatcaccaacttcgctcccagaccttccggatgagaagctgtcaggtgatgtgcatctgcagacatacctacaccggcaacttctgcatagatttttgcaccgcgagctttagcgtgttccagttcttccaggatcaggcaaccgccaccttcgcccataacgaaaccatcacggcttgcgctaaacggacgtgaagctttagaagcttcgtcgttgcgtgttgacagtgcgtgcatagcgttgaaaccgcccacacctgccgggaagatagctgcttccgaaccaccggatacaattacgtttgctttacccagacgaatcaggttgaaggcatctgcaatagcgttggttgaagtagcacatgctgaacaagtcgcgtagttaggaccatggaaaccatacatgatagaaatctgtccggctgcaatatccgaaatcatctttggaatgaagaacggattaaacttcggacccatttcctgacgagtgtagtagttgcctacctcttcttcaaatgtatgtataccaccaataccggcgccgaaaataacaccgattttgttcaagtcttctttctcgacatcaagaccggaatcactcaccgcttctttggcaacagcgatggcatattgagtatacaggtccatctttcttgcttctttacggtctatgtatttcgttgcatcgaagtctttcacttcgcatgcgaattgggtcttgaataacgacgcatcaaaatgagtaataggccctgctccactaaccccgttcacaaggttttcccaaaattcgggaacgctgttgccaacgggagtaatggcgccaaggcctgttactaccactctttttaattccatattgatgaaatcgaattacttagcgtgttcttcgatataagatacagcatcacctacagtaccaatcttttctgcttggtcatcaggaatagagataccgaattctttttcgaattccatgataagttctacagtgtcaagagaatctgctcccaggtcgttagtgaagcttgcttcggttgtaacttctgattcttctacgcctaatttatcaacgataatcgcttttactcttgatgcaatttcagacataactttaagtttttaattaataattagttttatttctttaaatttgcggtgcaaaggaatgaatatttatcgttttgcgcaaatatttgactaaataaatgcaaagttttgcacatttttcactgttttgtgcatcgaaattgagggttatgaagaaaaacatcgcaatttttgcttccggttccggttcaaatgccgagaatattatccggtatttccaaaaaaacgattccgttcaggtttcgttggtactttctaataaaagtgatgcatacgttttggaacgtgcgcatcgtttgggagtggcctgtaacgtgtttccaaaggaggactggatagccggagatgaaattttggctattttgcaggagtaccgcatcgactttgtcgtactggctggctttctggttcgtgtgcctgacttgcttttgcatgcttatcccgataaaattataaatatacatcctgcccttctcccgaagttcggaggcaaaggaatgtatggtgaccgggttcatgaagcagtagtggctgccggtgaaaaggaaagcggtatcactatacattatataaatgagcattatgacgaaggaaatgcaatcttccaggctacttgtcctgttcttccgacagattctccggatgatgtagccaaaaaagtgcatgccttggaatatgaacacttcccgcaagtcatagaacaagtattaagaaataagtattaattaagtattactccatg

SEQ ID NO: 8069 - DNA, 9978 bp, Unknown
  gut microbiota DNA sequence
tgagtcaggaaaatacagtgagtacaaaacagaatgtttttcgtcttatctataagtaaaaatatagactggaatgaaaagccgactgaaacaacgaatatttgcactttctctattagcatggacagccgtatgccctgccgatgcacagcaaacacgctcgcttcgcgatcaattcttaagtccttccgatgaagcaaaaccctggaccttttggtattggatgtatggtgccgtgtctaaagaaggcattacagccgatttggaggcaatgaaacatgccggattaggaggtacttatctgatgccgattaaaggtattcatgaaggcgcccaatacgatggcaaggcgcagcagctaactcccgaatggtgggagatggtgcgtttcagcatggaagaagcagatcgtttggggctgaaattgggaatgcacatttgtgatggtttcgcattggcgggaggtccctggattactcctgaagaatctatgcagaaagtggtttggagcgatacgattgtaaacggaggaaagctgatggctattcgcttgccacaaccggaagcctatgaaaactattatgaagatattgcattattcgctttgccggtagaagacgcagcggacgagatgcaggcaaaaattacctgtgtcaatctagccacgacaggaaatataaaagcagctcaaacagtgaatatggatgcggcgggagtgatccgttcttcatatccttgttatatccagtatgaatacgaacaacctttcacttgccggaacatcgaaatcgttttaaatggtaataattatcaggcgcaccgcttgaaagtaatggctagtgacgacggagtgaattatcgtttggttaagcagttggtccctgcccgtcagggatggcagaatacggatgagaactcaactcatagtattcctccgactactgcccgtttcttccgtttctactggactcctgaagggagcgaaccgggaagtgaagatatggatgctgccaaatggaaacccaatctgaaaattaaagaattacgcctgcaccgggaagcccgtctgaaccagtgggaaggaaaagccggactggtatggcgtgttgctcaagcgactaaagaagaggaagtcgggaaacaggattgctattcactttcacaagtcatcaatctaacaaagcaatataccggtcattcgaatggaaaaacattgaccgccactctccccaaaggaaaatggaaattacttcgcatgggacatacagctaccgggcataccaatgcgacagcgggaggtggaaaaggattggaatgtgataagtttaacccgaaaacggtacggaagcaattcgataactggtatgcacaggcatttgtaaagaccaatcccgaaatagctcgtcgtgtactgaaatatatgcatgtcgacagttgggaatgtggcagccaaaactggaataaacgtttcgctattgaatttcagaaacgtcgtggctacgatttgatgccttatctacctctattggcaggtattccgatggaaagtgtcgaacaaagtgaaaagattctgcgagacgtacgtactaccatatcagaactcgtcgtagatgtgttctatcaggtattggcggactgtgcgaaagaatatgattgccaattctcggcagaatgtgtggctccgacgatggtaagcgatggtctactacattatcaaaaagtagatcttccgatgggtgaattttggttgaacagtcccacacatgacaaaccgaatgatatgctcgatgctattagcggagcacatatctacggaaagaatattattcaggctgaaggattcaccgaagtgcgtggcacgtgggatgaataccccggaatgttgaaagccttgttggatcgtaattatgcattaggaatcaaccgccttttctaccatgtatatgtacataatccctggctggaccgcaagcccggcatgacattggatggcatcggactattcttccaacgggatcagacctggtgggataaaggggcaaaagccttttccgaatatgctacccgttgccagtcgttgttgcaatatgggcatccggtaacagacatcgcagtctttacaggtgaagaagtgccgaggcgttcgatattaccggaacgattggttccctctctgccaggaatcttcggtgcagaacgagtggaaagtgaacgcatccgtctggccaatgagggacagcctttacgtgtacgtccggtaggtgttacccattcagctaacatggctgatccggagaaatgggtgaatccgcttcgtggatatgcatacgatagttttaataaagatgcaatccttcgtttggcgaaagcagaaaacggacgaataacgttgccaggtggagcaagttataaagtgttggtactacctctttcgcgtcctatgaatcccgaacctgtgttgtcatcggaagtgcagaagaaaatcaatgaactaaaagaagctggcattttggtgccttctttaccatatacagaagaagatttttccgtgtatggcttggaacgtgacatgattgtgccggaagatattgcctggacgcatcgtcgtggcgaacttggcgaactctatttcgtagccaaccaaaaggacgaaacacgcacgtttactgcaagtatgcgtattaacggtaagaaaccggaatgttggaatccggtgacgggtgagatgaatattcatccttcttatcgtatcaacggaaaccggacggaagttactctcacattggctcctaacgagtccgtattcatcgtatatcctgcggagggagtagatgaaggctatggagaatcctctctccaactgcaaaaggagaaaaaagacaccgccaaagcccctttaaacatagctttggaggcaaaggaatatactataacttttgcagctaacaaaaaaacgctcacacgaaaagtacttttcgactggagtcaggaatcggatgaacagatacgttactattcggggacagcgacctataagaccactttccgctggaaaaataaaccgaataaaggtcaacagatttatctgaatctgggaacagtttataatttggcaactgttcgtgtgaatggtgtagattgtggcacaatctggacagctccttatcgtgcagatattacaggtgccttgaaaaaaggaattaatgagcttgaaatagaggttacaaatacatgggcgaatgcactggcaggagctgatgaaggaaaagcgccgtttgatggcatttggactaatgcaaaatatcgcagggcagaaaaaacgctgcttccggcaggattgctcggacctttgagtttttctaccacagaataaaatagatttttaaggcacggattacgcggattacacggtttatgagaatcgtattacataaagtaacagcgcaatccatgtaatccgtgcccaattcattataatatagctaaagtatgaaaagttcaattattaaaacaggtacaatgttggcaggttttctgcttgctgcctgcctgtcaacacacgcagaagtaaagctaccggctattttttctgatggcatggtgatgcagcaacagaccaatgcaaacctttgggggacggcgactcctcataaaaaagtaacagtgaccactagttggaatggaaaacaatatgcagcaacagcagataaaaatggggcatggaaactgacagtagctactcccgaagctggaggtccttatactgtgacctttgatgatggaaccaaaaagacactgaataatattctgataggagaactttggctttgttccggacaaagtaatatggaaatgccgatgaaaggattcaaaaaccaaccggtagaaaacgccaatatggacattcttcacagcaagaatccacaaatccgtctgtttacggtgaaacgtacttctacattcactccgcagaatgacgttgtcggttcgtggaaagaagctactccggttagtgtccgtgaattcagtgcaacagcctattatttcgggagactggtaaatgaaatattagatgttccagttgggttagttgtagcagcctggggtggttccgcctgtgaagcatggatgacagcagactggctgaaagccttcccggaagcaaaaatacctcaaacggaagccgacataaaatctaaaaaccgtactccgaccgtgctttataacggtatgttgcatccgttaatcggtatgaccatgaaaggagtgatttggtatcagggcgaagataactggaatcgtgcccatacgtatgctgatatgtttacccgattgattaacggttggcgtgccgaatggaaacagggagattttcctttctattattgccaaatagctccgtatgattacgggattattaccgaaaaaggaaaggaagtgataaattcggcatatctccgggaggcacaggcaaaagtagaacatcgtgtagctaacagcggtatggctgtattactggatgcaggaatggaaaaaggtattcatcccgcaaagaaacaggttgcaggtgaacgtctggcacttctggctttaactaaaacgtatggagtggaaggcgtgaatggcgaaagtccttattataaaagcattgaaataaagaacgacaccgtagttgtcagcttcgaacgtgccaatatgtggatcagcggcaagaactgtttcgaatcgaaaaactttcaggtagccggcgaagataaagttttttacccggccaaagcatggatagaacgtagtaagatgctggtgaaaagcgataaagtgccgcacccggtagctgttcgatattgttttgaaaactatgtggaaggagatgtatattgcgacggattgcctttagggtcttttcgttcggatgattggtaatcgcaaataaacaaggtaaaatatgaaaaatatatgaagagattttatctgattataaccatactgtttgttggcgtgtcggctctttggagtcagcatgccaatgtcatttggaatactccaagtcgtaattcttctgaatctatgccctgtggcggtggagatatcgggatgaatatatgggtagaagacggtgatgttatgttctatgtgagccgtagcggtacattcgacgaaaacaactgccagttaaaacaagggcgtgtacgtctccgcctgtcgcccaatcctttcaaagacgctaaagattttcgtcaggagttgaagctgaaagacggatatgtagaaatcgcggcaggaaacacacagatacaattttgggtagatgtttttcatccgattatacatgtagaggtaacaaatgaacaaccgttgcagactgaagtcttttatgaaaattggcgctatcaggaacgacctgtcagaaaaggagaggggcaacagtgttcctacaaatgggctcccccgaaaggtactgtgacggaggccgactgtgtttccgtaaatacaaatcaacttctgttctatcatcgcaatcccgaacagaccgtttttgatgtagttgtagctcaacaaggaatgaacgaagtaaaatctcaaatgatgaatcctttgaaaaacctgactttcggaggaactcttttgggtgaaaacttagaatttgcaggcactgcggatgatgtatatgccggaacagactatcgtgcctggaagttccgttcttccaaagcagcccggaaagagcatttctgtattgtgttacatacagaccagacagaaacaatagaagaatgggagcagggactacaaactgctttacaaagaatagcccccaaaggtaaagtttcatcgaagactatcatacaggataaaaaacagacacgttcgtggtggaattccttttggcaacgcagttttatcgaagcagaaggggaagcaaaagaaataaccagaaactacacccttttccgctatatgctgggatgcaatgcttatggcagcgtaccgactaaattcaatggcggactatttacctttgatccttgccatgtcgatgaaaaacaatctttcactcccgactaccggaaatggggaggtggcacaatgactgcacagaatcaacgtttagtatactggccgatgctgaaaagcggagactttgatatgatgccttcccagtttgatttttataaccgcatgttgaaaaatgcagaactgcgaagccgtatatattggcaacatgatggagcttgctttagcgagcagatcgaaaatttcggtttaccgaaccccgcagaatatggtttcaaacgaccggactggttcgacaaaggattggaatataatgcctggctggaatatgaatgggatacggttcttgaattctgccaaatgatattggaaacaaagaactatgcaaatgctgatattaccccttatttacctctgatcgaaagttcgctgacattcttcgacgaacattaccggcaactagcttcccgccggggacggaaagcgttggatggcaacggacatctgattcttttcccgggttctgcttgtgaaacatataaaatgaccaataacgcaagcagcaccatcgccgccctgaaagtggtattagaaacatatggagagaaagaggagatgctaaaagcaatacctccgattccattgcgatacatagaaataaaagatacgttgaatccgactattgctccggtcttgaagcaaacaatttcgcccgccgtaagttgggaacgaattaataatgttgaaacgccacaactttatccagtgtttccatggcgtatttatggagtaggaaaggaggatctggatatagcccgtaatacctacttttatgacccggatgccatcaagttccgttcgcataccggatggaaacaagataatatatgggctgcctgtttaggcctgaccgaagaagcaaagaaactatctttagccaaattatcgaatggaccgcatcgtttccccgcattttggggaccgggatatgattggacacccgatcacaactggggaggtagcggcatgataggacttcaggaaatgctattgcaaaccaatggagaacaaatactccttttcccggcatggccgaaagaatggaacgtacatttcaaacttcatgctccgggcgaaacaacagtagaagccactctcaaaaacggaaaagtgacggacttgaaagttttaccggaaagtagaaaaaaggatattgttataatgattgaaaaggaaaaatgataattttgcagagtgccctgaaagggtttaattatatagcgtagggcaacgccctacgtaaaaacggcaatctgaatttgcgccctgaaagggcataattgtatacggttccgccctttcagggcttgtgactgatgtgtttttttcgtagggcgttgccctacgctatataattaagccctttcagggcaccccaataaatatataattgtaaggctttcagcctaactgcaaaattcccatttaaccgataaattctcatttaaccgctaaattcccatttaacgaatgaaatatataaataaagaattatgaataaaagaccatttatcatcttatcagcttttctgttgctgttctccttgatagaaaaagggcaggctacagaaacttaccgtcccgagacatcggttgccggattcatccagcttcccggtagtgggcgacaagtctataatttcaatctgggatggcgctttttcagaggcgatgtccgaggagcagaagcggtaaactttgatgaccgttcctggaacgtcgtttccactcctcataccgtagagttgatgccggccgaaggaagtggatgccgcaattatcaaggaccggcctggtaccgtaagcactttgtcctccccgccgaaacaaaagggcaacgggtagtgcttcattttgaagcagctatgggcaaacagattctttatctgaatggtaaacgcattcaggaacatctgggaggttatctgccttttactttagacttgaccgccaatggcgtacaagcaggagactcctgtctgctcgctgttttcacggacaacagtgatgacaaatcctatcctcccggaaaacgtcaatatacattagactttgcttatcatgggggcatttaccgtgatgtatggatgattgccaaatctccggtagctattactgacgctatcgattcacaaaccgttggcggtggaggtgtattcgttcattttgataagatcagtgaaaagagtgcgcaggtatatgtaaacaccgaagttcagaatgacgacgcccgttccgagtcagtcactgtagaaacgactttgacagatgcggatggaaaagtaatcaaacgcagttcaggaaaactttctttaaagccgggagagaagaaatccatccgtcaacagatggaagtaaagaatcctactctttggtcaccggacacaccttatttatatagggtacaatcacgtattaaaaaaggaaataaatccattgacggaggcattacccgtgtcggtattcgtctggcagaattccgtggtaaagacggattctggctgaatggcaaacctttcgggcaactggtaggagccaatcgccatcaggattttgcatacgtaggcaatgctttgccgaactcacagcaatggcgtgacgccaaacgtctgcgtgatgccggatgtaccattattcgtgtagcccactatccccaagaccctgcctttatggatgcctgtgacgagctcggtttgttcgtgattgtcgctactccgggatggcagtactggaacaaagacccgaaattcggggagttggttcatcagaatacccgcgaaatgattcgtcgtgaccgtaatcacccttccgtattgatgtgggaacccatcttgaatgaaacccgctatccgctcgattttgccttgaaggctcttgagattaccaaagaagaatatccctatccgggacgtccggtagctgctgccgatgtccattctgccggagtgaaagagcattatgacgttgtttatggctggccgggtgatgatgaaaaggaagacaagccagagcaatgtatctttacccgtgaattcggggagaatgtagacgactggtatgctcacaacaataataaccgtgccagccgcagttggggagaacgcccgttactagtacaggctatgtccttggcaaagagctatgacgagatgtaccgcacgaccggtttatttatcggtggcgcccaatggcatccgttcgatcatcagcgtggttaccatccggatccttattggggcggtatttatgatgctttccgtcagaagaaatatgcgtatgaagtatttcgcagccagtcgccggccagcctccaacacccattggcagaatgtggcccgatgatattcattgctcatgaaatgtcacagttctccgataaggacgtagttgtattcacaaactgtgattcagtccgcctttctatttatgatggaacgaaaacctggacgaaaccggtggttcatgccaaagggcacatgccgaatgctcccgttatattcgagaatgtctgggacttttgggaagcacgcggatatagctatactcaaaaaaactggcaaaaagtgaacatggttgccgaaggaatcatcgacggaaaagtggtatgcactcaaaagaaaatgccttcccgacgttccaccaaactacgtctttatgtagatactcaaaaagtgaacctgatagctgatggctccgactttatcgtcgtagttgctgaagtaaccgatgatagtggaaatgtgcgccgtctggcaaaagagaatatcattttcacggtagaaggtgaaggagaaatcatcggagatgctactattggcgctaatccccgtgcggtggagttcggctctgctccggtgttgattcgttctacccggaaagccggaaaaataaaggtgaaagccc

SEQ ID NO: 8070 - DNA, 1312 bp, Unknown
  gut microbiota DNA sequence
gaccgatgttatgggttgagtaacgtgctttctgcatggcgcggatggatacggtttctatcaggttctcttctttctttccgtgtatgtcgtccagcaagtggttgatggattttgaaatatccgtcttcgttccgcttgtacgcactttgtagccgaagcgtgcgatgaactgtgacaagttctccaacttctccggatcgggtaggtcgtggatacggtaaggaagcactttggctttcttgttcttcggcacacatcctatcttttctgctacggtcttgttagcgagcaacatgaattcttccactagtttattggcatcttttgactccttgaagtaaacgctgattggttttcctttttcgtcaatttcgaacttcacttcgtagcggtcgaagttgatagctcctgcagagaagcgtttttcgcgcagtgctttggcaatcgtatctaatgtgagtacttcttctttgaagtctccttcttttgtttctatgatttgttgtgcctcttcgtaggtgaagcgacggtcggagttgataaccgtatgtacgatgcgtgagtctctgacttctcctttttccgtaatatcgaagataacggagaaagctagtttttcttcgttcgggcggagtgaacaaatgaagttacacaaccgttcgggaagcatcgggatggtacggtctaccagataaacggaagttgcccgcttttctgcttccttgtcgatgatgctgccttcttttacgtaatgtgtcacgtcggcaatgtgtacacctacttcccacaatccgtcctttagcttgcggatggaaagtgcgtcgtcaaagtctttggcatctttcgggtcgatggtgaaagttgttaccttacggaaatcttcgcgtttggcaatctcttctgctgaaatctcggcaggaatcttatctgctgctgtctctactgctttcggatatacatacggcagaccgaactccgcaagaattgcgtgcatctctgtggtgttgtcgccagcctgacctaatatatctattacttgtccgataggattctttgccttgtccggccattcggttactttcacaatggctttatctccggtctttccgcctttcagcttatcttttgggatgaaaatatcattggctaatgtacggttctctgtcaccagaaatgcgtatgacttagctacttccagtgtgccgacgaatgtatcgttggcgcgttccagtatttcgatgacttctccttcggcttctctgttcttccgtttggcatagaaggttatctttaccttatcgttattcat

SEQ ID NO: 8071 - DNA, 6759 bp, Unknown
  gut microbiota DNA sequence
agtgactcgcagcactccgcataagactaataaggtggctttcaaaactgtccgatttcgccctgacagtaatctgaaaggacattttgtgggtgttcgcgccagtcagtccaagtatgtccgtcattcggagaaggtgtcagaggtggagattgatatgctgttgaaagaatattttgccgaacatcagatgatgacccgccgtgattttcaggaagtgtgtggtttggcacgtactacggccaaaacgcatttggtacgtttgcgtggagaaggaaaactggtgaatatcggtttgcgcaatcagccgatgtatgtgcctgctcccggttattatggcgtatccagagatgcggcacatccttcacggtaatgactgtgaaggatgtgaagaagcatatttctttgagtaatcacacgaaatggttgatagcttgagacttatcctcatgtgaagagaatgaaagaaaagaagcggatcttatttcgctatgtattttttcattccttccgtgtagaaagtattgaactctccgttttcttcgctataaataaagtaggcgtcaatctccggattcgctttgcagaaggcttccgcttcttccagtcccatcaccatgaaggcggtagccagggcgtcggcagtcatacagtctttagcgattacggtggaagacaagatgctgtgctgtaccggataacccgttctcgggtcgatggtatgagcatatttctttccgtctttgtaataatagttgcggtaatttcctgaagttgccaagcctaaatccgaaatttcaagtattgtttgtaagtcttggtttacagccagtgaatcgtcgacgggcttattgattccgatgcgccataagcctttggaggggtttttgcctttcacaaccacctcaccgcctatatctaccatatagttttttatgcctttacggtcgagcagttgcgcaactacgtctaccgaataccctttggcaacggcactacaacttagcatggtacgggaatcctgcttaatgactttgccgttgtccattttcaccttttcatatccggtgatttgcaacaggctatctatcatgattgaatcaggaaaagtgccttttttgaaaccgaatccccaagcattggcaaggggggctactgtgatgtcgaaagcaccgtttgtctcgcgggaaatttccatcgaacggttgaaacatttctgaaagaaactatcggtaactaattcctcgttgcggttgacgcgactgataactgaactgtcgttaaatggagacagagattgatcgaagcgtttcagttcagcttctatttccggttttaaatcgccgtcatattggtaagtaatcttgtataccgtcccaaataccaaacctttgacactgtaatagccagcttgttgattatgcctgactaatatccagatggttgccaaaatcaggaaagccagccaaaggaaacttttctttgttttcatacgctcttctttttgatgagaaaactcattttattggagaaataaatgttcaattaatatctttaatccgatgatgaccagaatgatacctccccataactctgctttcagttttcgggcgataccacagccgcattggataccaaagatcaacccgatgagtgacatgacgaaggaaacaagtccgatgataaggataggggacaggatttcattataattttgcactcctaaaaaggcaaacgaaataccgactgccagcgcgtcgatgcttgttgcgatggccatagtgaataccactttcagactggtcgggttgaatagctggcagcactcttcttctttgaaagattcccaaatcattctgccgccaaggaaggcaagaatggcaaaggcaatccagtggtctatactttctatgaaatggctgaagcttttggcgaacatccatccgataaaaggcatgattgcttgaaaaagtccgaatgtaaaagccatgattagcatgggcttccatcgggtacgcttcaaaatgataccgcttgcaatggagacagcgaaacaatccatcgccagacctattgcaagcaaccaaatctctagtcctgtcattatattctaaagaggcaatttgtaaataagggaataagtgattcccatattgtttgatttaaattttccgtagccgggcacgtaccatggatttccatattctccggtagatgctttggttttgtatttcatacgtaccgaccaccccatgttaaagtttttgtagatacgtactttaacgcctaaaacaatttccagccattgcacggagcctttcattcccaagtggctgaaaggtacgcttccgccccagtaaccatctcctaaactggggttacctactgcatctccccagatgggatcgtccgctggcattgtggaaacgtcatatttaaatgaactgaatgcatagcgaagtcctgcatataagtagctgttcttctctttcttctttgccatggtgttgtaatccacaccgattcggaagaatggagccattttgcttttatagtgtatacctgtttcattccaggtgtctgttcctcccatgccaaactcaaaggtagggatgaatttgtttttaagattgacggccacactgacttcagaactcataaagtcgcctcccagaagcttgcttccgatgccgtataaatccacaccgatatacgtaccattgtaaagtggaatggtatctatctcggcaacctctttctttttctgatctcttttgggtgtttgcgtaggccgctgttgttgggccagcaacggaagtccaatgcaaaagagcaggagcagactaattagtcgtttcatcaggtgtgcgttctggccgataattatagaatatctgcaagttctggatttcatttgtattggcttctttattttgtatatgaagagaatctatttggtccggttgtccattgccatacggaggaggaaggccgggtcttcctggtttgccaaatttggcactgataatgttttgtttcatcatatatccacattccatggattggaaataaggcgtattctgttgtacaatgtataatgtgtcaacatcatcttttttacgctttggatcatatctgaatatgaatacagtagagtcacttgtatatcgtagtggaagcattaacgtatgcacattcttttcattgttcagaatgatagagtcagtgcctaatgcggtgattgtcaacgaatcgagcgtgtcttttagtgcaatattagggttgtccggatcgatggtatatatcgtgcaatacatcatcggacgtcctgccaatgagcaatcgttctcgtccgagcacgaggtatgaatgctgacagcaccgccaacgattatcaataggagaaagatacgaattaaattcttcatagtcagcttattgaatgtgaatcaaattttcttttctatctgatagttattccgttccggtgcattgcgggagattaattcgccaaggaatccggctaagaataattgtgtacctataatcattgccgtcagtgacaaataaaaatagggagagtcggtcaccagtcgataggggagaccgttggacatagcatatagtttactggcacctacaatgatgacagaaatcattccgacgagaaacatcaatgatcccagcagtccgaagaaatgcatcggtttgataccgaatcgggaaagaaaccaaagagaaagtaaatccaaatatccgttcacgaaacggtttagtccgaatttcgtcgtgccgtatttacgtgcctggtggtgtaccaccttttcaccgattttcttgaatccagcgttctttgccaggtaagggatataacggtgcatttcaccatagacttcgatatgctttactacctcttttcgatacgcttttaagccgcagttgaagtcgtgcaggtttttgatgcccgacactttgcgggcggtcgcattaaacaacttggtcggcagggtcttcgaaatagggtcatatctcttttgtttccagccggaaaccaagtcgtaaccgtcctcggtaatcatccgatagagttcgggaatttcatccgggctatcttgtaggtcagcatccatcgttatgactacgtctccttccgcttctgcgaatccacagtagagcgcgggtgatttaccgtagttacggcggaatttgataccttttacatgttccgattgagctttcagcttttcgatcacttcccatgaatggtcggtacttccgtcattaacgaaaatcacttcgaatgagaatccgttggcttgcattacccgttctatccaagcatagagttcgggtagtgactcttcttcattgaataatgggactacaactgatatatccattgtacgaattatgatttatgatttataaattatgattgaacgggtccgtcattttccggtttggcctttttcattaccatcaatgcggtagggatggccaggatacttccccagaatacatcccatgacaatagttgcatggtgatattgatagaagtaagtgaacgggcggtatctatcgtttcttttataacttctttgttttctatcaaagccggagtgttggccatcaactcgtcccatagctggatataagagttgacgataaaaccgtgatcgatgaactggaaataggcgtagtgggccacggctaccaatagggaagcaaacatatacataaatatagtgaagagcatggcatgcgaaaattggatactccccccgcaaatcttatcccggtacattttcgcgtagtgatatccgatgaaaggtacggataatgtcaggattacaaataaaagcgaaaggaaaggtatgtggaatcccagcggaaataatatgaacttcaatatccagtagattcccatgtacgtgccaaaatgcatggcatatttttgtaaatagcttctgttctctgtcatcttcatttataaattgcgcacaaaggtacaaataatatcggttggtaggggaaatctggttgttaaagttaataaagcaggggaagttgctgtctgaatatttttttgcgattttaattgcttgaaacgtagcttgttagtattttattcgtaaaaaagttatctgcagctattgcagaatacataaaaatgtctacctttgcaaccgcaaaacgggtaagtcctatacggccagctcccttcgaatcctccagggcttgatcgcagcaaaggtagttggttgtagcggcgcgatatagatagcttacccacccgcctctttagctcagttggccagagcacgtgatttgtaatctcggggtcgttggttcgaatccgacaagaggctcaaaaagaaaaaagcattcaggtagtttacttgaatgctttttttataatctagcatagagatttacttgattctcttgtatccatatacagccaagtcgccgagttcttcttcgatacggagcagttggttatatttagccatacgatccgaacggcttaacgaacctgtcttgatttgtccgctgttggtagctactgcgatatcggcgatagtagcatcttctgtttcacccgaacggtgagaagtaacagtggtgtatccatgacggtgagccatttcgatagcgttcaatgtttcggtcaacgaaccgatttggtttactttaatcaggatagagttggcacaacctttttcgatacccatggcaaggaagtctacgttagtcacgaacaagtcatcacctaccaactggcagcggttgccgatacgttctgtcaatttcttccaaccttcccagtcgttttcgctcataccgtcttcgatggagtcgatagggaacttgttaatcagttcttccagatagttgatttgttcttcagcagtacgtttcttgcctttttcgccttcaaacttggtataatcataaataccatcgtggtagaattcagaagaagcgcagtccataccgatcatcacatctttacccggttcgtagcctgcggctttgatagcggcaaggatcgagttcagggcatcttctgtaccttcgaggttcggagcgaaacctccttcatcacctacggcagtacttaaaccacggtctttcaataccttcttcaaggcatggaatacttcagcacccatccgcagaccttctctgaaagaaggagcaccgacagggcgaatcataaattcctgaaatgcgataggagcatcgctatgtgaaccaccgttgatgatgttcatcatcggtacaggcattacataggtatttgttccaccgatgtaacggtatagaggaagatccagatagttggcggcagctttggctacggcaagagatacaccgagaatagcgttggcacctaaattggatttagtcttagtgccgtctaatgccagcattgcgtagtcgatacctctctgattgagcgaagacataccaaccagtttcggagcgatgattttatttacattgtcaaccgctttttgtactcctttgccaccatagcgttttttatcaccatcgcgaagctccaatgcttcatgttcacctgtggaagcaccggacggtacagatgcacgtcctgtgatgccggattccaatactacgtcaacttctactgtgggattacctcttgaatcgagaatttctcgagctacaattttttcaattttcatcgtttctattgtttttgaataagatttctgcaaaagtacggacttg

SEQ ID NO: 8072 - DNA, 44361 bp, Unknown
  gut microbiota DNA sequence
cgtcactattttttcgcttgcatggacccttaaacctactatatagtctatactaataatactctctgtttaacccataacaatgcgacagacttaaatcccatataaataaaaaaaacgagctaattctttttatagaaccactcgccaccgcatcagaaaagcctaaaggcttttccatagtacctcaaatttcctgaaaactaatcttctttttacctaaaaacgtcttacctattgttatccttttaccttctattaaaaacttatcctattgaactaaactaaaaaacttttaataccttaaactgtctaatctaatacctctatttaatattttcttttaccttataaactaacagcaatttctcaattgctttgcaaaggtacgaatatttttcgtgtgcgcaaacggttttatattttataacacttccgcaggctataagtctttcacatcgctcaatgcaaccagcttatttacaatagcatagatagtcaaaccggcagcactatgtatttgcaattttttgctaatatttctccggtgtgtaatcaccgtatgaatcgacaaaaaaagcttttccgctatttccttatttgtcattcccttcaccacacagataacgatttccttttcccgctggctaagcgtatcctgattatccatcccttcttcttcagaaaccacattcagcaaacccgcaattttcttagaaagagtttccaaatcatcgaatattgaaatagactcatcatacttacccaataatgaagcatctacaaaagaagtaaccaacgctattaaacgtatccttttaccagatatttcttctcgaaacttagctacatcaaagtaatcaccaaaagcaggattgacaatcaacatctcgggacattgcgtccggacgcaatcgtgcaaagcttcaacagacaacaattctattggttgcacttttacgttagaaagacgcttcaatgcagcagtcaacccaccacgaataattacagaggtctctgcaatagctattcgaacaacttcgttatttttcattttccctaatcctcctttccaaattcagaatagcaggaacaaaaatatagtcctcaaccttgcaatgagattccagtccggcttcacaagcatatatgtcgaaaagagccgcgttcagaagattctcatttgctttggcagggcaatattttataatgatattttttagttctgtcaacttctcccctacctgatcgtgatgtttggaaaaggtactgatctgatagtttttgggagcatttcccttaatcaatgaatcgacatacttaaagacggttttctcttcataatccatgtgcttacgcacttctcgtgtatattcatcaaaaaacttgagaataagaaaagctacatcgtcctgcgaacaatcaattgcctcgatcaatttacgacgaatagccggaagagaaaaatcaagaaaataaatatgtgcctgccgcagataatcaatcaatgcaggtatggaaatatcatctttatccccatcgagccgggaaaagccttcagccataaagttgactacaatcagaaaagtccgacagtccactccatttagttcacaaacttctttgactgttttgtcaccaaaccccaatgaaagcccaaaacgactcatcacttgcaacaaagaataattatcgctgatgagatcgatcatcttatcagtcggcttgtatttctgtaaattatccatcatacctatgtatattagagagtacaaagaaacggaatattttgctgaaatgcaatcatcatttataggtattttaaatcatcatttattggcaaatactaattatacgctactattttgtggcacaactttaggcaagctagtctttttttagtaattttgtcgctatctatttgtaattagtaactcataattttatatttaataaaatggcaaacgaactcgagctgaaatacggctgcaaccccaatcaaaagcctgcccgtatcttcatgaaagaaggagaactccccatcgaagtattgaacggacgtcccggttatatcaatttgttggatgcgttcaacagttggcaattagtgaaagaactgaaagaggctaccggactgccggctgccgcttcttttaaacatgtcagccctgcaggtgctgctgttgcggtagaaatgagcgacacgctgaaaaagatttattttgtggacgacatgaaactgtctccattagctacagcatacgcccgcgcacgtggcgcagaccgtatgtcatcttacggagactttatcgcattgtccgacacctgtgatgaagaaacagcacgcatcatcaaccgtgaagtatccgacggcgtcattgctcctgactatactcccgaagcactggagattctgaagaataaaagaaaaggaacctataatgtaataaagatagatcctgcataccgcccggctcctatcgaacacaaagatgtattcggagtgactttcgaacagggaagaaacgaattaaagatcgatgagagtcttttgaaagagatgcctacgcagaataaggaaattccggctgatgcgaaacgcgacttaatcattgccttaatcactttaaaatatacgcaatccaattcggtgtgttatgccaaagacgggcaggcaatcggtattggcgcaggccaacagtcacgcatccactgtacgcgtctggcaggaaataaagcagatatctggtatttacgccaacatccgaaagtgatgaacttgccatggattgaaaaaatccgtcgtgcagatcgtgacaacactatcgacgtttacatctcggaggattatgacgatgtattggcagacggcgtttggcagcagttcttcacagaaaagccggaagtgctgacacgtgaagaaaaacgggcatggctgaatacgatgacaggtgtagctttaggatcggacgctttcttcccattcggagataatatagaacgcgcgcataaaagcggtgtcagctacattgcacaaccgggtggttccgtacgtgatgaccatgtgattggaacttgcgacaaatataatatggcaatggcatttacaggcatccgcctattccaccattaacaatatcgactatttttattccatatatccccatttataatgagaatgagacaaatcttccattataaatggggatttcctatttcttcaagcccctctatctttgcagcgttacatttaaaaacgaatcaaagatgaataaaattggtgtattttatggttccacaaccggaacaacagaagaccttgcccgtcgaattgcagagaaattagatgtaccatcggcagatgtatttgatgtatccaagctaacagaggcattagtcaatgaatatgacgtattggtgctcggctcttccacttggggagcaggcgaacttcaggacgactggtacgatggagtaaaagttttaaagaaatgtgatttatctcataagtctgtagccctgttcggttgtggcgattctgactcgtatagcgacaccttctgtgacgcaataggcattctttatgaagacttgaaagatacccattgtaaattctgtggagcaacagacaccgcaggctataccttcgattcttctattgctgtcgtagacggtaagtttgtaggtcttccgcttgacgaagtcaacgaagatagcaaaacagacgaacgtatcaacgcatgggctgaacaagtgaaacaagaaattagctaattttaccttaacataaaaagaatactttgcatcatggcaactgaaagaatcatccccggcgaaatccgaatttttcttaatcatatttatgagtttaagaaaggcgtacgcaacatggtactttacacaatgagtaaagagcacgaagaatttgccatccgccgattgaaaaatcaaaagatcagttatatgatacaggaagtaggtaccaataaaatcaacctgttttttggaaaggcagaatgtatggaagccatgcggcacatcatcatccatcctttaaatcaactgactgccgaagaagattttattttaggagccatgctgggatatgacctatgccagcaatgcaaacgatattgcagtaaaaaagaaggtataaagatggcagtttaagcgataaccttagcataagtttagctttgtttgtatgtagtttgtcttgagtggaatcgtttctttaaaaataggtatccattaaaacattttccaatggaaacttgttgtataagaaacgattcactcaattataacaaaatcaaacattgcaatgaagcagcaacaagaacaacttaccgcctatacactggccggtattttcaccctttcattacgacttattgttggttggacttatttttcagccttttggcggagactcgtcctcgaaaacaaacttatcccggattctaccggatacattggagagaagttcaatcatttcctacctaattccataggaatcaaacccatcatcgaatatctcgtcagcacccccgatttactttggtgggcgatggttatctttactatcattgaaggtgttgtcggattactctatatgcttggtttctttaccagattaatgagtatcggcgtattcagtcttgcattcggcattctgttgggttccggctggttaggaacaacctgtcttgatgaatggcaaataggtattttaggcgtatccgcaggattcaccattttcctgtccggcggcggaaaatactctttggattatctgctacagccccaactatccaaaaataaatggctggtatgggttacttccggcgaacttccattgtctatcaagcgattcagtaaagtagcaatcggcggtgcagccatattgttcatactcaccctatataccaaccaggtttttcataatggcgtatggggaccactacataacaaatcagtaaaacccaaaattgagatatcagatgcaaatgtcaataacggagccctgtcttttaaagtatatcgtgttgagggtgccgatgtatacggctcatttcttattggcattactcttaaagacacaagtggaaaagtgatacttcaaaagaatggagaagaccttgcattattccctctcactaatataaagaatgattatatagctaaggtagtccctggtaaacatagccttatcatcccattgggcagcaaagctactttggcaattagagataacagtttgcaaaatcttcccgaaggccagtatgaattaatattgaccgacattagtggaattacttggaataaaaacatcacaatcgagtaaatccggcctactctacaaacggatcatagacaaaggtgtatatcagcaaaatttattcggctggcatacacctttattcttttattttaccaaaataacaggttttatcttctcaagcactcaaaattacctacatatactgaattttagaaattactatgcctagtattgggtattgccatatcttttaacctcatataactttgcagccgataaaattattaaaaaaatgagaaaaataactgcaatcattattctttgtttcctacattctctcacacttccggcacaggaaactaaagaaaagtctaaaaaccgtaaaacttcttccacagaagaatatactaaattccgtttcggagggtatggagaaatggcggcgagctataaagattataatttcaatcgttttactcccaatggttccggtaaacttaatcgtggagagatttccattccacgttttgtattagcctttgattataaattctcctccaaatgggtattgagtaccgaaatcgaatttgaatacggaggtacgggatctgctcgcgaaattgaatggtttgaagagaacggcgaatatgaaacagagattgaaaaaggcggtgaagtagctttggaacaatttcatatcacccgtctcattaataagcacatcaatctgcgtttcggacacatgattgtaccggtaggattgaccaacaaccatcatgagcctattaatttctttggagtttaccgcccggaaggtgaaacaacgatattgccttccacctggcatgaaacaggtatcgccgtattcggtgaaattggacggtttgattatgaacttcaattagtcaatgggcttgatccacaaggattccgcagcgaagactggataaaaaacggcagacaaggagcattcgaagtcaacaatttcaccagtccggcttttgtagcccgcgtaaactaccatggggtaaaaggattaagagtaggtgcttctttctattataaccagacagcaaagaacggaactaagccttggagaaatacaggttataaatttccggtaaccattgtaaccggtgatttgcaatacaaaggctttaataacaacctgattgtacgcggaaatgccgtttatggaaacctaggagcgagcggagctttaaccacaatcaacaacagttcttcagcagcttccggttaccctaacacaacagtagcacaaaatgcagtcagctacgggggtgaagcaggatataatataggttctttcttccattctaaagctccccgtatctatccttttattcgttatgaatattacaatccgatggaaaagacagaagctaacacaggtttgttggccgacaaacgttttcaggtatcagccgtaacagctggattgaattactacgctctacccaatctagtaattaaagcagactacacccaccgctccataggaggtggaaaatataatgacgaaaacttagtctctgtaggcatagcctatattggttggtttatcaaaaaataaatataatttttaatagcaatgaaaatgaaaacatggaaatttctgcctataatggcaatgggagtatgtatggcgatgacctcttgtagtgaagattctaaaaaagaagatgtttcacccaacccatttgcgggttttaataccccggacagtggcactgcaacagatgatgaattaaaggctgcggttgcaacgtatgtagatgatgtagtgattcctacttatcaagatatgtacaataaagtaaccgcattaaacacggcagtacaaaagttatcaacgtcctccagtgataatgatgtagccaatgcagcagacgcttgggttgcagcacgtaaaccctgggaaaaaagtgaagcttttctatatggtccggcagatttgaataagctcgatcctagtctggatagctggcctttggataaaggaggtattgatgcaattctacagtccggaaattgggaagacgctgtcggaggagacgtagacgacggtgatgatgcaccagccgatgcaccacagaacttgcgtggtttccatactgccgaatatttattgtttgaggatggtgaagcaaaaaaaatcacagacctggatgctaataaaataggatacctcaaggctgttgtcggacgtatgtcaaaagacacagagcttttgttaaaaggttggacagaaggtaaaaatctggagaacggtgcctataaagatgcaatgaaagcacctaacggaacttactctataagcaatatcaaacaatctgttgcaatgatactaaactctgacaatggtgcagaaggaattgccaatgaagtaggtgcaacgaaaatcggagatccggtagataagtggaacagcggagataaagaaggtggtgtattagccgtagaatcctggtatagctggaactctttagatgattatactgataacatttacagcatccgtaatgcttactatggtagtttagacggaactgttgccagtgcaagtctgtgctctatcatgaaaaaagtgaacccgacattgaacgacatggttgttaagcagattcaggaaacaatcacagcaatcaatgacatacctcaccccttccgtaacaatttaggcgctactactgaagttaagaatgctcaaaaccaatgcgcatttttatgcagtggtctggctttagtccgcggaaaattagcaggagaataaacaatattaattatgatgactaagttctttcttttaggaaagccggttatcaaagcattacgaggaggactcccaaggcgattgggaagaatcctctttgttgcgataaatataggcttcctgcaaggttgtgatcatgatgctttcgacggcattatttataagccaaacggagaaatagcaaaaccggaggaattatcagccggtatttccactattttttctaccgtaagtggcgcttatgacaccaatgcagactgggtcaccggtgaattattaacacgtttcaatcgtggcgatggtttgtatgacaattctcgtggagtaggtacaggcagcggtaatggattaggacctatttttggaggctattcctgcggagcttgccatagaaacacaggacgtactactccggcatgggtcacaggtggttccggtgcaggcttttcatctatgctggtttatattacacgcaaaaccggaggatatttccccgaatatggccgtgtattacatgaccagtccatttatggcgtaaaagccgaaggcaaaataaagataaccactactaccgaaaagttcaagtttcccgatggagaagaatatgaattaataactcctcattatgaaataacagattggtatgattatgaaataaagcccgaagatctgattatttcggtacgtgcccccttgcggcatgtcggcatgggtcagatgatggcacttaaccacgatgaattgaaacagttggcagctcaaagtaactatcccgaatacggcattagcggacgcctgaattatgtgacggaaaaaggaaaatatgacattggaatatccggcaacaaagccaaccatcaggatttaacagtagaactgggattctcttcggatctgggggtaaccaatgaccgttttccacatgaagtgggcgaaggacaatcacaaatgatgggatttgccaaccaaggtgtagagatttcgacccgtgacatggaagatgtcgatttatatatgcagacattgggagttcctgcacgccgcaacgtggatgacgaaaccatcaaacatggagagcaaatgttctatcaagcaaaatgccatttatgccataccgttactttacatacccgcccgcgaggcagcgtattactgaacggaactcaactaccctggctgggcaatcagatcattcatccctactccgacttcttattacacgacatgggacaaggattagctgacgattaccctagcggcctggcacgcggttgcgaatggcgtactactccattatggggaatcggcctgcaggaaattgtcaacggacatacctatttcctgcatgacggacgggcacgtaacctgacagaagccatcatgtggcatgacggcgagggagccgcttcacgttccattttctcccgcatgtcgaaagaagatcgcgcagccttactaacattcttgaacagtttataatataatcagcaacaacaatgaaaaaaaaatatctagcactcgcgctcactgcatttctgtgcagccactcttatgctcaagattcaaatgcaaaagaaatcgatgataaatatgtagagaatgatgttgtttcgctggcaggaaagaaaggtttttctttttctaccaaagccggtgatttcttattcaagccctatgccttagttcaaaccagcctctctttcaaccgatatgacgatcaaggtttggaaagcctttatgcacgtaactgggcaaacagtggttttgctattccgaacgcaatactcggatttacaggcaaggcattcgggaaagttacattcaatttatcactgaatgcggcaaaaagcggtgccgccttattgcaacaagcctggtttgatgtagcgctcaaagaatcattccgtattcgtgtcgggaagtttaaaacgccgtttatgcatgcctatctgaccacactgggggaaacattatttccggtgttgcccagttccgtggcaggtggcgtattaatgccctatgacatcaatgctgtgaagccgagcatagctaccggcttcgacctgggtgttcagatacatggtttgattaacggaaaatggaattatcagttaggtattttcaatggcacagggattgatgtcaattcggcaaccaaaggaatgtgtgatgatcataaatggctgccccaactgctttactccggtcgcctggtatatatgcccaaaggtgaaatgccagccacacaaggtaatccgaacaatctgaaagaagataaaatgcaattcggtgtatctacatcttataatgccgaggccgaagatcatagtagcagcgattggcgtataggtgcagagtttgccatggtaaagaaccgtttctactttgcagccgaaggttattacatgaatatgcatttcacagaaatcatgcataaagacaaagacctgaattactggggagcttatacacaggccggttattttgtaactcctaaattacaggctgctctccgttatgatatattcgatcgcaacgggacagacgaaggcggtttgttgaatatgcctgccatcggagccaattactactttgtcggttctaatttaaaacttcagatgatgtaccaatatctgggcagaaccggtcatgacacgcagactgatcgtgataatgatggagtgggactatcacgccatagcgttaccgctatgttacaattcactttctaatgtataggaggaggaatctgtctatgaataaaagactcaactatttattgataacctgtgcctgcctaaacctgtgttcagcttgtgatgaaggtaaaatctatccggatgacacgattgacagtggacgtacggctactgtaacacttcatttcacccatctggatgcttggccgcagaaaaacaatatgtcattaatctccttaggtgaggacggagttactcccatattggttaagcgcattctggaaccatctagcgaggcagaagctgtaactgtaacattaaacaacttaaacggaaacacgcgtagtattgccgtagccgttatcacgtccggaatgtctttggtgcatgcgtatcagtcatttcccgtaaatgcgtcggatgaatcgctgactttaccagagacaacaatcgaagtggcttcattcagccgcatccaaacgcaagttttcaatgccaaatgtgtgatgtgtcatggaggaagtacaacaacagccggagatttggatctgacggcagccaaagcctatcaatcactgattaatgtaaaagctccccattctgcgaaaggaaagaattatgtcactcctggagatttaaacaacagttatttattagatgtattagagcacgataatcacatcgatatattcaatggagctgaacaacgtgaagttcgcgctttgattcggacatggatcaaagcaggagccgaaaacaattaacttgtaacagaaatttttgatatgaacagcaaaaaacaacaacccttgaaatcagaaaagactttagcagaaatatttaaatacgaagtggcagacggtgtttccgagtatcatttaatgattcacgcaatccagccggaatccacttatgaagaacaattaaacgccattatagatacatactaccaattacgggaaaaagaactgcaagggaccgtcgccattttcaaacgatactttttgagcgacgcttccaatcaggcagataccttgttggcacttactgctgaaagctcggattgcgcactttctatcgtagaacagccaccattgaatggaaccaaagtagcagtatggatttaccttcagacgaaagtacagacacaaatgctgcataatggtcttttcgaagtcaagcatggaccctaccgtcacctttggggtggcagctctttcaatcgggcagccaactccgaataccaaacccggctactattaaacgactatgttatgcagctcattgaacaaggttgcaaactagccgccaactgtattcgtacctggtttttcgtacagaatgtggatgtgaattatgccggagtagtaaaggcacgtaacgaagtattcgttacccagaacctgacggaaaagacacactatatctccagcacaggtatcggcggacgccatgctgaccccaaagtacttgtacaaatggacacgtatgccgttggcggaatcaaacccgaacaaattcatttcctttatgcgccaacacatttgaatcccacctatgagtatggtgtcagttttgaacgtggcacgtatgtagattatggagaccggcgccaagtattcatctccggaacagcaagtattaataataaaggcgaggtggtatatccgggagagatccgtaaacagacagagcggatgtgggaaaatgtagaggctttactgaaagaagcagaatgtacatttgatgatatgggacaaatgatcgtgtatctgcgtgacatagcagattataccatcgtcaaagaaatgtacgacaaacgttttccttgtacccctaaggtatttgtacatgcgccggtatgccgcccgggatggttgatcgagatggaatgtatgggagtaaaaacctgtgaaaataaggaatacgctccctattaatatcattaaaaagatatgccgttgaaaagattacttatcattttatacatctgtctgataggattacttgccgcagccactttcatagagcaagcatacgggacagagtttgtagaaagaaatatatatcacacaatctggttttgttgtttgtggggagttattgctgcaataggggttgttgccctcatccgacgttccttatggcggcgacttcccgttttgctgtttcatggctccctcctcgttatcttggtgggggccatgattacatttatctatggcgaacaaggatatatgcatttacgtccggatacagtaaaaagcagctttcattcgccacagggcgacaagaacattcatctgccattcacgatgaagctagatagtttccgggtagagtattatccggggacaaaagctcccgccgattatgtcagtcatatcagctattcacttcccggtcagaaagattccgtgcacaacgaatgtatctcaatgaaccgtatctttactacacaaggcttccgattttatcagtcctcatttgacgaagacggtcaaggaagttggctgacagtaaattatgatccatggggtacaagagtgacctatagcggctacattctactgggcatctctatgattttactactattttgccgtcagggagagtttcgtaagttactaaatcatcccctattgaaaaaaggaggattatttatcttattccttttctacctgacaggaacaatgcaggcacagcaaacacctcttcgtgtattaaacaaaatacaagcagacagcttggcacaacaacaggttatttaccatgaccgggtagtaccattcaatacactggcaagagacttcgtcaaaaaactgacaggaaaaatctactataaaggattgactcccgagcaagttataagcggttggattctttacccggattcatggaagaatgaacctatgatatacatcaaaagtcccgaactgcatcatttactcggtttggaatcttcttacgcacgcttgaccgatttatttgacggtccagtctaccgtcttcagaaaacctggcaacaagaacagggaaaaagtagcaaactcgccaaagccatccaggaaacggatgaaaaagtgggactgatcctgatggtggaaaaaggaacattcatccagccattacccactgatggtagcgtgcaacctctctccgaactggaagtgaaagccgaattactctacaaccggattccgttcagcaagattctttttatgataaatctgtcattgggagtgttgtctttcatgcttctacttcataacagcctgcaaagaaatacaccctcgcccaaagccaaaacgatttcccgcacagcaggaacgatcttttctgttgcactctatcttgctttcatattccatttagcaggatattgcctgcgctggtatattggcggacgtgttcctcttagcaacggttatgagacaatgcagttcatggcactctgcatcctcttgatagcctgtctgctccatcgaagattctcatttatacttccattcggattcttgctctccggctttgcgttgttagtctcttatctgggacagatgaatccccagatcaccccattaatgccggtgctcgtctctccgtggctaagtattcatgtttcattgattatgatgtcttatgccctattggcattcatcatgctaaacggaatactggcattatgcctccgaaaaaaagaatcggaaaacaatgtctccggaaacgacgctgtacaagacaaccggatagaacagttgacgctagtcagccgtttgctactctaccctgctacgttctttttaggggcaggcatctttctgggagcagtttgggcaaacgtttcctggggaagatactgggcgtgggacccgaaagaagtatgggcgctgatcactttcctggtatatggagtagcattccattcacaaagcctgcgcattttccgcaaaccactattcttccatatctatatgattcttgctttcctgactgtcttaatgacctatttcggagtaaattatgttcttggggggatgcatagttatgcaaattcctaaaccactatatatagctagtaaccgatagaagaatacccattttaggggattgcgggaaaagcggaaagcccctatctttgcagtatcagaattaaattaattagtcataattatattacgtagccacattaaaaatacatagaaatcggccgaagtgattcacccgcatttcttttatttggttgttaagttagaaaaaaatcatataatgtattcattttggaatatgaatagatgacatattctaaaagaggcaaggacgtccggcttgtgaaagccggacgtttttttatatcagtaagagaataaagtaagagagctcatgcattcatgagctctttccaaccagccgtttcgaaaacgatatactccgctataaatttctccatctcctccttcttcacaggatgcaacaccaactcttcgagtaaggcaaacaaccataccgtattcaagtgaatgaaaaaattggttattgctatattgatatgcggatatttctgtttcattccttgaaaaaagacagaaatcgtacgcgtcatcaaatccgtatattcggaacggaagttctccaaaacagaaccttgtgcctgaaaaagcagcagccgtaaacggtcacgatgttcagagactaatctgatatattcccgtacagatgttttctggtaatccgaatccataaagacatcgattgtcatctgatcggcatcatgattataaatcatagcatacagatcattcaataccggtttcagaatcgtacggaatatctcatctttattggtgaaataatgatagatattactcaccgtcacccctgccctcgaagctatttcacgcatagaggcatccttgtatcccttttccagaaacacttcttcggctaccttcaagattcgctcttgtatatctcccttcaaaaactgcatagtatcactgctatttatccattcatatttgtaacctgtctgttcaccatccgggcaaatataccatttttctttttcaattcctccggtgttcccatttcagcaacacttccattctccaatactacaattttgtcggcattggcaacggttcgcatacggtgcgcaataatcagtactgttttgttacgtaccaattccgatatgcctgcctgtatcttggtttcattttccacatcgagcgaagcagtagcctcatccagcaaaacaattggagcatccttcaacaaagcgcgggcgatggaaatacgctgccgctcaccacctgacaatgtttccccgttctcaccgataatcgtctgatatccctgcggcattttagtgacaaactcatcacattgtgctaggcgggcaactctccggacttcctcatccgtagcatcccgtttgccaatacggatattatccatgatggaagcattaaaaagaactacttcctgaaaaacaacggaatagttcgtcagtaacgtttcaggatcaatccggctgatatcctgtccgccgagggtaatctttcccgactgaatatcccaaaaacgtgctgccaacctggctgccgtactcttgccactgcccgaaggacccaccaaagctgttttttcgccttgtcgggcagtaaaggacaagttcttcaatatttgttttccctgctcataagcaaagtctacctgctgaaactcgatgtcatagcctttaggagtaaaatcggtagttccatgctgtaccggcaatgcttccatctcattcattctgctgatacgcacatccagatagaacaaagcggcaatattattcatcacctcgctgatcggagcatatacacgcgagccgatcaccataaatataagataggtaaacaaatcgattgtccccgaagccaagagattggcaccgacgataatgacgcttgccaagccgagtttcaatacactttgggaaccgtttaccaatatgccgagcaccagttcattacgggtcagtaccttttcataggtatcgatgcttgcatccaatttctccagatagtccctctcctgattataagattttatctcctgaatagtatcaagtccttcttgaatatgttcagtcaccattcgcttgttcagataattactttcattgcttttctgtatttccttcttcgagaaaagaagaattgcggcggcaagcggcactacccagaacaaagcaatcgtcaactgccagttataaaatgccataccgacggtaataagcagaatgctgataatggaagcaaacaactggggaaccgcatgcgagaaagtatgttcgagatcagtgcagtcatccataatcgtggcggtaaggtcggaaagattcttttcgccgaagaaagccagaggcaacttgcgaagtttttccgccaatgagatacgccggttcgcgctctcatcataaacggtggtataggtgctacgatattgcaataccgcaaatatatacatgactatcataaagataataccgagtatgctatagtagagaataccatgcgtcaccgaaaccgaaggctgaaacaccggacgaagatattcctcaagaaagagaaaaacaaataccgccggcaacatcaatacaatatctagcagtgtagtgaaaaacacacctttacagaaatcttttgctcctttagttgaaagggcaaaacgtctttttattacttcaatcattagaaacctcctttcctattgtccagcgaacggattgctggtattcattccacatattataatagataccttgtttttcaagcagtttggcatgtgtgccttgttccgcaatcttacccttgtcaatcacaagaatattatcggcatccgtgatgcttgaaagacggtgggcaatcatcaatacggtttttccttttgtcagttctttcagggcttgctgaatcagatgctcattttcgggatcggcaaaagcagtcgcttcgtccagtacgatgatgggggcatttttcagtatcgcacgtgcgagcacgattcgttgttgttccccgccggagagatacgttccttctgtaccgatctttgtatttagtccgagcggaagtttattgataatttcccggcattgtgccatatctactgcccgttccacttcctccattgtcgcgttgggattaccatatttgatattttcaagcaaagaagtcttaaatagctttgtattctgaaacacaaaagaaatatgtttcatcagttcttcaggggcgatttctcttacattgatgccacctattaaaaccttcccttctgttgcctcccagaaacggggaacaagacgggcaattgtcgttttccctccgcctgaagctccgacaagagctactgtccttccttgcgtaatggtgaaactgatatcatccaccgccttttgattagctcccggatagctgaaggaaaccttttcgaactgaatactgaattcctttaccggttgtggatgcgctacaacagtcaggtgctcataagcaaccagattttcaagacgtccgatggcctcactcgcctgccccaaagcctgattgagatacatacttttcatgatactttgggagaatacgggagtaatgagaacaaataggaagaaattaagtaataccgatgcataattaccagaataaccgatcagcaaaatagccaacggagcaaggaaaaacacaaagccattgataataacggtatagagcgacatcggcttctcccacattcgtgtatagccgaataccattttattataattcatgatacagcgatgaaagttcttgaaagagtaaatggtctgctggaaaaccttcactacgggaattcctctcacatactctacagcttcggtattcatttcctccagagaagtcatgtagcttttcataaactgccgtccctccgcattcatcataaatcccataaccagcatggcaataattacaggaacgatacatgccagaccgagtatccagtcgaacataaaaatcagtatgacagctaccaacggcactagaaaagtagccgcaaggtcgggcaactgatgtgccagaaaactatgggtaacccctgcattgtcatctataatcttacggatacgtccgctcgtattaatgtcaaagaaaccgagaggcatacgcactatctggcgcatggcttctttgcgcaaattcgattcaacccgaaaagctgcaagatgcgaagacatcaaggcggcaaaataaaggacgatactcgccacggccatgcctgccgcccaccaggcatacgtcaccacattaccggaagaggttatctctccgtattcaagcagttctctcacaatcagccaaataagaatataaggcaacatgcccgccagggcacttagggcagacagtagcattgccgcaggcaaaagcactttccgtttacccatgtagttctgaagttttttcaatgtactcataacgtacgttcaatctatattaagttcgacaatcatttaacttatcgcttgttttcaaaaaagaacaatattcgaaatcgttcaaaaaaaaaagagagcttatatttctataagctctcttcatcccattcaatccggtgcatgtgcacctttgatatatgattaatctcgactcgtctctcactgattcgcataagttttcaattattttctgcaaaggtaccgctcaccggcaagacgagcaatacctaaaaataatgaaatttgctattcagactataacgaataagtaatgattaaaacaacagaatagttattcatgtttcagccacgtacttggcaatacttctttttcacttttttcattcaccagttccatctgcaatacgcctccgttacaatcgaagtaacgcacctctatcggatgaagcccggctttcaatgccttctgcacaataatctccaccggcgaatgtgctccatcattatctcccaacaattcaccgtcgagcatcaatgtgctaccgtcgtccgaaagaagggcaaatgtatagataccatcggcaggaacttccagatagccggtcaacaccagaccgatatttcctttcacctcttcggggatagataccgattccaccacatactcccctttgacaggagctgcttcaatatccgcacaaagattaccacgaaaatcgtgccatactgctttcaagccggactgcaaagcagccggagcagtcaccgcctccgcataaggagcctttacatacttggtacgcaccacatccgatggagaaccatccggacggaaagtacggaaagcaaaatcggtagtctcctccacttccaaagcaccgtcataaagagctgattccttggtaggcatacttccatctgtcgtatagcgtatttcagtgccgggcaacgggcaagtcaagtcaactgctgtttcatcaataaatgcattcactttatagaatccctgcaaatcgggcacacgataatttaccctcatcacatccatccgtttaaactgcggaacaagctgacgataaaactcttcgagacttggtttagcagccggctctgcccaagctatttcgctcaatgcaatcatgcggggaacaatcagatattcaatgcgtttcatagtcggaatccattcagcccagagattagcctgtacaccccagatgtatttcttctcttccggtgataaccgttcatccgcacacggatcatacgccagtattttctttactgaattctgatcctgcgcataatcaaaatagaaatgttcattcggacaagcaatcactttctgcttttgtgcggtcgccgtaggcaacgcgtctttcgcccaacttctccaccatgtaatagcagcatcggaagataatccgtcggttaccacttcatcccaaccaataagtttctttccgttggcaaggaagaatttctccatgtcacgtacaaaccatgcctgaagctcttctactgaacccagtttttccgtacgaatacgtttctgacagagaggacatttcttccagttggctttctccacttcatcaccacccatgtgcacatattcataagggaaaagctcgaaaatttctttgaacacattcctacaaaactccagcgttgtatctttacccggacagataggagaagagaatgtttccccccacccgattaatccgtcgcacgccaattccggatattgaccgatagccgccaggaaatgtcccggcatatcaatctcgggaatgacatcaattcctctttgtgcagcataggctacaatttctttgatatcatcgtgagtataatagcctccatacagcgtatctccttccacaatgcgtatcttatcttccggaatcaggaaatcggtattatcttcctctttcgcacgtgccatacaggtacgatcctgcgtattgaatttacgccaggcccctttttccgtaagcaacgggtacttctcgatctctatacgccaaccttggtcgtcggacaggtgccagtggaatttattgagtttatacaaagacatcagatccagtacatgcttcacctcatctttattccagaaatgacgggaagcatccagcataaatccacgccattcaaaacggggggcatcttctatttgcacggcaggaatcgaataagtttgtttttctccctgtacttctatcgttgcaggaagcaactggcgaatagtagtaatcgcagaaataaagcccgaatagtcagttgcctctacccgaacagactccggtgtagactcaagtttataagagccgggctttccaccggtatctttcaactggaaatacatatctacctgattctgatcggtagtgacttcaacagaagacgatatgacattccgaagaatctcctgcagatacccgacagccggaaacaaggactgatcggaaaccccaatcttcattccatcttttaaaacaaacgagccagactgctcggtcagactaacgggggtaggtaggattgcaatctcttgcttgacggtgggcgtacaagaagaaaaaacacaagctgatacaatgagtaaagaactacttagttttttgaacatgcggttaactatttaataaatgatttgtcctgtctttaattgaccatctatatataatacaactaaaacatagaaactactaaaagcccggaaaaagttttttttgcgacttgacgtcacagactcctataaatgtttatctttgctagccaatctcaatcaaacaattaattataaagagtcacttcaatgtcaagagagaacatcttaatcaaaacctcatggattagcaccattggcaatgcaatcctgtccgcatcaaaaatcttcatcggtttatgggccggtagtttggcggtagtaggcgacggtatcgactcggcaaccgacgtcgttatctctatcgttatgatttttacggcacgcctcatcaaccgtcctccttcaaagaaatatgtattcggttatgagaaagcggaaggcatcgcgacaaagattctgtcactggtgatattttatgccggtatgcaaatgttgatatcttccattcaaagcatcttttcagatgaagtgaaagagataccatcggctatcgctatctatgtgactatattctctattgtcggcaaactgatgctggcttcgtaccagtacaaacagggaaagaaaatagacagttccatgctgacggcgaatgcgataaatatgcgtaatgatgttgtcatttcggccggagttttattagggttgatttttacttttatattcaaattgccgatactcgattcgataacgggattgataatcagcctctttatcatcaagtcgtccatcggtatttttctcgactcgaatgtggagcttatggatggcgtgaaggatgtcaatgtgtataataagatatttgaagctgtcgagaaagtgccgggagcaagtaatccgcaccgggtcaggtcgagaatgataggaaaccggtatatcattacgctcgatatagaggtgaatccgcagataacgattacacaagcgcatgagattgccggggcggtggagaaaagtattgaaagttcgatagataatgtctatgatattttggtgcatgtggaacctgccggggagtgtcagacggatgagaaattcggggtagacaaggatatggtgtgacacgtgaaaatcttcggcaacaaagaaagctattccgcttctttttcttaactttgcattcatcgttcacattttaataaaaatttgatatggaagaaggaacattcaggcgctatcctatcgggatacaggattttgaagatttgcgcaataatgattacatatatgttgataagactgcactgatttatcaactcgtcaatacaaataagatttatttcctgagtcgtccccgtcgtttcgggaaaagtctgcttgtctctacgctcgaagcctattttctgggaaagaaagaacttttcaacggactggacatggagcagttagagaaagactggacagtgtatccggtgctacatatcgactttagcggcagtaaatatatggaagcagagtcacttcgcgcatctatcaatgttcagctgttactttgggaaaacgtctacggacgtcaggaaggcgaagacacatttagtttacgtctggaaggtatcatccgccgcgcttatgagcaaaccgggcagcaggttgtcgtattagtggacgaatatgacgccccgatgctggacagtaacaataaccatgagttgcagcatgagattcgtggtatcatgcgcgacttcttcagccccttaaaaaagtcaggtaaatatcttcgcttcctcttcctgacgggcatcagcaaattcagccagatgagcatattcagcgaacttaacaatcttcagaacgtcagcatgagcgataattacagcactatctgcggtatcaccgaacaggaactgctgacacagatgaaaattgatgtcgaacagatggcacaagccaacgatgaaacgtatgaagaggcgtgtgcccacttgaagaagcaatatgacggatatcatttcagtaaatcctgtgtggatgtgtacaatcctttcagcctgattaatgcttttgcccaaaagagttatgagaactactggttttctaccggtacccctacctttctgatagaactcctgcaacaaatgaactttgacatccggctgctcgaccgtatggacgccaagccggaagacttcgacaaggctacggattgtctcaccgacccaattccggtgctctaccaaagcggttatctcacaatcaagtcgtacgatgctttctttcgtacctatacattaggctacccgaacgaggaagtaagaatcggctttatcgagtcgctcatcccttcttatctttaccaacctacgcgcgaaagcaacttttatgtagtgtcctttgtgcgtgatttaatgaagggaaaccttgaatcttgccttgaacgcacccggtctttcttcgcctctattccgaacgacctgaacaacaaagaggaaaaacattatcaaaccatattctatcttctgttccgcttgatgggacaatatgtggataccgaagtcaaaagcgctgtcggacgagcggacgtggttatcaaaatgcaggatgccatttatgtacttgaatttaaaatgaacggcaccgcagaagaggctttggcgcaaattaacagcaaagggtatgcgattccttatgaggcagaccaccggaaagtggtgaaggtcggcatcaacttcgacagtaccacgagaacgattggagactgggaaatcgaaacagattaacagcgtacgccacttgcttgaagtagacaaggatatgatgtgacacatgaaaaaggcagcagttgctctcgtctgtgagtaactgctgcctttttgcgtgttctgtgctgtcgtagccgggaaattagggtgtattgccacagcttgctgtggtgcgtttccctaacttgttgtggcatgctccccttgcctgctgtggcatgcttccctagcctgctgcggcacgtctccccagcctactgcggcacacatccctttccgccgttccggttttacgtattcaataggctgttgctttgatacgcagcttgatggcattttcggctgtatccagtaccagttcgcagttttcagaggttacagaactaccggtgacgtccatttccaatgaggtgattttctcaagatcgagttgggttaaggtgtatccgtctcctttcaccaccgtgaatccaccttcgggaaaatgggatggccgcatcttccattgagccacaaacgtcagtttgtccttgtcaagggtgattttctctaccggtgtagagttgtctttgtcgtcgccgccgcaggcggttaccaacgttgctgccacaaggcagaggaaaaagattcttagttgtttcatgcgtctttctgttttctttaaaagggtaaattatgaaaggctgccgccttttttgtttgccatgagggcggatgcgctgtctgcagccggactgtccgtcctcattcgtgacctgcttctttatgcagccgggtcgggggcttcacctcctccggggatttcagggtcgggcgcttcgccgccgccaccgccgccacccgcgttttcgtcacccagcagaatcgggaaacggtaagagcgtggcgttttcaatgccttgttgcttccgctatattgtgtcgtgatgcttagcgcatagagctttccggcttctatggcaggtagcatgatggtgagttgtgacggtgcgttgtgaacgatgacggacactttcaacgggacggctccctcttcgtctttggtgagatagatgcctaccgaagggtcgtcaccgaggattttaatgttgcttccgctgataacggcaggaccgccggaagtgatgacctggctgatactcttcgtcacggagtcggtgatggagttgatgaccggccccgtctgtgccagcccgttgcagattacttttacggctttgagctggtcgcgcagcagttgtcccggtgtgtaggacacaccgagcgagtgcttcgtggcgtcaaactgggcgttctccccgaggaacgaaccgcgtacggtgacgatgtactgtcccacaccgtctaccacgctcttcccttcggcgatggcttccaccttcttctggtcggcaaggtcgaggatgttctcgatggtctcctgccggtactcggtacgctccttgatgatgcgtgctgcgatttctttgttgtgcagactgcctgtgatgcgtgcgcgtccggtgtagtcgcctttttgctcggtcatgatgttgtcgtaaaggtcaacattgagcgtgattttttcgtttgttgccatgataatgattgttttaaggaaagtgaatatctatttattggttacgttctgtgctgcttgtcatttcgcacgcatcttgatagcattaccgtccagataaagttcgaaaagactgtcataatatgtcatgcccccagtagtattagtcatcagatggaacttcataagatcactgtcagtcaaggtgtagctgtcggttcccttaacaacggtttcggctcctggccggacagtggaacgactcaacacgtaatcatatagatctaatttaaaatcagaatccgccggaagttcgttttcaaccgtaacggtggggatggtcacttgattgccattaatcgcagcttgcagacagaggctccgttcactcatatacgttccctcctcccttgcttttatttttccgcctttcagttgcagtattcctgtaggggcaacaagcacttcctgcccctttatgcttttggagatttcagcatcgccttccataatgagtgtggcattatcaccgacagagataccaattagctggtcattatcattcccatcgccggaatatagttcgaagccgttacccagcgttagtttgcaagacgccctaacaaatatgcaggcgatattagttgaataggtatcagcatttccataaatgttgaggttggtcagcttcaatgacgcgccgtttataagcttaaaaaggcttttgttgctagcggtacgggaaatattataattatcgccgctgataggattatttccgccgtcgatagcaatgtgtttgccgtctattgaaaagataaaatgctctgcatccgcagcaacccaaatacttccaccgaggatgatttgtgttggtgcatccgcagtgccgtctgccgtttcaatagcggttttcagttcggctgcggtagtaacaagcgtcttgttgctgaccgtcacaaggcaggtggcggacttttcgcgtgcggtggcggtgatggtggctgttccttcagctacggcggtcaccagtccgtctttacttacggtggctacggaagttttgtcactggtccatactacggattcggcagtcacccggtcggggacaatggtgggaaccagcgtttcggtcgctcccgatttcagggtcagagtctcatgattgagggtgatgctctctacgggcacggagttgtcgtcattgttgtcgtcgccacaggcggttgccaacgttgctgccataaggcagaggaaaaagattcttagttgtttcatacgtcttttgtctttctaaaagggtgaataaatcgttgttctcttttcggacaaaagtaatatgcaacaacgaaaaggtatagccaaaatcctgcattgtatagccaaaatcctgcaaatcttgcaggattgccggaaattccattgttcggagaaacttctacctatgcattgatggaaacaacagcatttgatgataaaagagtatcgccttctcctttaaagtacagacttttgttggcggaactcagtaggagtcatttttaccaattcgcggaaattgcggttgaaggtgcgcattgccttgaagcccgacgctccggcaatgtcttcgattgtgtggttcgcgtagtccggaagcaggagcaagtccatggcatgacggatgcgcaggcggagaagataattttgcaaggtcagtcctgtggcacgccccacagcggcggagagattacgctcgtttgtgccaagagctttaatcaggtcgtcacgcttgaagttgtagtcgaggtacggttgttctttctgcagataggcttcgagctcttcaaacaagtggttgctatcgccggattgcaggtaacagatgaggtcgcccatatcggcttcgagcggtggttgggacagttttccatcctgttcgacgataaaacggcgtagcatctcgtaagtgtaatgatagttagtgtacagccatgcaaaagcaggatagaaaaccacgataaggaaactgaaactaaactcgggtatcggtcccggacagacaagtaaaacccatgcgccaatgccgatactcaacgcataaaggaaagcgcgcatcgtccaccggagttccagttttgagatacactctccggtcaattcttttaaatgcgtgatgtagcggtgttttttacggaaaaagaggcggacgtaaacgaacagttgtacggtataggtgacaccgaacaaggtccgcactgccaacgggagattgtgaacgacacacgcacgccattctgctaaagaatatacacagacgtccgcttcaatgcagcaactcaccacatacagcagaatgaaaacgagcgaaggcgccgcatgcttcatcacattggcaaaagtgacgtatctgctgtcgaacagcaatatcaacataaacgtgaacatcaacgcctgcgaagaagcaagcaccaacaccaatattgagaataagtccaacgaccggtatacgccgaacccgtcaaccagcaactccgccaaatgaccggcagcgataatgagagaagcagcgatgaagaaatggcatgcacgcctgtatttgggattaatggcgtgcgccatctgcttgaagcagacaagaccgaaagatatagacagacatattccgataataatgccgtttgttagtgtgtgtaaagccggtatatccattgcttagcatttattttcccgacaaagttaatgaatcttgacgagaaaccgactagttacaccctgtaaaactcgacaagtctgcaaaatcgtatagaaacaacctaatagctaatcttcactccggcaaagaaacttctcggcagagaaggcccgtaaatatagccggaatcccgattagctcctctatcaaagtccttctgataagactcaaagaggttctgaactccgccgtttagttgcaaatcgactgttttgtatagcttgaagtcataagccagtttcactcccaaatcgaagaaacggggtgtacggatggcttccgcctttcgttcgggcattgcgcccagttcggcgttctcggcggtgatatccatgcgttgcactaacattctcccggtataagttcctgacagggcaatggataaaggtttgatgggagtataagtagctgtgaagtaaccatatgtatcgggagtacggaaaattttcttttctgccggtgcgtcgtcatgccatttatgaggttcatcgtatcggctgcgttgcaaagtgagtcccgcttgtatttgcaggatggaaagataagccactttgccctccagcgttagccccatcactttcgcgccgggaccgttactgcgtggttttaccaatatcccatcgccacggtcataaggttcgcccaacacgaagacatctgtcagtcttgtataaaagccctcgatcaagaaattcgtctggaatactccgaaacggtgatacatatctgcggacgcactgaaactttgggatttctcttctttcaagttcttcgcacgctcaatcattgccactgttccgcccacattttcaatatgcatatcttcatcaaaagcctgcggagcacggaatccggatgaatagctcaaacgcaggtttatattctgtgtcgggttgaaacgcaagttggcacgggggctaaagatgacattatctaccatgttatgcttatccagacgaccaccgatcagaatgccccaacggtcgttcttccactcgttctgcagaaaagcactgtaaatatttaccgtctgatccgtgtggcggtcatatccccacatattatctttcagacgatcacggttatattcaagtcctgccgtgaggtcagaaggcataaaaaaacacttatcaaacgtatgtacatactgcgcgccgcccatagcggttaaatccgttgtttttccataggctttcagaggatcgttacccggtccgtaataactgtcccgatctgtattggcggctgacgcaaagatacttagacggttcttttcatctggcgagaaataatcgaacttcaaacttccaccatcaatcgaatgttgcaactgctctgcaatatgggcttcgtgaggaggacggtccaacatatcccctccccgacggaattcctgcatgtggtgatattcgaaggttagtttggagtaagtgcttgttttcagataagagcggaagcccactgtctgattcttcaatttaggtagttcggtgaatccgtctccgtcataatcatatccggaccggtgacggttctgaccaaagatatacagtccggcacgatgatcgtccgtcactaatgaagcattcagggaggtattgttatcgaatgaggagccgccccctaaagcagtaagggtgtgcgacagctggccggaattgcgcaaaggctctttggtgattatattgatggttcctgcaatggccgaagagccgaacaaggcggaacctcccccacgcatcacttctacgcgttcaatcatgctggcgggaatctgttccaggccatacactccggaaagggcactgaatacgggacgggaatctatcaaaatctgcgtatacggtccgtccagtccattgatgcggacttgctggaaaccacaattctggcagtttgtctctacacgtacaccgggctgaaagttcagcccttgcgataaagtggaagagttagtcgtttcaaatagcttcagatcgacgacatttaccaaagtaggagccaaacggcgcgtcgtttcactgcggttggcggaaaccactaccccatccaaagcaatcgcgtcctcttctatttcaaaatcctcttccagtgtctttccttttttcagagtcacgttgcgggtcacggtcttgtagccgaccgagctaacctccagtataaagttaccttccggcaaattcttcaaaaaataatgtccggtagcgtcggtcacggttcctatcgttgttcctttcagtgcaatggtgatgtaaggaaggtgctctttcgttttcttatccagtacatggcctatgatgttcgcatcggattttttcagttcagggtagtccggatgttcagccaatgcgtatgacaggacacaatacaggccggccaggactaaaagatatttcttcattgtcgttagtcttttaatgtttaaaatcaaaaataataataagggaaagggaagcagcgatcattaatcgttgttcctaactgatgaatactgttcccgaaaagatagactaagcgacaggaggtgctctaagagatatgacgcccggacaagaacggtgatatggctcaacttgcgggcggataaacaggatacataatagagataaagcagcgaccgcgaatgtaggtattaatccgctgtctgtcaccaatacatgattcaacaggtgaatgagttggaattcaaccgtcgtatggctatgttcactgccttttttaaatggatgcgaatggacaatcgttaccccgtttactacatgggagtgagtaaataaagtgattcctgccatgtacgagataaacagtacaggcaaaaaccacttcattatatgtaggtacaattgtttcatccggtaatcttgcacatctattctgtgcagtaaagtcagggtttagtttgtttttttgcaaagataaggattgtctccatgcaaaacaatccctatttataacgattttaaatcttaaccgaatcttaataactgatcttcaccccggcaaagaagcttctcggaagtgacggaccatagatatagccggagtcacggtcagctcctttatcgaagtcgtcctgataggcattgaaaatattctgtatgccggcattcacctggaggttcatcgacttgtaaagtttgaagtcataagcggctttcaaaccgatgtcgaaaaagtctttggtattcaccgttatcggattttcaaggaatcccggaaccggctcgtggggaaccagcatcgaaccggtataggtaccggaaagagcaatagataacggttttatcggggtgtaggttgctgtaaaatagccgtaagtatttggcgtacgcatcattttcttcaccgccggagcttctttgttccagatgtgcggtttgctgtaatggctctgttgcagagtgactcccgcctgaaactggaatttattcaggtaagccatctttccttccagtgtcaatcccagaacttgcgctcctgatgcattgtgacgggtacgtgtcagaattccatccactacctctccgtcggtaagggcaaaaacatccgacaactttgtatagaatccttctaccaggaagttaacctgaaacgcaccaaaacgatgataaatatctgccgaagcactcaagctctgtgatctttcttctttcagattatccgccagttcaaccatcgctacattaccgcctacattttccacatgcaaatcttcgtcgaaagcctgcggagcacggaagccggatgagtaactaaaacgaagattgatgttttctgtcggattataacgcaagttggcacgcggactgaatatcacatggtcaatcagattatgcttatccaaacggccgccaatcaggaatccccaatgatcatttttccattcgttctgaaggaaagcactaccgatattcactttctggtctaccgtgcggttgtatccccacatgttatcttccagtttgtcctgattgaactctattccggcagtcaggtcggaaggcatgaagatgcatttgccgaagctgtagacatactgtgagcctgccatccagttcaagtcagtggtgtttccgtaagcatccaaagggtctctgtcacctggaccataatagctgtcgcgattgatatgctgtgcagatgcaaacacattgaaacgatggttctcgttaggggagaaataatcgaacttcagtcctccgccattgattgagtgttcggtctgctccgccacattcgcttcatgaggcgggcggttcaataagtctcctcccctgcggaattcttccatgtggtgatattcaaaagtaagtttcgaataagtcgttgttttcaggaacgaacggaaaccaattgtctgaccgtgcaatttgggtatttcggaatatccgtcgccgtcatggtcatacgcagaacggtggcggttctgaccgaagatatacagacctgcacgctggtcgtccgtcacgagagacgcattcaatgccgtactgttgtcgaaaacgtcgccatcgccaattcccgtaatcgtatgagataacataccagagttgcgcatcggttctttggtgatgatattgattgtaccggcaatggcagatgagccgaacagtgccgagccacctccacgcatcacttccacacgttctatcatgctggcagggatctgctcgataccatacacaccggaaagcgcactaaaaatgggacgggaatcgagcaggatttgcgtataaggaccatccagtccattgatacgcacttgctggaaaccgcaattctgacaattggactctacacggacacctggctgaaagctcaagccttgcgccaaagtcgtagaattggtattctcaaagattttcaaatctactacattcaccagtgtcggagccagacggcgggtggtttcattacgattggcagatacgactacgccatccaaagcaaccgcgtcttcttctatctcgaaatcttcttccaatgtacgccctttcttcagcgtcacattccgtctgacggttttatatcccaccgaactaacctccagcacaaaattaccttcgggaagattcttcaaaaaataatgcccggtagcatcggtcacagttccgatggtcgtacctttcaaggcaacagtaatatagggtaaatgctcttttgtatttttatcaagaatatggccaacaatgttggcatctgacttacgtaattcgggatgattaggatattcatgagcttgtccttcgagggcaggcaacaatgtgcagcacaggtagacaagcgaaaagatgtatttcttcatttttcgtttgttattcgttttcgataagtattcacatggatagacagataatgccctacctcatgcaaggtacggtatcatcatttaaagaatagagaaacgaataaccgggggtgccctaagtcccactaccccatgatacggacagtgatagtgagtgtgttgcgaacgtccgggcaacaagcataataagaaaggaataaaaagggaaagagcaaaaacaacagccgcaccgtctgccgttaagtgagacagaaaatgaatcagttgcagttcaactgtagaatgtttatgtgccgcccctttcttaaacgggtgtgaatggacgattgtcacgccattgaccacatgcacgtgggcaaagaatgtaaagcttaccagatacgatacaaacagtatcggcaagaagtagcgtgtaatattcaataacaatcgtttcacctcattttttctttgaggcggcaaagatacgaactatttatttaacaatcaattattatataaaattctgttaatatacagccgaggctattacttgaataaacagaatcaagaataccatggcaatcggataaacagttgcgtaagctacgctcggaatattgctatccaccatcgagtcggcggcagcgagtcccggagtacttgtcatccctcccgtaatagttcccagcaaatcgagcagactgattttaaatacgaaatgtccgacaatagcagcaacaagcatcggcaccaatgtgatggcagctcctactccgaacatcaataatccgctttcctggaaagtggctacgaggttctttccggcggaagttcctacttcggcaaggaaaagaagcagacctaactggcgcaacaactggttggcaggtccggacatagaccagataatgggtcctgtcttacctatcgcactcaacacaagagctaccatcaaaactcccccggtcagtcccggtgagaatgacaggctatcagagaaagagatatttattttgccgaacaacacgcccaatacaatacccattgcaatggggaaaaagtccgtatcagatagtttcttcgcattgtttcccaacaggcgggctactcctttaagtccttctttctcaccgactaccatcagtttatcaccaaacttcaaggctagatcgggagacggagataaatcaataccgcttcgacgaacacgagtcactgtacaaccaaagtttttctgtaagttcaaatcacccagctgtttgtttatcatgtcttttttagtcaacaacaaagattctatttcctgtgttttatccaaaggcagttcaccttcttctctattgcctaccaacacagccagttgatccagtgactcttcgctgcctacggcttgtatgtagtctccttcatgcaacaccgtatgggcggtaggaatggatatttcatcattgtgtttcagacgtgaaatgacagcacctgtcataccacgcgcattaatttgcaccaagctgcgatcgaacacattcgcattagtgacgcgataaatacaagtagtcaattccgggaattgtccgcgacgttctatctccaggcgacgggcttctttatctaaatccacccgcatgattttaggcaacagcttgacaaacagaatcacgccgatcactccaaacggatatgcgataccgtaagcaatggatgccagaggagaattggtactgtcgatggcaacagccaaacccggcgtactagtcagcgctccggcaatcagaccgacaacactcggtgtatcgatatcaaatgcatatttcagtccgactgcggtaagacaggcggcgcaaataataagcatagtgatgagaataagcgtctttcctttgctacggaaagaatcgaagaatccgggccctgcctgaataccgatggtaaaaatgaagagcaccaagccgaagtttcctaattctttaggaatgataacaccaaaatgcccgaaaagaagggcaatgaaaataactgccgacacatcgagagataaccccttaattttaattcttcccagcataaatcccaatgcgacaatcaggaaaagggaaaaataagaggaatgcaataagtcagtaaacataaaaaataaaggttagttagtttaagggcgcgaaggtacggattttatttaatcctcacaacattccttgcagcaagtagtcctttcgtcttcaaactccaaagtggcatgatgaatacctgcctcttcaagtgcttcctttatatgctgtttcacttcttccaactgtgtgatattgtcaataacaatatgggcagtcaaagcggtttccgttgtgcttaacgcccagatatgcaggtgatggcaattctccacgccgggttgttccatgataatttgctgtatcttttgagcgtctatccccaccggtactccgtccaacgacaaccggaggctatcatgaagcaatccccaagtagagacaataatgacaacagcaatgccaagcccgataatcgggtcaataatgctccatcctgtataggtgataataataccggaagcaactacgcccacagaaaccaatgcatctgctgccatatgcaggtaagctcctttcacattcagatccttatctttatctttcataaagagccaggcagtcagcgcgttgatgaccactcccaccccggctgtccatgcgatggcagaaccatctacggaaaccggatggaacaatttatctatactctcggcaatgataatgcccacggcaaccaataatataactgcatttaataaagagacaagaatcgtactcttcttatatccatacgtgtaacggctattgggatgaactttctgcaaccggaaagccaacatagcaagcaccaggctggctacatcacccaaattatgcccggcatcggaaagcaatcccagagaattataataaaaccctactccgaattctacgataacaaaagcaatattcaaagtgatgcctataatgaaggccttattgagcgatatcaactgatgattatgttcgtggtgatgatgaggttccatattatatattgttattatatctattatctaaaaaacatctcatcgggagattagttcatccccattccactttcggcaatagtaacggctcccctccagaaaaaacaagccaccgaaatgaatgaatcatcccgatggcttatcccctttaaacacctttaaacaaaatgaaaatatgcctcatatactaactaaactaactaaccctcgaggcatattttaaagaggctgtcgcatcaacctctttttattatagacagctttcgctctctaatcttatttacgagcttcggcaatataaccgagcgcttcttcacattttgcagttacataagcccagtcttctgctgccactttatctttcgggaacaacttagagcccatacctacgcagaatacaccagctttaatccatgcagtcaggttttctttagtaggttctaccccacctgttaccatcagcttagaccatggcattggagccatcaagcctttcacgaagttagttccgtaaacatcacccgggaatactttgcaaagatcgcaacctacttcctgcgcaaaacctacttctgatacagaaccgcatcccggagtataagctaccgaacgacggttacataccttagcaatttcaggattaaacaacggacctactacgaagttagcgcccagctgcaagtacatagcagcagtagccggatcaacgatagaaccgataccgattgccatttcaggacattcttttgctgcgaacttaacgatttcagcaaatacttcctgtgcgaagtcaccacggtttgtgaattcgaaagcacgaacaccaccgtcataacaagcctttactactttctttgcaacttctgcatctttgtgatagaatacaggaaccattcctgtagagccgatcttattcaatacggctattttatcgaattttgccatcttaatttcttattttaaatgaattgatttttcaaactctcaactctccattctcaactctcaacttatttacctctgtacgcgaccgcttgcgtcaccaccagccaatgcttctacttcttctatagaaacaaggttgaagtcaccattgatagtatgtttcaatgcagatgcagcaacagcgaattcaagagcagcaccctgattaggtttagtcatcaaaccgtggatgataccgccggagaaagagtcaccaccacctacacggtcgataatcggatcgatatcataacgttttgaagtatagaattcttctccgttgtagatcatagctttccaaccgttgtgagtagcagagaaagattcgcgcaaagtagaaactacatatttgaatccgaattctttcatcatttgctggaagatacccttgtagccttcagcatctgtgtggccagcctcaacgtcagcatccggtttgaagcccaagcaaagttctgcatcttcttcgttaccgatacatacgtctacaaactgcatcaacggtttcatgatagactgtgctttttctttcgtccacagtttcttacggaagttcaagtcaacagaaacagttacgccgtgacgttttgcagcttcacaagccagacgagtcaactcggcagccttgtcagaaatagccggagtgataccagaccagtggaaccagtcagcaccttccatgatagcatcaaagtcgaaatcagcagcgtcagcttcagcaattgcagaatgagcacggtcataaataactttgctaggacgcatagaagcacctgtttccaagtagtagatacctacacggtcgccaccacgggcaataaagtctgtctttacgccatatttacgcaatgcgttaacagcagactgtccaatttcgtgtttcggtaatttagttacgaaataggcgtcatgtccgtagttggcacagctcactgcaacgttagcttctccaccaccatatactacatcaaaagagtcagattgaacaaaacgagtattacccggagttgataatctaagcatgatttcgcctaatgtaacgactttctttcccataatcttatgttttaaattctaagttattaatattatgaactttcaatttatcattccagccctattttaggggttaacacactgataacatgactattaatctataaaaagactaacaccacatacctttcgtgtgcgggcacaaagatacaacaattttcgtaattacaaaaattgttatatatttgtatcgaaaatattaagattattattgtgtgcgagcacaaaaacctatataaataaaggttatcgtatgaataaattgcccgaaaggatcagaatcaaagacatcgcccgtctggcagatgtatcagtgggaacagtagaccgcgttattcatggacgtagcggagtgtcggaagccagcaagaaacgcgtagaagaaattctgaagcagcttgactaccagcccaacatgtacgccagcgctttggcttctaataagaagtatacgtttatctgtctgctgccggagcatctggaaggcgaatactggacagcggtagaaaccggtattcacgaagctattgccacctattcggatttcaatacttcggtgaaaatcaactattacgatccgtacgactaccattcattcgagaatgccagcgaagccattctggctttacagccggacggagtgatggtagctcctaccgctccgcagtatacgaaaggtttcaccgatcagttgcaggcattggatataccttatatatatatagactccaatatcaaagacgttcctcccctcgccttcttcggtcagaactcacgccaaagcggatacttcgctgccagaatgatgatgttactggcacgggatgaaaaggaaatcgttattttccgcaagatacatgaaggaattgtgggctctaaccagcaagagaacagagaaatcggtttcaggcagtacatgaaagaacatcatccgtcttgtactatactggagctcgacttgcatgccgaacgcaacgacgaagacaatgagatgctggatgaattcttccgtacctatccgacagtgaagaacggaatcacattcaactctaaagcctatatcgtcggcgaatacctgcaaagtcgcggaaagaaagatttcaatctgataggctatgaccttctggaacggaatgtcacctgcctgaaagaaggaagcatctctttcctcattgcccagcaaccggaactgcaaggcgccaatggcatcaaagctctttgcgatcaccttattttcaagaaagaagtgacctgcatcaactatatgcccatcgacttgttaacggtagaaacaatagactattaccatagcaaataacaacaaagtacaactttacaagtacattacatggaaacaaagtatttaagaattaatcctgccgacaacgttgccgttgccattgttaacctcccggcaggagagcatctttctgtagatggcattgaaattacactgaacgaagacattcctgccggacataaattcgcattgaagaattttgctgaaggcgaaaatgtaatcaagtacggttatcctatcggacatgcacgaatggctaagaaacagggtgactggatgaatgaaacgaacatcaaaaccaacctcgccggattgctggattacacttacaacccgattcaggtttctttggatattcctcataaagatcttactttcaaaggttatcgtcgcaaaaacggtgatgtaggggtaagaaacgaaatatggattatcccgacagtaggttgcgtaaacggtatcatcggtcaactggctgaaggactgcgtcgcgaaaccgaaggtaagggagtggatgccattgtcgctttcccacacaactacggttgctcacaacttggtgacgaccacgaaaatacgaaaaagattcttcgtgacatggtgcttcaccccaatgcaggcgctgtattggtagtaggcttgggatgcgaaaataaccagccggacgtgttccgtgagtttctgggcgagtttgatgaagaccgcgtgaagttcatggttactcaaaaggtaggtgacgagtatgaagaaggaatggaaatcctgcgtgatttgtatgcaaaggcttctaaagacgaacgcaccgatgttcctttgtccgaactgcgtgtgggattgaaatgcggtggttccgatggtttctccggcattacagcaaacccgctattgggtatgttctccgatttcctgattgcacagggaggtacaagcgtattgaccgaagtaccggaaatgttcggtgcagaaaccatcctaatgaaccgttgcaaaaacgaggaactgtttgaacagaccgtccatctgattaatgacttcaaagaatacttcctgtcacacggagagcctgtcggtgaaaatccttctccgggaaacaaagccggtggtatctctaccctggaagaaaaagcactgggatgcacccaaaagtgcggaaagagctatgtatccggcgtgatgccttacggtgaacgtttacagaaaaaaggtcttaatctgctttctgctccgggcaatgacctggttgcagccaccacccttgctgcaagcggatgccacatggtacttttcaccaccggacgtggtactcctttcggtacttttgttccaaccatgaagatttccaccaactcgacgctggctaaaaacaaaccgggatggattgacttcaacgctggtgtaattgtagaaaacgaaccgatggaaaagacttgcgaacgtttcattgattatattatcaaagtagcaagcggtgaattcgtaaacaacgaaaagaaaggctatcgcgaaattgctatctttaaaacaggcgtaaccttgtaaattatttttttgatacagtaacttatacgaagttaaaagacatatcgttaacaccatagaattgctatcccctactcaacaagaagttgaacgggacagcaattcttttttgtataataccatatcaaagcctcatcataccattgaactctttattatcaaaatattcaagcaaaaagtttgttcatctgaaatcttttattttgctttgcagcacaaagtactttttatatgaataaagataaagcattagaatcggtaaatgagataaaagagttgatggaaaagtcctcaaagtttatctctctaagtggtctcgctgcaatcatggcgggcatttacgcattagttggcgcatatatcgccacacaagttattacaccgggcactcatttaattgttgcccttgaattgatggctataatagcctcgctcgtattggtagctgctgcggtcactgcttgcatcctgtcctattacaaatccaagaagacagggcaaaaatttttcagccgcctcacttaccgggcattgtggaatttctctcttccgatgctgaccggaggtgttttatgtatttccatccttatgcacgagtattatgacatcctggcttctgtcatgcttctattttatgggctggcactggtcaacgtttccaagtttacttattccagcatcgtatggttaggttatgctttcatctgtttgggcgtcgtagactgtttttgggaaggtcattcattattgttttggaccatcggtttcggcggtttccatatcctctatggtatattgttctatttacactacgaaagaaagagatcataaatgatagaagcattccaatatattaataaatcattcgaaagcaaggtccgactgggcatcatggctattctgatggtaaatgaggaagctgatttcaattttctgaaagagcagctctctctgaccgacggcaatcttgccagccatacccgtgccctggaagaactgggatatatcgtatgcaacaaaagttttgtcggacgaaagccacggactgtttttcaggcaaccccgcaaggcagagaagctttcaaatcgcatattgaagccttagagaaatttctaaaatcaaaataaataattcatcaaaacactactggcttatgaacgctttcaatgaaaatttaaatgagcaacaggcgcagcaacctatgggatgcctccaccgtttctccaaaacaatcaaggttgtcatcatcggattattaatccttctcctgatgatacccatgtttatgattgagaatcttatttccgaacggggacgaacccaagaagaagctatcgacgaggtaagcgaaaaatggagtcttgcacagaccatcactggcccttacctgaatctccagtatccggttgtcactgaaaacaacggtgagaagaaggtttccatcaaagacctgatactttttcctgacgagcttatggtcaacggacaactgaagaccgaaatcctgaaaagaagtatctatgaggtcaatgtatatcaatcggaactgacattgaaagggtcattcagttcggaagaattgaaaaagagcagaatagacatggaccagttgcagtttgacagggcggctatttgcttgaacctaaccgatatgcggggtatcagcgaacaaatcagcatcaccttgggagattctgtttatatattcgagccgggtatggacaacagaggaatagctaacaccggagttcatgcgatcgctaatttgtcggagttgaagcagaacaaaaaactgccatacgaaataaaaatcaaactgaaaggttcacagtcactcaactttatcccgttgggtaaaacaacccgtgtagacctgaaagccaactggaatacaccgagcttcaccgggaactatctgcctaacaaccggaatattacggagaaggaattttccgcacaatggcaagtcttaaacttgaaccgaaattactcgcaggtgatggctgactacaacacctcgaacatcaaggatattgaaaactccagttttggtgtaaacttcaaaattccggtggaacagtaccagcagtccatgcgctccgcaaagtatgccattctgattatcctactgactttcggagttatcttcttcactgaaatcatgaacaagacccgc

SEQ ID NO: 8073 - DNA, 7404 bp, Unknown
  gut microbiota DNA sequence
atggagacggggagcggaacggtatatccgacctcttcaagcaaagggagaggctttggtattgacggatgacacttacctgaaagcattgaatacattgaaaagtaaatatgcttcggaaccgatatgtgctgaagtgtacctggcacaagcccgttatgctattgaaaagcaacagcaggttaatgcattgcagctttgcgatgaggcgattcgtctttatccggggtatgacagaatcaatgctctgaaaaatcttcgggaagagatattggctccttatttgaatgtctatgcagcagatcaggctttcccgaacgaagagatagaactaagagcctcacataagaatctggatggtttcaccgtccggatttatcaggcgaagaaactgataaaagaacaacattactctgtaattcgtccggaagattaccggacacaggacacggtgtttacgttcaaagctcccgaacttggagcttacgtaatgcgtatcataccggatattcgtgcgaagagagacagtgaaagcaagtttgacgtaacacgtttcaaggtgttgacttgtcgtttgccggaaaaacaatatcaagtggtgacgttggacggacagacgggacatcctatttcgaatgcgaaagttacgatgtatagtaacgatgaaaaagtattgcaggaatttacgacggacaaagatggtaaggtggtatttccctggaaatctgaataccgctatttgaaagcttccaagggtatggatacagcgatgccgaagcaaggtatctatgcaggaagttacggatattacggtgacgaagataaagtggcggaaaatatgactttattgactgaccgttctttgtatcgtcccggacaaacggtgtatgtgaaagggattgcctattctcaaaaatcagatacggcggatgtgctcccgaacaaggaatatatggtgactttattggatgcgaataatcaggaagtagggcagaagtcggtacgcaccaatgagttcggttcgtttgccactgatttcgcgttgccttcagcttgcctgaacggaatgttctcgttgaaggcaggaagaggccgtacaagtatccgtgtggaagattataaacgtccgacatttgacatcacttttgaaaagcaacagggaagttacaagttgggagatgaagtgcaggtgaaaggcaagatagaatcttatagcggtgtattgcttcaggatcttccggtaaaatataaagtgatgcgttctacatacagcctttggcggtttgcggaatcggtacagattgcttccggtgaagtgacggccaatgagaacggagaatttacgataccggtccgcctgcaggaaagtgactcttataagaatgatgataaagtatattatcgctattccattgaagctactgttaccaatgtggcgggtgaaacacaatcttctacggatgtcatttcggccggaaatcgttcgttggttttgcaggtggaattgcatgataagacttgtaaggataaaccattcgacacgatgtttaacgtgcaaaacctgaatggacaacctgtggaagtgaaaggaaattattacttgtatcctgccaaagacgaggatttcaaacaactggaagagaaaccgattgcaacgggaacttttacttctaacgaagaaataacgctcgactggaagaatctgccgtcgggaccatatatgttgaaagcatcggtgaaagataatcagggcaaggaagtgactgctgatactaacacgattcttttttccattgaggacaaacgtccgcctgtagaaacgacagtttggttctatggagaaaatatggaatttgatgcgactcatccggctgtattctgcttcggtacgtcgaaaaaggatgcttatgtgatgatgaatgtattctccggtgataaactgctggaaagtaagacgttgaacttgtctgatacgattgttcgcttcgaatatccatatcaggagagttatggtgacggtgtgtttgtgaatttctgtatggtaagagatggacagatttatcaggaacatgcccggctgaccagacgtgtgccggataagacattgactatgaagtgggaagtgttccgcgataagttgcgtcccggacagaaggaagaatggaaactgacgattaaaacgccacaaggacaagccgctaatgcggagatgctggcaacgatgtatgatgcttcactggataagatatggaaccgtcagcagaatttccaaatcttctataatcagattgttccgtattctaattggatgagcggatattccggcaataattcatttaattactggtggaatacgaaaagccttaaagtgccgggattggcgtatgattatttcgtgatgtcttctggtgtaggaaatgtatatgcattgtcggagtctttggctgatggagtggtggttagaggtctggcggttcagagaaaggtgtcgatgacaggaagtgttacaagtcggagcaatgcggcggaagtgaaatatgtaccggctttagtctccgaagcttctgaagatgtggaatttgagtctggatggggccaaacgggagcacttggtaaacttgatgaaacgtccggaagtgaaatgctccccgaagctcctgccgacctgcgtacgaatcttgcagaaacggccttcttctatccgcaacttcgtaccaatgaacagggagaaatctcgttctctttcacgatgcccgaaagtctgacgcgttggaacttccgtggatattctcatacgaaagggatgctgatgggaacattggatggtgaagctaccacgagtaaggaatttatgctgactcctaatcttccccgctttgtacgtgtgggagataagacttctcttacagcttctatctctaatatgactggtaagccgcaagccggaacagtaactctgattcttttcgatccgatgacggagaaagtaatcagtacacaaaaacagaaattcagccttgttgccggaaagacgattggcgtgagcttccagtttaccgtcagtgataaatacgaaatattgggatgccggatgatagccgacagcggtactttcagcgatggagaacaacagttgcttccggtgcttagcaataaagagcatttggtagagacacttccaatgcctgtacgtggagaagaaacccgtactttctcactcgaccacctgttcaaccaacaaagtagaacggcaaccgaccgtaaactgactgtcgagtttacaggaaatccggcctggtatgctattcaggcattgccttctttgagtcttcctacaagcaataatgcgatctcctgggctacggcatattatgtaaataccttggcttcgttcattatgaacagtcagccgaagatcaaagcagtgtttgaaagttggagattgcagggaggtacgaaagaaaccttcttgagcaatctgcaaaagaatcaggaagtgaagaacatcattctgtccgaatctccctgggtgctcgaagcgcaaacggaagagcaacagaaagaacgtatcgccactttgtttgatttgaataatatccgtagcaataatatagcggctttgacccgattgcaggagttgcagaatgcaagtggtgcatggtcttggtataaaggaatgaccggcagccgatatgttactgcctatatcgccgaactgaatgcccgtctgactatgttgacaggtgagaaattaacaggtacagctctctccttgcaacaaaatgctttcacttaccttcatcaatcagctttagacgaatataaggaaatcctgaaagcacagaaagaaggagtgaaatttaccggtgtttcgggcagtattctgcaatatttgtatctcatcgctatttccggagagcaggtgcctgcgaccaataaagctgcttatacctattatctttctaaggtaggagaattgcttacttctccttcgatggatacgaaagcggttgccgctattgtactggataaagccggacgcaagaaagaagcacaggaatttgtcgcttctttgaaagaattcctgaccaagacggatgaacagggaatgttctttgctttcaacgagaatccgtatacatggggcggaatgcagatgcaggctcacgtagatgtaatggaagcattggaggcgataggcggtaacagcgataccgtggaagaaatgaaactttggctgttgaagcaaaagcaaacacaacaatggaactctccggtagctactgccgacgcggtatttgcgttgctgatgaaaggtgttaacttgctcgacaatcagggagatgtacggattgtaattgctaatgaagtgctggaaacggttgctccgagtaaaacaactgttcccggattgggatatatcaaacgttctttcacacagaagagcgtggtggatgcccgtaagattgaagtggaaaagagaaatccgggtatcgcctggggagctgtatatgcagaatttgaatcccccatcagtgatgtgaaacaacagggtggtgagttgaatgtagagaaacaattgtatgtggaacgtatggtaaataatgtccctcaattgcagcctataacagcgaaaacagttcttcaggtaggtgataaagtcgtttcccgtttgagcatccgtgtagaccgtccgatggattttgtgcagttgaaagatcagcggggagcttgcttcgaaccgatcggcagcatttccggctatcgttggaacaacggactgggctattacgtagacatcaaagatgcatcgaccaatttcttcttcgatcatttaggaaaaggagtatatgtattggaatatagttaccgtgtcagccgtgcaggaacttacgaaacaggtctggcaaccatgcaatgtgcatacgcaccagaatatgcttcacattctgcttcgatgacggtagctgttaaagagtaacgcaggacatttgtaagagaaatattcaggcacgcattatgcctattttacggttcattagataaactgaaaccataaaataggcgtaatccgtgcctgaatctatttgatacctcttgatggagagaattatcctctttcgtcaatctgtgttaatctgtgtaatctgtggtgaaaaactcatctaaaacccctacatttgtgcaccaaaataaaaaatatcgcatgaaacgtagtttactatctatattatctttacttactgtcgctttggcagccgttgcccaacctcgtatctcttcaaataaagagacacataacttcggacaaattgagtggaaacgtccggtgacagtggaatataccatcactaacacgggaaaccagccattggtactgaccaacgtcacaacctcttgtgcctgtgccgtggccgactggaccaaagaaccgattgccccgggaggaaaaggagtagtaaaagcttcttttgacgcaaaagcgttaggacattttgagaagtcgataggaatatatagtaatgccagtccgagcttggtctatctgaagtttaccggtgaagtagtgcaggaaataaaagattatacaaagctacttccttatacaattggaaatattcgtttagatcgtgatgagtttgctttccccgatgtctatcgcggacagcagccttcattgacctttgatatcgccaatctttctgatcgtccttacgaaccggtattgatgcatctgcctccttatttgaaaatggaagcggaacccaaagtcttgttgaaaggcaagaaaggaactatcaaactgacgctggatgcgagccagctaaaagattacggattgacacagacttctgtctacctttcccgtttctccggtgataaggtgagcgaagataatgaaataccggtttcggccattcttcttcccgacttctctcgtatgacggaaaaagattctttgaacgctcctgccatgcacatttcggaaacggatattgatcttagtatcccgttgataaagaagaataaggtaagccatgatatattgatagccaattccggaaagactccgttagtcatcagtaagttgcaggtattcaattcgtcggtaggagtgagcctgaagaagacggtccttcctccggatggaatgacgaagctcaaagtaactattcgtaagcgtgacgtaggtaataagaagcatcatttacgtatcctgatgataacaaatgatccgttacgcccgaaagttgaaatcaatatcaaacgctaaatcctatgattatggaacatcctgaaaatagtgaagaatataaggggcttgttgtcaataaaggcattgagcaaccctcatctgtgaatccctacttaaagcggaaacctaagaaacgccaactttcagtagcagagtttgtagaaggtatcgtaaaaggtgatgtcaccatattgagtcaggctgtgacattggtggaaagcgtaaagcttgaacatcaggctgtctcacaggaaatcatagagaagtgtctgccattttccggtaattcgatccggattggtatcagcggcgttcctggtgcgggaaagagtacatccatagatgtattcggtctgcacgtgctcgaaaaggggggcaaactggcggtattggccattgaccctagtagtgagcgtagtaaaggcagtatcttaggggataaaacgcgtatggagcagctttccgtgcatcctaaatcgtttatccgccctagtccgtcagccggttctttgggaggagtggcacgcaaaacacgtgagacgattattctttgtgaagctgccggattcgataagatttttgtggagaccgtaggagtgggacaaagcgaaacggctgttcactcgatggttgatttcttcctgttgattcagttgtccggtacgggcgatgaactgcaagggattaagcgtggtattatggagatggcggatggtatcgttatcaataaggccgatggagataatctggaacgtgccaagttggctgccactcaattccgtaatgcattacatctgtttcctgcgcctgaatccggatggattcccaaagtattgacttactccggtttttataacctgggagtgaaggaggtctgggatatgatttacgaatacattgacttcgtgaaagaaaacggctattttgaatatcgccgcaacgaacaaagtaaatactggatgtatgaaagcatcaatgaacaacttcgtgacagcttttatcataatccgaagattgaagcgatgctcttagaaaaagaacagcaggtattgaaaggcaacctgacttcgtttatagctgcaagaagtctgctcgatacttattttgaggatttgaaataagattaccgggaagcacgctacgttcgt

SEQ ID NO: 8074 - DNA, 10029 bp, Unknown
  gut microbiota DNA sequence
ccacaatagagttttgattgttgttgtgtcgtacgtaaacaatgaaaactttgtcgaatgtttgatttctttggtaaattgaaggataagggtcgttggcgaatctttaaattgaagttaattgatgcacgactttactttgtcagtatcttcgtaggattactgacgggactcgttgccgtgccttatcattacctattacagttcttctttaatctccgccatgatttttttgattctcatcccaagtggtattggtatatccctcttttcctgttgatgtggggaatacttgtatttgtatcctggctggtgaagaaaatgccgcttattaccggcggggggattccgcaaacacgtggagttattaatgggagggttgattataagcatccttttctggaattggttgcgaagtttgtgggtgggatacttgcattaagtaccggattgtctttggggcgtgaaggaccttccgtacagataggttcgtatgtcggatatttggtatcaaaatgggggagggtgcttagtggcgaacggaaacaattattgtctgccggtgcaggtgccggattggcggctgcttttgctgccccattagcttcctcattgttggttatcgaatctatcgagcggtttgatgcacctaaaacagccattaccacgcttttggcaggagtcgtggcaggcggggttgccagttggatttttcccatcaatccttattttcatatagatgccattgtgcctggaatgactttttgggggcaggtgaaactgtttcttttgttggcggcagtagtttctgtttttggaaaattcttttctgtcactactcttcagatgaaacgtatttatcccgctattaagcatcctgaatacgtgaagatgctgtatttgctttttatcgcttttctgatttctatggccgagtttaatctgacgggaggaggagaacagttcttgctatcacaggccatgcatccggatacacatattctttggattgtcggcatgatgttgctgcatttcgtttttagtaccttttctttttcttcgggtttaccgggaggaagttttatccctacactggtgacaggaggacttttggggcaaatagtgggattgattatggttcaacagggtgtgattgcttatgagaatatcagttatatcatgttgatttgtatgtcggcatttcttgtagcagtcattcgtacacctctgacggctattgtcttaataaccgagattacgggacatttggaagtcttttatccttccattgttgtaggtggattaacctattactttacggaaatgcttcagataaaaccgttcaatgtaattttatatgatgatatgattcattcacctgcctttaaggaagagccccgttatacattgtctgtagaagtaatgagcgggtcttatttagatggcaagattgtggatgaacttcgtttaccggaacgttgcgtaattataaatgtgcatcgtgaccgtaagaattggcctcccaaaggacagaaactaatgcctggagatcaggtccaaatagagatggactcacaggatatagagaaactgtatgaacctttagtgagtatggcgaatatttattgagtataggtgttggcagtataaattcagaacagtataaaaagaatgaaacggtgcagaaatgaacgaaagtttttcctactataaagttgaaaaacataaaaacatctgccacctgcaacgaaacgcgtgtaatacactagttaatagatagttgtaacgttgcagatacctgcggcagataggttgcagataaagtatctgcaacacgttatataatcaaagaaaaagccttgattccttgatgcaaagctatgggataattgggatcactctatggagaaattgtggtgtctctacggggaaacgacagtatccttacgtagaaactgtcgtttcctgccttagaaactctcgtttcctaccgtggaaactgtaatttctaatgccggaaacgacagtttcccgcctggaaacgggaagttaatgtatacaataaacttttgccttcctggagaattggcttatgcaaggcttatactgtgttgcagatactttgatctgcaacctatctgcaacagtatctgccacgctccaactatctatcaactagtgcattacacgcgtttggttgcaggtggcagatgttttcatgttttttcaactttatggaggaggattacgcattaaaattagggtcacaagcgtaagtcataaactaaattcacctctgtgtcctccgtgtcctctgtggtgaaaacattattccatgctctttagccatgcaatttcttctttccatttactttcatccggtgtttctagtatcagcggcatattatcgaatctcgaatctcgcatcaatctttcaaaaaatgcttttccgatcaatccttcaccaatactatcgtgacggtctacatgggtgcccactgctttttttgaatcattcaagtgcatacctcgaaggtagttgaatcccacttccttgtcaaactcatcaaataccttatcatattcattgacaatatcataaccggccgtataagtatggcaggtatcgaggcaaacacccacccggctcttgtcgtttacccggtcgatgatatatttcagttgccagaattcgctacctagattacttccttgtccggcagtgttctcaataacggctgttacgccttttgttttttctaaagcgatattaatgctttctgcgatgagcgacaagcaatcctctattgaaattttgttgagagaactgccgggatggaaatttaaaagtttcaatccaagcagttcgcaacgttgcatttcatccagaaaagcggcacggcttttttgaagtccctcttcttccgggtgtcccaagttgataagataactgtcatgtggcaggatatattccggctgaaaaccgtatttcttgcaattctctttaaagagactgatactttcttctgttaaaggtttgcttacccattggcgttgattcttggtgaataacgcaaaagcatttgctcctatttcatgcgcattaacgggggcgaactctacgcccccggacgcgcttacatgtgctccgatatatttcatggttacttctttatttaatattactctgcaaatataacgtttttataggagtatatgtttcttcatttaaagcggggagaaattaaatctcaaaatccggtaaatagtctatcaggactttagtaacctgtttgccttttacctgatctgtgactatcgttgcaccttcctttttaccggcatcatagtttaaagaaaccttttccgttttattgcttacatagatggcagctttccctttttctgtcaggttacaagtaatagtccagtcgcctacctgaatggtattacctttgcgaactacctgcatatccgggcggttctttccatgcgtatccatcactgtcaggaaacgggtggttttacacggaactgttgtagaagagaaatgccagtgattaggatatttcaacgctttcccttgtgcgttcgtcacatttttccagttggttggcgcacagaagaaagtatctaccatcgcttgttccgtttttgccgaactgaaaagatgggcaacagagacacccccggctttattcttaccaataactttcacttcatccgtcagttcctgtatttccataggcagttctacggtatgtaaaagataactccatgttacgggttcttttccttccaattcatcataaatcacaaaaactccggtagttcccaattggatgatatgacgacggaacatatccagcttgttctcatcccatcctttttcgggcgtatattgcgtaccggataattcgccacgtttcaaccataggggagaagtcactttaccataagcattggaagcgtctcctaccatgtaagcgattttctctccttcataccaccgtggaatccagccatatccttccgtcccgatcttctgcgtcattccattcaccaaaatactgttgtgcgcacgagtattacggtaagaatacatacaatgatcgtctgtaaaaccagtgcgatgtccgctactgtaaaaaatggctttacctccgtagaatgtattgaaagcattttgattggctagtgcatgggaagtggaaccgtaggaactggaacggaacgacagcattgcattcttatctatgtctcctaaagaagtattcatcgtaccgattcccgtttcattgaatacttttgccatcggtaattctgcaagagtaggaccttctttgggaagtgctttctttgttatacagcgataccaggtcaagtctccggattttccgaggaaagtcttttccataatatccggttctttctgcaaaatagtgcgtacataagcggctgcccatggattgttacattcgcgtgccaaggcatctgcatacccaactcgtgtaccgtttggcttcagcttactttcatgtgagtttccttgcccggcggatttcgagaatggaggctgttgatagatgacgtagaacgcattgttgttataccagggatcagcaaagaaatcgaatccgctgatacgggaataaaaagcaggaacttcaatcaatgtgcggagattgacctgaaaataagaatcgccattgtgccatcctccatccgtgttgaggcccggcagacgggatacccactcattgtagcaataatccacccaggtggaagccatcggcagttcgccatacgtagcaaacgcagccatattcaggatacggaaagtcatttgccaaacatggttatcagcgatacggttttctaagtgattgacatattcatgatagaatttctttccattttcacgaatcgttcttaagagcagtttcttttcatccggagtcagcaggttataccatgcgtcatacgcggaagtactcatagacagaatggtggaacggttgaaatctcccgcaaagtacttactgttcttccatgaaagaatttcggaaagacgctttataccttctttgtagtatacctcgtctttggttagcaagtaagcacgtaccatggcttcgatattcgcttcttcacggtctacaatcttacgactttcccgaatcagagcggaacgatattgaacgatgtttgtcagcttgacaacctgggtcgtatcaatttcttcttccaaatgtttcagcggatgattcagacatttatcggctttccggatgtaagcctgtgcttccggattgtttttattccgttcgatgatattgtcccaatctttggcatcaagcaagatacggggatgcgtcttgggtaatttagctaacacctcttgtagagaaggcgggttgaatgtacgtatatgctcgtctatataaaaatgagaaacgggcgaccattcttcttttccatccttgtcaacgtaggcatattgccaataccattttcctttttcaaacagtttgaatgggttgaaaaaggcccatttcctttcagcggttatcacttccgatttgaattccgggtcgcgtgcgatccggatgcggtaagtcacttccggtttgtagtcttcttcttccactccgtccaatacggcacccaagtgaggaaatttgtccggccacatgaaacgaggaggattgacagtgatatgctgcccgtccagtggtgaaggcgtttcgcgtacctcgtgcatcaaagtctgttgagtcaggcgcatgattgctttttgcgcatacccgttggcggatagcagaatggtgaacaagagaaaaatagatattcgttgtttcatcatataactttgcatttttttattcgtcgtttgttgttcagcgttcaacgttgtttgaacaagtctttcagacgaacagtcttgttattaatcagtgggcgtgcccaaaaaccgataaaggtgatgtatcctacgaaaacaaggataaacagcatacctgtgcggagtgatgttgcatctgccagcgtactcacaatcatcggaccaccggcaccaccgacgattgccgaacataaaataccggcgaatgaaccgtgatgctgtgaagcggagttcaaagccaatgagaatacgatggaatacatcatggaaatactgaatccgacagcaggaaaagcgatcatagatacttccttgcttccgaataatgccgataataataggatgatggtcaagattccggagatttgcagcaatcgcttgctgtcaatcaacttgagtagaatcatacctacgagacagccggctgtcatcaatccccagaaatagctcacggcttgcgcaccgtcagtttgcggattgactccgtggtattgttccagaaaggtactcataaatatagaagttccctgttccgtgcttacgtagcagaaaatccccaggaaaaacaaccatacatatttctgtttgaataaagccagatatgaatctttggacccgcttttctcatcttctttcaattcaatcttaggaaagcgggagacaccgacggcaatcagcatgactaacaacaggatggtaaatacccagtaaagagatacccatggcatttcccgtggggtgatatcggccaacaagtcgataaagaaacctttaccggctgtataggttgccgggtcaagttcacgaatcagataagtatataccagagggcttaggaaagaagcgatgccaaacatgaattgtgccagttcggctataaatgcatagttttcttctcctcctacagtacgctggagcggattcaatacagtttgcaacatggccattcctaatccgatgatgaaagaagaagctaataacatcggatacgtatgcatacaggcaaacaggatggtgccgatgaacggcatcaggaagccaccgaataataccggtttttcaccgaaacggtcaataagtaatccggcagggatagacatgatggcgtatgccaggaagaaagaggtcgggataaatcccgccatcgccaggtcacttagattgaagttgtggataatgtccggaatgagtggtcccagaatattagtaataaacgagatggtgaaccagaacgccataatcagcgccaacattcctaaattctttctcataatttaatcaggtttggagcagataattgagtaaatacaagtgacgcagctccaatacttccggccttgtttccaagagcggcagctatgatttgagtattcacagcacagtcggggatggcataactacgtgctttttcgcttactttctgaatgtaaaagtctcctgcttcggagagtcctccaccaatcacaatcttttgcggactgaagatattgataaagcctgcaattccgtgtcccaaaaagtcacagtgttcttccaatgatatttttgcaatcggatctccttgtttataaaggcggacaatcaattcaccgttaatctcttcatctgggtaggagatgcctgcgtctattattcgttgactgaagcggcgtaccaaagcagaagtggaagcatagtgttccagacagccgacagaaccgcaagcacacggttcgccattggcaatgagaggcacgtgtcccagctccgttccccggttggcataaccgttgaacaatttgccgtcgatgactactgcaccgccaatacccgttcctaccgtcaagaaaacaacatgagtggctccctgaccggctccgtacattgtttctcccagtcccatcagattggcatcatttcccaataaagccggaagtccggtttccgtttcaatacggtctgccaagtgaatgttttcccagccgttgatattttccgcacctcctaaaacaatacggttcgtacaatccacaatgcccggtgttccgattcctataccatcaattttgtagtctttttcctgtgcaaaggctttcacttcattgatagcagtaaccaactgtccgatgacagcttctgctgatacatcggctttcgacggtaacttcccttgaaagtaaaatacgccttcattatcaataagggcgtattttactgaagttccgccaaggtcaattcctatagcgtattctttctccataccacgttaatacttaatacttgatacttaatacttaatacttaaaaactacactctttccgcccaaatcggtgaactccaagcccattgtccgtcacgttggcgaacgcgtacatagtagtaatccgtatcccgctgcggctctttatcttccatgtaatgttccaaagtgaaacagctttccggcatggcacgattgaagagaatagcctcgctcaaccaaccgatcatgaagtgtgaacgtgaaccttcaagcaactcgcccaacgtatgttcaaacttcttgccattgaattcggcaatgaccttaccgtcttttggcatttccacatcaaggattacagcttgcatggctgctgtagtcgtattcggattcttgctgctgtacatatccagttcggtttccttgtcgccaacggatacaatacggttgacatgtgtgtggaattcagtttcaccttcttgcggagaagtgaatgctgcgccacggaaacaaggagttacactatgaatctgtcctttgtctaccgacagtttgccctgccaatgtacgtatttctcttcacgattccaaccaaaatcaactttaactttgcaacgtaccgtatcaccttccggagcaacgggagtcaacggaccgctcatacgagccaaaatctgcccgttctttacaatatctacgtagtcgatacagctttcacccgtgacattcagatagatacgacggctgttaccacgaacaacatcacccatgaaagcgtcgttgaggcggaagtcgataataatcttatcaccggttgcggcacatacgtgacgggtgcgtagagcttcccaaatggcatcgcgagtcagtgacggagccaaaacaccgatgcgtccgtcgccatagcttcccggataaccggaatgttggtcggtggaagccatgataccaaacttattgcccaattcaagaccatattgaatggttccttcccattggcgtggtcccatatcatgcaaataggggtagtctccctgatcgctttctgccagaccgtgacgggaatacatttctacgaatggagtaatatctccttcggtaaagcatttccagttgtaaccgcgataaccaccctgataacccatgtggtgcggggtaacgaataccttatgtccttttgctttttctttccagtcctcgattgaagtacattctacaagtggtgcgtccaaatcatagttcagcgcaacatggtctccatgttccatactatgagcttcgtatcctacaaaagtcaggaattcaccttccttgttatactcatttgtcatttttacatacttctcataaccgccttcacgcaaacgcttgaaagctcccgtgtggtaatcgatcacccatttcaggcggggatcatctgctccgggaatatccggccacatagcatgaggagtaacactaacaaaatccaattgtcctttcgctgcttcaaaagcatcgcgcatgtcgccgtgtccgtatgtgatgttacagtggttgtgtaagtcgccccaatacattttgaggttgctggctgatggcataattttcttagcctctttgcttcctgctgcgcaagaaccgagcaagctgcccgaagctgccagtccgaggaaagaccagcctgtgttttttaaaaactttcttctatccatgatataattgtttttggttaatctttatttatataaatgggaatttatcggttaaataagaatttatcggttaaataagaatttatcggttcttacaattatatatttattgggggtgccctgaaagggcttaattatatagcgtagggcaacgccctacgaaaaaagcacaccagccacaagccctgaaagggcggaactgtataca

SEQ ID NO: 8075 - DNA, 19894 bp, Unknown
  gut microbiota DNA sequence
cttattgctattttcgaagaataagcggttggcattcaaaacatcgtttccgtatgaccattggaagaaaatactcaagtcgaatcctttgtattcgaagttgttggtgaatccgcctgtatgcttcggcataccattaccgatcatagtgcggtcgttgtcgtcgatgataccgtcgccattcaagtctgcgtatttcggcatacccggttgtgtattactctcggaagagaaatacggaacattgcgtttcagcgtatatgtatcacccgctttatcgaaatcttcatatttgtatgtaccttcataaatgaatccgtacatcattcccatcggataacccaccttggcgatgtaactatattgtgagttgtagttctggtcgaacttggctgcactcaacaaggaggattggttttcggccaattctaatactttattcttgttaaatgcaatattgaagttagtagtccatgagaaattacggtttttgatattggtagtgttcaatgtgaactcgataccttggttgcgtacttttcctacatttttcatggcactgaagtagccggaagaggtggggagtgcagtattcagcaacaaatcacgagttgtcttgtgataccagtccacagtcactccgatacgttcgtcaaggaagcccaagtccagccccaggttccactgttcggtagtctcccatttcagttttctgtttcttaaggaagtgggcactgtacctacacttgtcagactgttttcgaacggatatacgccactggggaggctaccgatcgaaataaaatctccgactttatccttcaatatctgatataaagcatacgtatcatactcgcctacacggttgttaccggtcaatccccagcttgctcttaatttacctgaagaaacaacagacttcaatggtttcataaaatcttcctccatgaatccccatgccaatgaaccggaagggaagtagccgaaacggttatcaccacggaatttggaagaaccgtcggaacggaaagagaccgttgcataatacaatgatttatagttatagttcaaacggcctaggaaagaaagcatagaccaggaactctttaatgatttagtcgtactgggagttccttcactcattcccgccatgccgagtgcttcgttcggaatctgtaccgttttgtatgaatagtattcatagtcggaattctgcagggttacacctaccatgctattgaagaaatgcttccgtttgatattggtctgataggtcagaatattttcattcaaccatgttgcacgttgagaatggtagatttctgcatttaccttatcggatgatttcggattaccataacgggtctttgagttgttgaatgtttcccctttgcgggtatcgaatgtgtaaccgcctgaaactttcaacttcaatcctttgataaattcatattctgcaaatccgttgaactggatatagttcgcatacgtcttgcgatattcgtttttcaaggacatgataggattgaaacgataatcgttggtattgtttatcgcgtcgtccatgatgttatccatcaacgagtttaatggtctgtccggttcggtcacggggcgatatccccatacactatagaacaggttattcataccactgtatgagttctgggaaggagaaccaccagtggttgtagtgcttgaatagttggttgtcagatagattttcagtttcttcttttggatggtagtacccatacggccttgtacacgtttgtagtttgattccaataagataccgtcctggtcataataagataaagaagcattgtagcgaactccttccgaaccaccggtcaggctaacattgtggctttgcatccatgcgctgcggaagatttcatcctgccagttatattgcgggatattcctataatcttccagtccccatttcttaccgtcataattcatgaagtaggtagtttccatatctttgggactacgttctgcctgtagtttgacgaactcgtatgcatccatcatcggaatcgttttggtgatatgctgaataccgaaacttccgtcatatttaattttaggctgaccgattgttcctttcttggttgtaatcatcacgacaccattggcaccacgggcaccgtagatagcggtagcagaggcatccttcaggaaatcgagtgactcaatatcgttctgattgatggctgcggctatggaggggtcttccaccgggaaaccgtcaatgacataaagaggagagttgtcctgtgtcaaagagttgttaccacggatgacgatgttcatctgtccacccggcataccttcgcccgaacttacgttgacgccggcaatacgtccgcctaatgtctcgccgaaagaagcagtcggagtgctaagaagttctgccatgctggctttggcaacagaacccgtcaggtctctcttgcgtatttcctgatagccgactactaccacttcgtccaatgtctttgtgtcttccttcaatgtgataaccattggcttttgagtatccgcctttatttctacagtgacataaccaatgaaagaaataaccaatattgaattcttattgggcacgttaaaagcaaatttaccgtcaaggtcagtgattgttccttgcgaagtaccttttacctgaacactggctcccggcactccttctcctaagttatccttcactgtacctttaacaagtacctgtgcaagtacaaaagaaacagaaaacaagatcagtccgatggaggagagcatcctttttctagtttgagtggataaatgttttttcatatattaaaaattaagtgattttattgaatctacgcttgcaaagatagacggattgaatattctaatatggatagaattattcaagattggtgcaaaatcatacaatttttctgttctcataaactatttctcttttacggattctaataattcggataactctttcactatgtcgggatgttgttttgatacattcgttttctccgatggatcggaggataaatcgtaaagttgaggctgtttgtcgttgcctaactccattttcgtccaatgttcgatggcggggccgtcgctcggttcgatgtatttccattgaccttttatgatggcaagtgtgttattgagattttgttgaacgacatactcacggtttgtattatttttgccgaggagtacgttcagatgttcctgactgtcgggagcagctcctttacgtaaaggttgctccaaaagggaggcgagcgatgcatacacatctatttgagagaaaagagcttgttgcttgttcggctttacccgggcaggccagcggacgataaatggaacgcgtgtacccgcttcgtaagcgctgtattttccaccacggtagatacccattggagtatgtccgttgagaagttcgtaagcttggtcttgatagccgtcgtcgataacaggaccgttatcgctggtaaagatcaggatggtgttgtctgcgatgtggaggctgtccagtgtgtgcatgatttcacctatggtccagtccagttgcaggatgacgtcgccacgagtgccgagtccgcttttgcctgcgaaacgtgggtgggggatgcgcggtacatgtacgtcttgcgtacccatatataagaagaagggttcttcctgatgggatgcaatgaaatttttagccttatgagtgatgatatcggctatgtcttcatctttccaaagggcggattttcctccggtcatccaaccgatgcggggaatgccgttgataattgtattgttgtgtccctggctgggctttaaagtgacgagctccggattctcttctcccgtaggccagtcgcctactttgtggtcgtagcttacggtgatagggtcattggggtcaagtcctacgacatgtccgttttctacaaatacacaaggtacacggtctacggtagccggaataataaattcgtagtcgaaaccgatgctttgcgcgttaggggtaattgggttgttaaagtcggttccacctttcggaccgagtcccagatgccatttccctactgcaccggttgcgtatcctgcatctttcagcatatctgccatggtgacgcaggtagtgtcgataatgagttcggagttaccgggagcgattcctgtgttttcctgtctccagggatacatacctgtcaggagtccgaaacgggaaggggtgctggtggcagaagttgcataagcattggtgaattgtactccttgtcctgccaaccggtcaatgttgggagtgctcacttttgttgctccataacaacttaaatcaccaatgccgagatcatctgcaaatatataaataatgttaggcttttggctattctgcccattgttcttttggggtgcatgattgcatcctgacagcgtgacgatgccagacaataggggaagtagacgcgaaacgtttttcataatgctgaatgttttaggaaataatgtaatgaacacaaagataagcgaatggaagaaaaagaatgagtaggaatgtacaagtgaagtacaaaatagtacacttaagaagttaccttctttattcgggcgaagatgtccggactaagaaaccgtttatatcataaatttaggcacggatcacacggattaatgctgttgttctcatactcatcgtttttttatccgtgaaatccgtgtgatccgtgcctaataatataagattattttgcaagagtgcttatagagttacctgttaatctgtttcttctccgtctccttcttcttcgctctcttctcctttacgataagccagcggactgacgtgataaatctctttgaaacatttactgaaatagcgggaggaggagaacccaatccggtcagaaatctccgtgatattcagttccgggttattccttaacatgacagcgccttttttgagacgtatgcttaagatgaaatcattcggggtctggcctgtaactgctttcaatttggtgaacaggtttgtacgtgccatacccatttcacgggcgaagatattaacgttgaaatctgtattgtccagatgacgttcgataatggccatcgcgcggtcgagcatctccttatccatcgggttggtagccaacatttgagcaaaagcctgcggttgtttgctgaacttctcttgcaatagccggcgggagttaaccaggttattgcagcgggaaatcagaagattggtattaaacggcttcgtgatataatcatccgcaccaatcttcaaaccttcgatattgtgctctatagcagtacgtgcggttaataataccaccggaatatggcaagtgttaaagtccgtcttgatctgtttgcaaagttccgtacccgacatgcgtggcattacgacatcacttaaaatgatgctcggcatatccttctgtatcatctctaatgcttctactccgtcggaagccgtactgacttgatagaatgtttcgaaaataccgactaacatctgtttgatagattcattgtcttccactatcagcattttggcgtcttcgatgcgcttgttatcttcttctttccattccgaatcagggattatttctactgaaggaacaatagtctctgtttgctggatggtttccgtatcatctttcgctatttgctcttctgtgaagtgttccttgcctagtttgagggtgataatgaaactgcttcctttgcccggttcgctttctacccggattgtgccgtgatgaagttccacaataccttttgtcagtgccagtccgatgcctgtaccggctccggtattcagcgagttgagatgttcggtctgatagaaacggtcgaatatcttatcaatttcggcagcggcgatacctgtaccggtatcttttatttcaatgatgacatggtctttctcctgcgatacattaatcgaaattgtatcttcggccttggtatgcttcactgcattagacagcaggttgtttattactttctgcatctgcttttggtcataccatacttcaatgtcatccttctgtttgttgaacttgaagttgatttgtttactgctcgcatattcgaggaagagcagataattctcatacaggaagttaaccaggttgtgctggcttactttaatcttcatgtgtccctgttcctgtttccggaagtcgagcaattctgtaatcagttcccgcaattggagactgttcttgtagattcccaacaccttattatatatattaggcgtaaatgtctgcacctgcagcaaagtttccacttgtcccacaatcagcgttaacggtgtgcggaattcgtgcgagatgttagtgaagaaacggagtttcgactggttcaatgcttcgaggtcttcaatatgcttcttctcgtacttcaaagactcgcggagtttgatgcgcgaattatagttctgaataagataccataacaggctgatagtgacaatggtataaatcaggtaagcccaccatgtctcataccatgaagggagtacgataatcagcagtctggcctcttttattccttccctctgtgatttgatgacaagggtatatttacccggattcaggtttgtataagtaatcagcgtttgcttccggtaagtatggttccattcgtccgagaaaccctctaggcgatagagaatttcatctctgttggcagggatgaagttggaagtggcatattcgatgctaaacatcgattgattcgctttcagactgatttccggagtatgacagatcgactgttccaggatgccgctttcatctcccggaactacttcttttccgttgacaagcaggcgggaaaaaatgatattatacgatttaggagtgaaatgtaatttcttctcccagaaagaaatcattccctgaataccgccaaggaatacttctccgtcatgtgtcacaaatagtgcgttttcattgacggcagtcaacgggaacccattttccgtaccgtaattatagaatttcttgcttggatagttgaactgtgagaatccctgattggtaatcagcaataagtctccttgctgtatggatgattcgcatacttcgtagatgcagtcactggataaaccgtctttctgtacgtcaaagttctcgaagtcatcactttccttgcggtaacggtcgagaccacttccggaggtacagaaccacaaattgccgtcgctgtcctgcatgatgctgttgacattgttgttgcttagactgttcggattggcaggattatgcgggtaattagttagtttattgctatcgaactgataggagtaaacgccctctccggtggctgcaatccataatgtgccgtctttatcaatgcaaaggctggctaccatgccaatgcctctcccttcttttgtctctttgaagagttgctgacaagtccctgttgccggattgaaaagacagacaccattttgtgtggcaacgaccagtttatttttatatggcacaatgtcgcggacaatatctgaaggcagtgaggttggatctcccgctttcattcggtaggctgtgaaacgattggtacgcaagtcgagtttgttcagacctcccaaatgtgtacctacccacataatttcattatcctggtcataatagatcgcttttacattattatgggaaatactattctttccttcttcgtggcgataccaccgataggtgttatcctcccggttatacacattcacgccgccgccttcggtacaaatccacaggttcccgtccttatcttcagtcattctgccgacgatcgggctacttaaaccttctttttctgtatctcccgttttgtagcgggtatagatttcatattccgggttgaagtaattgacgcctccgaagtaagttcccagccagattgtaccttgttcgtctttcacgatgcaccagatagaagagtgggtgaggccgtcgggtttgtcattattggcggtataaagatggaatttacctgtgcttttgtcgtatcggttcaggccgtgaaatgttcctatccacaggttgcctgcgttgtcctcgcaacaacttctcacaaagtcggagcagaggctgttcgggcttttcggatcgtggcggaagttttcgatgcttccgtctttctttatgtggtaaagtccttcttcccaactgccgatccataactccttggcagaatcttcatagatgctggcgatatttcctttagtaataggttgtgaaagctccttgttttccgacaggcaataaagcccgtttcttgtcgttcccatccagaggttcttctttttgtccagatggatgcaggataaagagatattctttccggcgagatggtagtaaagatcaaagttgcctgtgctttcgttcagcacgaacacatcttctcttttacttatatataatctctcattataataaatagcgtccacattgccttgcagcaacgttttgaatttttgtgtcgtcagatcaaattctgccaccccgtccgtacagagcaagtatactttcccgtttttgttcccggtgatgcgcaacacagtattgctgaacaagctgttcggatcgtttttattaagtttgaaacttttaatatcgttaccgttatatcggttaagtccttcacgcgtaccgatccatataattccccgttcgtcaatataaaggctattaacagagaactgggaaagcccgtcgtccgtggtcaaatgactgaaagtgatgttttgaccttgtgtgcggactgcggctacgcttaagaatagcagaaataaaaggattgcttttctcactaatttatattttaaggtgtttacatctatgcaaatatattgtttttattcgatttcagtgaatcttattagaagaaagtaactatatttgtatcattcaaacgaaagatatatgaaagtaaagaaaattagtgcggctaacgtggaggcttgttcgcttcctaaattattcgatgaagaaaaaatagattttcagccggttcagtgtgtcaattgggctgaatatccatacaaacccaaagtgaactttcgcattgctcatacgcagaactcaattttgctacactttaaagtgaaagaggagagtgtacgtgccaaatacggcgaagataacggttctgtatggactgattcctgtgtagaattcttttctatacctgcaggtgacgggatctattataatatagaatgtaattgcatcggaactatcctggtaggtgccggtcctgttcgtaacaaccgggaacatgcaccaaaagaagtgactactcttgtacaacgctggtctagtctgggtaatcagccttttgcagaacgtgtcgaggagacagactgggaagttgctctcatcattccgtatgctgtattctttaagcatcagattgaatcacttgatggaaaggagataaaagctaatttctataagtgtggtgatgagttgcagactcctcatttcctttcatggaatccgatagagattgaccaaccggatttccatcgccccgatttcttcggtactttggaatttgaatgatgaattgaatttctggatttgaagatgaatcactaatgtcgctgaatcactgaagtatcttctatttgtaaaaatattatcttttgcgtcatccatctataaaaaagaagggtgacgcttttctttgagcatcaccctttctttttatagatgttacattgtttatttcacaatccctctttccgagctcttcacgaaatttacaatattctcgatttcttcactcataggaacctggtcgataattttctgtacggcatcctgaacactgaaattaccctgataaatcaaacggtatgcattagcgatgtgacgtaggattctttccgatgtattgtgatgttgggagagaactacggcgtttacaccgtgatatgctaccggatttcctgacatgataacgtacggaggtacatctttagatatacggcatccgctctgtatcagtgtccagctacctatatggcaatactggtgcaaggtgacatttccacttaggatagcgcaatcatccaacgtacattctcctgcaatagtggtgccgatacctaccacacagttattgttgatttgtacgtcatggcaaagatgtactttatccatcaggtagtttccgtttccgattttggtagcattgccggcaaatgtagcgcggctgattactacattctcacgaatatcgttattatctccgataatcaggctgctttcttctccagtatagtggaaatcttgtggttccgctccgaggacagcattctgatgtaccttgtttccttttcccattttagtaccttgcaggatactagcgtaagacatgatgacgcagtcatccccgatctctacattcttttcaatgtaggcaaaaggcagaacagttacattcttgcccagctttgcttcgggatctacgtaagctaacggactaatcataatagtatatgtttaaagttattcttctcttccaccacccagtgcctggtaaaggcttactacagcctgcatccgatcaaagcaatcagaaacctgtgaaatttgtgcgctcaagtaagcctgctgtgcagacaatacttccaggtaggttgaagtccctaaattaaacaattcttttgtatcttccgaagctttttttgcagattctacttgcatttgacgagattctaccttttcactcgtcttttggtataaacttagcgcattgctgacttcactaccggcattcaacaaggcctgctggaaagataacttcgcagattcttcctgggctttggcagctttcagacgagcgatgttttgtccccggtagaacaatggctgtgtcagcgaaccgacaacagaagccagtaatttaccaggattaacgatgccggctccggaattattagtccatcctgccgaaccgctaagcgtgatttgcggatagaaagcggcacgtgcggagttggtgtcataatagcagcctgccaatgacatttcagctgcttttacgtccggacgattggataacaactggatgggtacaccagccgaaagttcggtcggaagcatttgtgcttccaatacaccacgtttgatagcatggggagcttcgcctaaaagggtagacaatgcgttttccgtttcgcggatgctctgttcgatatcagggatgctggcgagtacctgcgcataagcagctttgctttgttccacgccggcagaattgatgttgtacatggcagcgtccttcatggcttccattgtttcggcattctttttcaggatttctgccgtagctttggttatttccaactggcggtccaacatcattaatgtataatacatattggcgatgttagagatcacctgtgtctgtactgcctggcgataagcctttgtttgcttcagagcaacttgggcacctcgtttggcgttcagcaactgaccgaataaatcgacttgccaactggctgtgacaggtaatgaataagtttttgtagctgcattcttgtcaaagctgctgatcgttccttgcggagacaatcctaatgatggggcataagccaggcgtgccgacatgagggacgcttctgctgctttcacattttgagcggcggacaagaggtccgtattttgtttcagtcccgtttcgatgagagactggagttgtgggtcggtgaagacttctctccacggcagattaccgaagttggctgtatccgaaaccagtgtatcattatccgctaccggatcgcgatacaggccggaagtagtgatgtcttcgggtctgtcatacgacttatagatgtggcagctgctcaagagagcagttgcgcacaacatatatagaatctgtttcttcatatcgaatttcattatttagcgtattgttcaatctctgttacggcatctgtattgtcgatatcttcccattccatcggtttaactttctcttgcagatactggaagataacaaacaagacaggaacgatgaaaatttggcaaatcataccgattaacataccaccgatagaagcagtacctagtgtacggttaccgtgggcacctacaccgaaggcaaacatcaacggaagcaaaccgactaccatagccaatgatgtcatcaaaatcgggcggagacgggcaccggcacccaatacagctgcccaagtgatactcatacccatcttacgacggtcgagggcgaactctacaatcaggatggcgttctttgccaacagacccatcaacatgattaacgcgatctgcatatagatattgttggacatcgtacccagaatcatcttcaatgccgaaatattaccgatagcacttacaccgttcacaaacaggaagcttcctaacagaccgaacggaacggataacaatacagccagcggaagaatgtaactttcgtactgtgcactcaacaataagtaaacgaatacgaaacagagcacaaaaatcagtccggtagcacttccgctactttgagcctcttcacgcgccataccacctaattcatacgtataaccggtaggcaggttttcttgggcaacttgggcgagggcagtcaatgcctgaccggatgtataaccacttgccggagctaccattactttcatagaggtataaaggttgaaacggctgataatatccggaccatatactttctccacagagatgaactgggcaatcggggccatctcacctgcactattacgcaccttgatattcttcaaagattccaagtttttgcgtgacaatggatctgattgaatcataacacgatacatcttaccgaaacggttgaagttggatgcatacaaacctccgtaatatccttgcatggtagtgaggatatcgctcgggctgatacctgcttttttacaagctgctgcatcgatgtcgatcatgtattgcgggaaattcgggttgaaggaagtctttgccgaattgatttccggacgtgcttccaatgctgccgtataatcattaaccacatcgaagaatttgttcaggtcaccaccggtcttatcttgcatatttacctcaatatccgtagatgccgagtaacccgggatcataggaggagcgaagaacaatacctgtgcttctttgataatcttttgtgcacgcatatacaaggaaccgactacaacgtctgaattctgtatcatagaacgttcgtcccagtttttcagtttgatgatgaaagaaccgtatgacggtccctggccaccgataaagctgaatccggaaatcatggtacgtgacaataccgcaggatcggaagcgatcagactgtctacacgtgccaggattttttcagaacggtcttgggaagtacccggaggcaatgtcactgctcccatcagcgttccggtatcttcattaggcaccatacctgtcggagtggtgttcatgaagaatacaagtatcgcaatggaagcgacaactaatcccatagacaaccatttcttctggataaagaacaatactcgtttcttataacgtttcaggattgattcgtatgtatcgttgaatctgtttttaaacttcttcgtactcattccgatcagtgccagaatactaagcactacgaaaattgcagtaactatcggattgatactgaacaaaccaaagatcatgccgagaatggcaataagcgtgaaagtaagtgtaattcccggatgcaacatctttccgatagcctcggtatatctgttgatcatggttgtatgggctgccgtataggctactttcatacgttcttttaatgtggagtcttccgtagttccatcttcttttttgtgaggtttcagaagaacggcacacaaagccggactcaaagtcaatgcgttcaatgcggacagaccgatagcgattgccatagtcataccgaactgacgatagaatgttcctgctgtacctcccatgaaacttaccggaacgaatacggccatcatgaccagcgtaatagatacgatagcaccacccaattcattcatagcatcgatagaagccagacgggcagatgtataaccttggtcaagcttggcatgcacaccctcgacgaccacaatcgcatcgtcgaccacaatcgcgatagcaagcacgagcgcacataacgtcaacaagttcaaactgaatcctaccagggacaggatgaagaaagtaccgatcagagctaccggaatggcgatagtcggaatcaatgtggaacgtaaatcctgcaagaagatatacactacgataaacaccagaataaatgcttcgatcaacgtcttcaacacttcatggatagaagcgaaaaggaagtcgttggcattcatggagatgttcagcttcaatccggtaggcaacgtttttgatgcttcatccaacaatgcctcaatatcactgatggtctgtgtcgcattggttcctgccatctggtatacgatacaagtcacagacttgtgcccgtctacccggttggtaaagttatatcccaagcggtccagctgaatttctgctatatctttcagacggagtacttcaccgtcaggaagagatttgataacgatattttcaaactcttcaggctgttgcaagcgtcctttataacggatggtgtattggaaagtctggttactgcgttcaccgaactgtcctggagcagcttcgacattctgttctgccagagcagcggaaacatcaccgggaacgagcttgtattgtgccatgacgtccggtcgtaaccagatacgcatagaataatcctgacccaaaacgttggcgtcacctacaccctgtacacgttgaacttgaggaatcaggttgatcttagcatagttttcaataaacgattcgctatatgtatctgtctcatcatagagagagaatactaccagcatggaagtctggcgtttttgagtggttacaccgactctagttacttcggcaggcagcagaccttgtgccatagagacacggttttgcacgttgacggcagccatgtccgggtctgttccttgtttgaaatatatggatatatcaccggaacccgtgtttgacgcagttgaggtcatatacatcatgttttctacaccgttgatttgttcctccaatggagcaattacggaattcaatacggtcgatgcactggctcccgtataggtggctcttaccgaaacggtaggaggcgcgatgtccggatactgcgtgataggcagtgtcgccaatccgatagcccccaggatgactatcaggatagaaataacggttgatagtaccggacggttaataaatctatctaatttcataatgattatctgattattagttgaaggctgtggctaaattaccgtcgtgttggtctttcaaatgttgttgatagtttgcttctttttgcgccggtgtgataggctgaaccttctgaccgtctttcaggttttgtactccttcgattacgattttatctcctgaattcaaaccggaagtaaccaagtactcttttccgttatccagattgaagattttgatttctgtatattttaccgtgttgtccggttgcaaaacgtaaacgaacttcttatcctggatttctactgttgcagactgcggtatagtgattacattctccatggtataaggaatcaggacgtttgcagtacctccgctacgcaatacatgttccttattcgggaagatagcacggatgcttaccgaaccggtggattggtcgataacccctgtgatagcatctactttaccctctatatcgtatgtggaaccatcaattaattgcagtttgatagtcggtattttgctgatttcttctttgatagtgctaccggacttggtcattgccagcaattccttttctgtcattgagaagtatacatatacttcgtcaatctcggaaacagtagtcatcggtgtagcgatagaagggcttaccaatgctcctacacgataagggatattgttgataacgccatctgacggacttttaacctgtgtgaatgacaagttctgttgagcagtggtcagttgtgcttttgcttgtgccagctgggctttggtctgtgccagggaattttctgccattgccaggtcatagtcactgatgatttgctttttgttcaactctttcttattgtcatacgtcatctgttgagtactcactgctgcttctgctgtagccactgctgctttggcagtgcgtacagctgcttcgtattgagtcggatcaacaatgaacaacacttgtcctttacgtacagctgctccttcgtctacacagagtttcgtgatgaagcccgatacttgggggcggatttctacatcttgttttcctttaattgtagccggataggcagttgttaaattagcagtcgttttttgtaactcttgtactgcatattcaggaacctttcctgtgtcattgcccttattgccacaactagacaagagggctacgcaaaatgcaaataaaacaattctacttttcatacttataaatatctgttttttaatttaatgcgtttgttgccagtgtgctgttcatccatatagataagggggttaaggaagaaaaaccggaaactaaattccttaatttagtttccggttgcaaaagtactttaaattcggtattcttgttctctgataccgtgttttttaactatgttttttactttattttatgatatacaggagtcataataaaacttaactcataatcctgataaggaagacgatatttttccagtgggatagctccccaactgttgacacaggcaagtccggtttgtgccttgtcgatacagaagttggtgaagtctgccttttctacttccggtgagtgacgctggtctttgccgtcgccgtcatccaatgactcgatggtgtaattcagggcagaagcggagaaaggagcactcgatacgaattgcagtccgttgccactgatgttcagaagtctccaccagcggatatccgtttttgttccggtttcctgcgggcggatgtaaggatagaattgttcttccactgtctggcgatattttcctaacattgccgcgtggttgcggtcggcatagttttctcccggaccacggccgtaatattctatctcgttgaagttgaccggcatacgcatttgcataccgaaacggaacatgtcagaaactttcttgcttttgtctgccgccatcttttgggtaattttcactgctcccttgttgttaatggtgtaagtcagcgataatgttccgccaatcgacttcatgtcatattcggcacgaaccactgcctgatcgttttcaatagcatgtttcagagaagtcagtttcagttccggattcttccaggcggcatatttgtgttgcagtccggctccgaagtcattgtcggtcggtgcacgccagaagttaggagtcagtgcgctgccatcttccatcagttgcatgccgttgacgtcgtaacggcagaggtagccattgtgtttgttgaaatccatagagaagttttcacctttcacaatcaggaagttgcggtcgttgtccaaaatggtgggcacgatgaccggaaggttagatgcctgttggttttccagtttcagttccggtgctttgtagtcacggatgcttagttggtcgtaagcgatggtggttccggccggcagcagtgtttcggcggctttcagtttgtagctcacgttgagtagcagttctttgcaaggacagatgttctttgtgtcaaatggaatttgcactttcacagtttgttggggcgctactttcaggtcggatacgatgcctgtttgcactacttctccgtttgccagtaattgccattccatgtaataagcagataagtcgcggaagaaatactcgttgaagatgttgatttcgcctttggcaagatcagcaggagtcgtccatatatcctgatagaaataagctacttcgtatgcatgcggattgggtacgcggtcggggctaatcaaaccgttgtcgttgaagttattatccgaagcgtcgtatttgttgaagtcgccgccatagccgtagatgcttactccgtctttgtttttccagtggcaggactggtctacgaagtcccagataaatccgccctgatatttcggatatttgcggatgatgtcccagtattctttgaatccgccttcggagttacccatagcgtgtgcgtattcacattggattaacggcttttggatattgccttcgctatatttgatacaagcgtcgtagtcatagtacatcgggcagaaaatatcggtgaattcgctggttcctgcttgttcgtactgtacggcacgtgtcttgtcttcattcttaatccaagtgtagcatttctcaaagtttggtcccatgccggcttcattacccaatgaccagaagatgatggacggatggttgtaaccgcgttgtacgttgcgttggttacgttccatgtgggctttggcgtagattgggttctttgccagtgtctggtcgccgtagcccattccgtgagattctacgtttgcctcggctactacatatagaccgtattggtcgcacaggtcataccaacggttgtcgtccgggtaatggcaggtacgcacggcgttgatattgagttctttcatgactttgatatcttgcagcatacgttcggtagaaaccacataaccgccgtccgggtccatttcgtgacggtcggctcctttgaagagtaccggttgtccgtttacgagtatctgtccgcctttcaattcaatcttgcggaaacctactttaacagggattacttctactacgttgttgccgtttttcagtgtagcggtcagcgtgtagagattaggcgtttcagcagtccatttcgccggattggagacggatagggttgtgtttagttttcccgaacctttcaggtcggcagtcgctacgctgttgccttgaacatctgtcaagtccaaagctactgtgccgcttcctttcaggtcaacggctatatttaatgtaccgtctttatattggctgtccaaatcgggagtgatgcgaatgtcctggatgtatttcttgtcgcgtgcgtaaagataacagtcgcgtcctacgccggagtagcggaagaagtcctgatcttccaggtaactaccgtcgcaccagcggaaaacttgaaaggcgatgacgttcttacccggtttcaggtagttagtcaggttgaattcagcttccagtttgctatcttcgctatatcctacgtaacgtccgttcacccaaaggtacatattggacgttaccgagccgaaatgtgcgaaaatttctttgcctttccagtcggcaggaaggatgatttctttgcggtaagagcctacgtggttgttttctgtcggcactagcggagggttgtttttgaattggcttctccaggcatatcctacgttgacatagatagggtcaccgtagccgttcaactcccaaacaccgggaacttgaaggtcatcccaacctttgtcgttgaaattagtctgataaaagtcggtcgggcgtgcgtctgcgtgtctcacccagttgaatttccaaagaccgttcagggtcatgaaatttgtggaattttctttaatgccggctttagcttcatcagccgatgcgaaagcaaagtaattagtgtgcatagcggagcggtttacggaattcacttccgggtctttccactcgttgaagctttgcgcttgaattgctgtcagtcccaatgcagccaagcagcaagagagtagttgtttcttcatgggttttttgtattaggtttgaatttcgggagtcaaa

SEQ ID NO: 8076 - DNA, 584 bp, Unknown
  gut microbiota DNA sequence
atcgatataactcctttttttgagcatatttgctttattttttcaaaaacaacttcttaaattccgccggataaggcgtctcgaactccattaaatctcccgttaccggatgataaaaacaaagtttgaaggcatggagtgccaatcgtccgatagggttgggagaatcttctcttccatatcttccgtcgccgataataggatgccctaaatcctgcatgtgtacacgaatctgattctttcggccagtttccaaatcgagttccaacagagaatatccgttagcgcgtttgattgtcttatagtgggtaatagattttgatccaccgtcatcgtattcactggaacttacgtaaagtgttttatcagtcagccaggaaacgactgtatcataatctttttccatactaccttccactacggctacatatcggcggtcggtcactatctcatgccagttgtcgcgtagcgtccgctgtgttttttcgtctttggcaaacatcatcagaccggaagtatctctatctaagcggtgaacgataaacacacggaattgacgtccggagcgttgcacatattcattc

SEQ ID NO: 8077 - DNA, 21810 bp, Unknown
  gut microbiota DNA sequence
ggatttcatcacttaactcgtttagctcttttaccgacagcttctttacatctgccggagaataaatattttctaagtacatatcaaacagttttttacgtttatacctattatctttatcacactgcaaagatactgctgattttagattcggtttgtatatagattacggattattttacctatattaccgaccttggaaaataggactgacgataaacataaaaatagtagataatatatattggaggacaacatatatgaatagtgattataaagtgggcgatttaatttatgatgcaaatatttatgatgcaatgaataccaatctagatgattggtacttttataagcgatggctgccggaaaacaaggatgcacggatacttgaactttgttgtggtacgggcaggctcactctgctcattgcaaaggaaggatatgatattactgggattgatataccccttcaatgcttgcccaggcaaaaattaaagcttccgaagcaggattagaaataagttttatcgaggcagatatcagaactttggatttgccggaaaaatacgactttatctttattccgtttaattcaattcatcatttatataagaatgaagatttatttaaggtatttaatgtcgttaagaatcacctcaaagacggtggcttatttctgtttgattgttttaatccgaatatccaatatatagttgaaggtgaaaaagagcagaaagaaattgctgcatatacaaccgatgacggtagagaagtattgataaagcagacaatgcgatatgaaaataaaactcagattaaccgtatcgaatggcattattttatcaatggtaagttcaactctattcaaaatctggatatgagaatgttcttccctcaagagttagattcatatttggaatggaatggttttcatattattcataagtatggcggatttgaagaagaggcatttgacgataattcggcaaaacagatatttatttgtcaatgtgacttagtgtattgagattttattaataaataagtgaaaatgtaatttgttggcaatcagtatggtagcgtggttgcctaaaggccttttggggctgtctttatccttttgaactggaagtactcatcagaattctttttcagtttcgacttttctcattttgtttaatgattctttagttacttctcgtaataaatttggcgttcgctaaagtaggaagtctgactttggcttccttggttttgatacttacctcatttccttaaataagttagaatagatattatagcacttgataaaaaaatataatccgtaattggggttattatgtcagtaattcatctacaaacggtctctttctttcatcgtatttttgcaatgtagaaagtagacaatcaattctttaataattaaaaataagagatatgaaacggattttattattaacaactgtatttatgatgatgcttggaactagtttttcttctgcacagacagatgcagataacttttataaaagtgatttggtaagtgtggagaaagtctctttttccaaccagtataaaatgaaggtagccggaaatttgtttctgcctaagaatatgaaagaaggggacaaataccctgcaatcattgtcggacatccaatgggagctgtcaaggaacagagcgcgaatctttacgcaacgaaaatggccgaacggggttttgtaacactctccatagacctgtctttttggggtgggagtgaaggcgagccgcgcaatgctgttctgccggaagtttatgcgaaagactttagtgccgcagttgattttttaggtacccgtccgtttgttgaccggaatctgattggagtaatcggtatttgcggtagtggaagttttgctatcagtgcagcgaaaatagaccctcgccttaaagccattgcgacaatcagtatgtacaatatgggtaccgctagccgtaacgggttaaaacactcattgacattggaacagagaaagcaaataatggctgaagcggcagaacagcgttatgctgaatttttaggtggagaaactaaatataccggtggcactgtacatcaactgacagaaaagtccagtccgattgaacgggagttctatgagttctaccgtacacaaagaggagaatttactcccgacggagcaactcctatgaccaccactcatcctacactttcaagcaatgtgaaatttatgaatttctatcctttcgaagatattgagactatttcaccccgccctatgcttttcatcaccggtgaaaatgcccactcacgtgaatttagtgaagacgcttaccgattggccgccgaacctaaagaactgtatatagtacccggtgccggacacgtagatctttacgatcgtgtaagccttattccatttaataaactggaatccttctttaaggaatatctaaagaaataagttttaatactataaatatgagatactatataatagcaattcttactatgctgacattatcggtcggttccgcatcatgtagcgaagatgaacctatacagggaacaggtcaacaagtgactccgggtaatggttctggttccggtgataatggcagtaacaataatggcaataatcccgatgataatgacgacaataacgatgataccccagtgagcaataatcttaaaataacaatcggacctgtttcattcaatgccacattggacaataatgagacagcgaaagcatttaagagactactccctatgacagtggatatgtccgaactgcatggtaatgaaaaatattattatctgtcgaagggtttgccgacagcgtcgtccaatcccgggactattcggacaggtgacttgatgctttacggttccacttgtgtggtactattttatgaaaccttttccacttcatatacttatacccgtttaggacgtataacaaatccttcaggactggcctccgcccttggttcaggaggcgtaaatgtaacttttgaaataacagattaaagaataaactaatggaacaaataagaaataaagaatatggaggtgaacgtcctctgttcgcgacccacgaccttcaactggaagatgtaacaattcacgccggtgaatctgcgttgaaagaatgtagtaatattatagcaatcaactgtcgctttgaaggaaaatatcctttttggcataccaacggattcattgtgaaaaactgtctctttacagagggagcccgtgctgctctatggtactctcaaagtctgcaaatggcagataccttggtagaagcaccgaagatgtttcgtgaaatggacggaataaaactcgaaaacgtgcagttgcctaatgctttggaaacgttttggtattgccgtaatatagaactgaagaacgtacagattgataaagcggattacctttttatacacagtgagaatattaagatacaaaactatgcccaaaacgggaactattcgttccaatattgcaagaatgtagaaatccgtaatgcagttatcaattccaaagatgctttttggaatacggaaaatgtaacagtctatgattccgagctgaacggagaatatctgggctggcattctaaaaacttacgtttggtaaattgcaggatttcgggaactcaaccgctttgctacgcacatgatctggtgatggaaaattgtacgatggcagaagatgctgaccttgcttttgaacacagtagtgtgaaggcaacgattaaaagtcccgttcatagcgtaaaaaatcctcgtacgggaagtattgttgccgaaagtttcggagcaatcattttggacgaaaatattaaatcaccaggaaattgcgaattgaaactttgggatgatctaacctgttttaattgaaatatgaagtataatttcgatgaaattattccacgcagaggaacgaattcttataaatgggattcggctgaagatgcggatgtattgccgatgtgggtagctgatatggatttccgtacggctccccctgtcgtggaggcactgaagaaacgggtggaacatggaattttcggatatgtacgtgtacctgatgcatactacgaggctgttgtaaattggtttgctcgacgacatgcctggcggatagagaaagaatggattatttacaccaccggcgttgtgccggcaatatctgctgtaattaaagcattgacactgtccggagataaagtaatggtgcagacacctgtatataactgttttttctcctctatccgtaataacggatgcgagatgattgccaatcctttggtatatagaaacaggggctatcagattgactttgatgatttggagcggaaagcttcagacccgaaggtaaaacttttgttgctatgtaatccgcacaatcctgccggaagagtgtggagcaaacaagagttaaggcggataggtgagatttgtcttcgaaataatgtctttgtggttgcggatgaaattcattgtgaattggtatttctggggcatgaatatactccttttgcttctatatcagaagaattcctactgaactcggtcacttttgtttcgcctagcaaagcctttaatttggcaggacttcagatagccaatatcatttccgcagatgcagatgtacggaggcggatagataaagcgattaatataaatgaagtctgtgatgtgaatccttttggagtggaggcgttgatagctgcttataatgagggtgaagaatggctggaagaacttaaaatctatttgtttgcgaattatatctatttaaaaggttatttcgagacctatcttccggagtttcctgtaatgatgttggaaggtacgtatttagtttgggtagattgttcggttctgcatcaggcgtcagcggaaatagtcaaagacttgttgaagaaagaaaaactttgggtaaacgaaggcagcctgtatggagaggctggtgaaggatttatccgtatcaatattgcctgtccgcgacagcggttgatagatggattaaacagattgaagcgggctttgaaataataaaataattgtcagtttattgagagctcccccttctcactccccgtaaatacgaatgaaaagaagtagtggccttaaaagactttttgccttttcttctcggagcattctagtttatggctaccgggattatatttcttggaatttgtcatttgcggggagaacaaattataaagaaaaagcttgggcaaacgtgctcattttaatgatgtaattccttatatttgtatcaggatgaataaatcaataatttgaaaaatgagaacggaaaaagaaaaaatgttggcgggagaagtttatgattgtgctgataatgagttattgaccagatggcataaagcaaagcagcttcaacaggagtataataatactctcactactgatgcaggtaaaatttctgatttattagatgaattaatcggttcaaggggggataatgtctggattagtgctcctttctttgtggactatggtgagaatatttatatcgggaagaatgtagaggttaatatgaattgcgtttttcttgattgtaacaagattgttatcggtgataattcggggattgggccgggagtacatatttatactgtttttcattctacaaaggcatcggaaagaacctctgaaaacagtactttttggaagtcacagacagctccggtgattattgggaataatgtgtggattggtggaggatgcatcattcttccgggagtaactattggcgataatacaactattggggcagggagcgttgtcacaaagtctattccggccaatgtgctggcggttggcaatccgtgtagaatccttaaacagatagaggattgatatttctttttaatatttatatattaaataatttacctgtattgtggtaaaaacttcttgttcgtaatgtgtagaaaatacacatacttcaaaatctgtaatttgggtttctatatccgtaatttgtatcataaagagttggaacagaatagctaactttgcattatcagagagaaacaataaaaaccgtacgtattatatgagaaaattgttttttattattgtaacagccatcggaatgatgcaaatcccgatgcaatctataaatgcacagaatatgaaaaaagaagaagtacctcaaaacatcagcgcatttccggtaggaaaagcgaatacaggattcgaacaatatttcacgggtagatcttggctggcaccgctgactggtaacaaagacttgaatgtacccatgtccaacgttacttttgagcctggctgtcggaataattggcacagccatacgggtggacaactcctgattgccgtcggcggtgtgggatattatcaggaacgtggtaaagcggcgcgccgtttacttcccggtgatgtggttgaaattgctccgaacatagaacactggcatggcgccgctcccgatagttggttctcacatctggctatcggatgcaatccgcagaccaaccagaatacatggttggaacgagtggatgaccaacagtatgccgaagtaacgaaagataacgtagcaatcggactgcaagctaccgatcctgaattggacgatatatttagtaattttacaaaagaagtgcaagaatacggtgcactggacattaaaccccgtcttatggtaacattggcatccaatattgcttcacaagcgcaggccgaataccgcatcacactcgaaagcgcacttaatgaaggcattgctccgatagaaataaaagaaatcctttaccagtcagtaggctatgcgggcatggctaaggtcagagattttatcggtatcaccaatgatatattgctcgcccgtggcgtgcgtcttcctttggaaggacaatcggttgtatcatccgaaacacgtttcaataagggactggaattgcagaaatccatatttggtgaacggatagaacagatgcataagaacgctcccgacaatcagaagcacatccaacgttacctctccgccaactgtttcggcgactatcagacacgtagcggactgaatgtaaagacccgcgaactgattacattctcgatacttgtttctttaggcggctgtgaatcgcaggtaaaaagtcacatacagggaaatgccaacgtagggaataataaagatacgttgctggcagtcgtaacgcaactcttgccatttattggttatccgcgcacactcaatgccatagcctgtctgaacgaagtgattccggaaaaataataaagacattgatgcatcccgaaagataacgattaaaatctatccgggacttgacaaacgctttttaatgttatatatttgtagtccgggaaagtatgaaacgaatgattactaaatgaaaaaagagacggaatatggatatgaaatggatggaaaatagtataatattacaacgaacttagctcattcccttagcttatactaggggataaggcaacagatatagcccaaaggctgcgaactttacagagttcgcagccttttttgtaacctattattgaatatatttttgcaaattcagattttaaagtttataataaacaggggggacgtttataataaacggtcacagtatttattaataacgctctttatgtttatgtggtaggttgttatcttttttgtataacctttctctaaagggtagaaacttgtgtggttgtggtaataataattgatatgttgactgggtaatttaattttataaaatatagttcctccactattcttgttattgttactctatgttatctatcagctttgttttgaaatgcaccttgaatacctgtttttatctgtcggaaactttgcaggacgagataataaaacctcatatttgatgatcgattcactgtaagatttgttatctttgcaaaggtttcatttataaagagaagaagttatggatatcatggaccgtttgaaaggaccccggcgcaatctgcctatcggaatacaaagttttgagagacttcgtcgcgacggctatttgtatgttgacaaaacagcatttgtctacgaacttgcctcaacgggcaatccatatttccttagccgtccgcgtcgttttggcaaaagtctgctgctttctacgctggaagcgtatttctgtggaaagaaagaactttttgaaggacttgccattgaacagtttgaaacagaatggaacgaacacgctgtactgcatcttagcctgaatgccgaagactactctgaaatagaaggattgagaaacggactcgaattgcaacttcgtagttgggaaaaaaactatggaatcagcgaggaaggcttgagttattccggtcgtttcatgcaagttatcaaagaggcataccgacagactggtcgtggtgtagttgttcttattgacgagtacgataaaccgctgctccgctctatgcataacccggaattacaaagtaagttccgcgaaatgctcacagctttctacactgtattgaaggatgcagacccctggttgcgcttcgtctttatcaccggagtgaccaaatttgctcaaatgggtatattcagcactctcaaccaactgatcgatatcagcttcgacccgcaatacaatgctctttgtggtatgacccgcccggaaattgaagccaatttcgtcccggaactggaacggttggcagaaaggaacggtttgacaaaagaagactgtatggcataccttactcgtatgtatgacggatatcatttcaactatgtccgtaaggaaggtatgtacaacccgttcagcatactgaatgtgcttaggagcgggatgtttgagaattactggtttgccagcggaacacccactttccttgccgaaatgctgaagaagacccattatgatttgcgtgaactggacggattggaagtaactgctgcctctcttaccgacgaccgtgctgacgtaaacaaccctgtgccgatgatttatcaaagcggctatctgaccattaaaggatatgatacagaactgcgtctctacaagctgggttaccccaatgatgaggtgaagtatggctttcttaattttatcactccgttttatacctcattggatgaatcgaaagcccccttctatatcggacagtttgtaaaagaactaagggcaggagatgttgaggctttcctcacccgccttcgtgcgttctttgccgatttcccctacgaactgaatgataagacagagcgtcactatcaagtggtattctatcttgtttttaaactactggggcagtttattaacgccgaagtgcaaagtgccctgggacgtgctgacgctgtggtgaaaactgcaaatgctgtttatgtcttcgaatttaagctaaacggtaccgcagaagaagcattggcgcagattgataatcgcggctatctcataccttatactactaatggttgccgtatagtgaaaataggtgcagagttcagtaaggaagaacgcaatttgagtcgatggttagtagaggaagaaggatagtagggaattgataataaaagtatagtatataatttcaaacccaaaaagtaacgcccaaacggtaaaaacagcatccgtttgagcgtttttttttagaaatctttttggaaggatgaggaaggaaacgatagcttatatcttccattattccgttctctatgtgatatatacgttgattttaatgtttcctttgacaactttcggtcgatgttctatttttcatattttagattgttcgaaaatgtaatagatgttaattggctaccaggcttgcgaactaatttttgatatgatatgttgtttaaagtgaataacgaattaaaaaatgaactagaaagttagatatggacaaataaagcatttctaatgatttagcagataaaacattacattataaaacttatgattatgagaaaatcgattattttattagccttgatattgggtggcgttacagcaaatgcccaatcagttgtagaaggtacaaaagtaacagacaattggtctgtggaagtcaatgccggtgcaatcactccccttactcacagtgctttctttaaaagtatgcgtcctgcttttggagtgggagtttccaagcaattaactcctatcttcggtttgggattccaaggaatgggatacattaatactactccgagtaaaacatctttcgatgcttccgacgtcagcgtattgggtaaagtcaacctgatgaacctgtttgcaggttacaaaggcgaaccccgtttgtttgaagtggaagccgttgcaggaatgggctggttacattattatgtgaatggtgatggagatcagaacacttggtctacccgtttgggattgaatttcaacttcaacttgggcgaaagcaaagcatggacattgggtatcaaacctgccattgtatatgatatgcaaggcacttaccccgaaacaaagagccgtttcaatgccaataacgcaggtttcgaattgacagccggattgacatatcactttaagacaagtaacggaacacatcattttgcaaaagtgagagtgtacaaccaagctgaaattgacggattgaactcttccatcaatgcgcttcgttcggaagtgaacaacaaagacggtcagatcagcaacgccaaccagcgcatcaacggactgcaagaagaacttgaagcctgtcgtacaaaagttgttccggtagagacagtagtgaaaaccgcccgtgtgcccgaatctatcattactttcagacaaggtaaatcatcggttgacgcttcccaacttcctaacgtggaacgtgtagcttcatacatgaagaaatatgctgactcaaaagtagttattaaaggatacgcttctccggaaggtagtgtggaggtcaacgcaagaatcgctgctgcacgtgcagaggctgtaaaaactatccttgttaataaatacaagattagtgcatcccgcatcactgccgaaggtcagggcgtaggcgacatgtttaccgaaccggattggaaccgtgtaagtatatgtacgattgaagattaaacagatagattacataaatagaataatgaaggctgcccaaaaggcagcctttgttgtatgtactggttttatagataagcggctaatttttgaatatcctgaaagattagtaaacagatttctttgtacattacataaaatagctatttttgcaagtattgttcatgcgcgttctgtgttgagtgtgcaaatatcaaccattaaaaactgtattatgaagagagtattcgttttccaagattttaaatcgcagaaattctggagtatagaggtagtcggaacagatgttactgtaaattatggtaagctggggactgacggacaaacacaagtgaaaaactacgcaactactgaagacgctgaaaaggctgccaacaaactgattgcagagaagacaaagaaaggttatgtggaaactgccgaagaaactgcacgtgaaatgaaagtggaagctaagaaatatacattgagttatgatgagtatgaaaacgatgtgaagcttttggataagatattgaaagacaagcatctctctgaatataagcaaataacgattggctgttgggattatgaaggtgatgactgttcggctttgttacaaggcctcattgaaaataaggacaagtttgcgcagatagaaggcctgttttggggtgatattgaacaggaagaacaggagatttcatggattgaacaagccgaccttagtccgctgctcgatagtatgcctaaattgaaggatctgaaaataaaaggaacaaacaatctgcgcttgggaaaaacttcacgtccggagttgcggtcgctggaaataatcagtggtggtatgcctactgaagtggtagaggacattcttgcttctgattttcccaatctggaaaaactgattctatatgttggtgtggaagattacggatttgaaggtgatattgagatcttccgtccgcttttctccaaagagcgtttcccgaagctgacctatctggggcttgttaactctgaagaacaggacagcattgtagaaatgttcttggaatcggatattcttcctcaacttgaaaccatggatatttcggccggtactctgaaagatgaaggtgcacagttgttgctggataatatggataaaatcgctcacttgaagtttatcaatatgcgctataattatttgagtaaggacatgaagaaacagttgcagaaccttcctatgaaaatagacattgccgaaaccgaagaggcggatgaatatgatggtgaattgtggtattacccgatgattacagaataggagatgcagataatcgttgtcagcaactctttatccaaacgtatagaatactttgttgaagcaggtaagcacttgcagacagaagtttgttttatgacttatgaggaactttttagctgcttgccgctattgcggcaggcagttatcaaactggaaccctgtgtaagtgatgaaactgatttcctgaaatatgcgctgttgaatcaggcatataaggagacattgcaacgtttgagcgagatgagcctgcctgatgatgtgtgctttttaaatactcctgatgctttgttgcgtgctcttgataaaaaggaaacaaaagaagtcttgatggacaaagggctgaaagtgactccgatgttaccgtctccacactctttcgatgagttacggcagcttcttgccgattgtggtagaggatgctttttaaaaccccggtatggttcgggtgcgggaggcattatggtgattcgttatcagcccaaccggaataagtgggtagtctatactacgttgcggcaagtggacggagtgattcataataccaaacgaatcaatcgtttgagcgtggaaaaagagataatcccgttggcagaagctgtgatacaaacagaagctatcctcgaagaatggattcctaaagcacaattgcaaggagaaaattacgaccttcgggtagtgtgccgggagtctgaaatagattatatcgttgtgagatgcagcaaaggaagcataacgaatctacacctgaacaacaaggcgcattggtggaatgaattgtctctatccgaagaggtgcggcaacaaatctattttcaatgtcaggaagctgtgcaatccttggatttgcgttatgcaggagtagatgtattgatagaaagaggaacggatattccttatataatagaagtcaacggacaaggagaccatgtttatcaggatatgtttgttcataattctatttatactcaacaaataaaaaacataaaaaagaaatataaccatgcaaatagatgaactgccggctggcgaacagacccgtcattcgggtctggatatgaatcaggtggtgggtactcatgatatattgatgctttgctttgacaccttgcggtatgatgtcagcaaagaggaagaagcggccggaagaacgcccgtactgaacagccatggaggagaatgggagaaaagacatgctccgggaaatttcacttacccgtctcattttgccatttttgccggatttctgccttctccggcagaacctcattcactgcgtagccgtaactggttgtttttccccgtacaggcgggtacaggacgtattccgcccaaaggaagttatccatttacagaagcaacctttgtgcagagccttgcccatacaggctatgaaacgatttgtataggtggcgtaaacttctttagcaagcgtaatgagctggggcgtgtattccccggttactttactaaaagttattggcttccttcctttggatgcacagcgcccgatagtactgaaaaacagattgattttgcattgaaaaaactagaaaattatccggacgacaaacggatctttatgtatatcaatttttctgctatccattatccgaactgtcattatgtggagggtaaaatgaaagatgataaagaatcacatgcggctgccctgcaatatattgacagtcagttacctcgtttgtttcaggcttttcagaaacggagcaatacgctggtgattgccctttccgaccatggcacttgttatggtgaagatgggtatgaatatcattgcatatctcacgaaacggtttatacagtcccttacaaacactttattttaacgaaacaatgaatcaaccgctaccacgatatgtagactatatgtatagctatccacataaaactgcctatcgtccttttccatctccggtttcgctgcttccttacttggaacaggtggaagggcagaaggcatccctctatttccatattcctttttgtagttataaatgtggatattgtaacctgttttctctacaaaccaatcgtgcggattatatcgcaacttatttggaaacccttcgcaagcaggcacaacaattgtcacctctcaccaccggactgatctttgacagtttcgccattggaggaggcacgccattgcttctcaccgtttcccaactggaatacttattggagacggctgccctgttcggagtccatccttcacatgcttttacttccatagaaacatcaccggagtatgctgatcctgcccgtttgacatggttgaaacaggcaggagtggctcgtataagtatcggtatacaaagttttctcaacgaagagttaaccgctttgaaaagacgtccccggcaagacacgatcaatcaggcgttggaaactatccggaagatggaatttcctttttttaatatcgacttgatttacggaatcaaaggacaaacagtggatagttttctctattcgttggagcaggctcttctgtttcagcctaacgaactctttatctatccgttatatgtgcgacagggaacagctatcacggagcgggaatctgatgatgtctgtttccggatgtattgtgccgcccgtgatctgttgaaagacagaggctttctacaaacttcgatgcggcgttttattcatcatccgtctactgatgcggaaatttcctgtggagatgaagtgatgctttcgtgtggttccggtggacgtagttacttgggtcatttgcattatgccacccggtatactgtttctcaacactgcattgccggagagatagatgactatatgggcactgctgattttacagtagctcgcaatggatttattctctctcaagaagaacgaaggcaacgtttcatcattaaaaatctgatgtattatatggggcttgataaagccgaatatgagcgtcgttttggcgaatcaccggatgatattccattattccggcaactggcagaacggcaatggatagaaaatacagatgatcgcatttgtcttacttccgaaggaatgggatactctgattatattggtcagttgttcattacccctgaaataagagggctgatggaaacttattcttattgaacgaaatggaaatgaaaaacgaggggtctttactttccatcaagcgtatctattatcgcggtaaattgaatagctgcaattatacctgctcttattgtccgttcggtaaaaagtcacatctgacagccactacgcaggatgaacaggcgtggaaccgttttattacggctattgaacaatggcaaggaggcccgttgcagttatttatcattccttacggtgaagcattgatacatcgttattatcggaaagggatcattcatttagcggcgttgccacaagtggctggaatttcctgtcagactaatctttctttttctgctgatgaatggctggacgaatttccggctacaccgacattgataagtaagataaaaatttgggccagctttcatccggaaatgacttcagtagaaagttttgtccggcgacttcatacactttataatgcaggaatacaggtctgtgccggagcggtaggcaatccgatggcaaaaagcgtacttagtgatttgcgaaatgctcttttgccggatatttatttgtttattaatgctatgcaaggtttgaagtctccgttaagcatagaagatattcgtttctttacgcaactggataacctttttgaatatgatttaaaaaacgcttcggctcaatggactatctgttcgggagggagaagtagttgttttattgattggaaaggagatatctttgcttgtccccgaagtcaggtgaagataggaaatttttatcagaatcaaatgttggcccccttgcttccttgtcggcggaaggtctgtgactgttacattgctttcagtaatttgactaatcatcctttgcatcgaataatgggagcaggtgcattttggcggatcccggataagcctttcattacttccgtgttttttgatgtggatggaacacttaccgatgcccagggaagggtttcggaaagttatgcccatgctttgcggtacatagcgcaatttgttcccttatatcttgctacttctttatctatgcaacaggcgcggagaaagttaggcaaggctcttttcagcctgtttgaaggaggggtgtttgctgatggtggattactggtatatggcgggcagagccggtgtatgccggttgaattactactggacataaacgaagaatcagcaaagataacggcgcatagctatgaaggtcaagtctataaatacagcatgctggtttatgataaggaagagagaataaatattctttctcgcttaaaagagaaaccttatcaggtgttttataaaccacctcttattacggttatccataaggaagttgataaacggaaaggagtgcttcatatatgcaaggctttagcttttccccttgaccaagtattgattgtcggaaattcactgaaggattgggagatgatgtcagtggtgtctcattcttgtgcagtgatgaacgccgaactacttttaaaagaacgtgcccgctatacgctgaatccggaccgattggctgctttcttccgcttccgggagtagaaaagcggctgcaataaaagcttcacattgatacctgattgtatcattcaaaaataaaaatcagttataatttggtagttataaaaacaaagcccatatttgcagcccgaaaatagggacaggcataaaaatcctcatcggagggtgctataatagataattatagtgctggataagatgaatggtgtaaatcattcgcttgtccggcactattttttattgtaacaatttaagataagaggtaaagtagcggagaaactatgaaagagttaaatttgacacaaggaagtgttccgaaggtattgctgcaatttgcagtaccttttcttattgccaatgtgcttcaggcactttatggtggagccgacttgtttgttgtggggcaatatgatgattcggcaagtgtggcggctgtggctatcggcagtcaggtgatgcagacgattacgagtattattcttggcattacgacaggcacaaccgtgctgattgctatcgctatcggagcaaaagatgaccggaaagtagcttttacaatcggttcttccgtgtggctattttcaatcgtaggagtcttgctgaccttggtcatgctggcatttcatgggcagataaccgaactgatgcacacgcctgcggaagcgatggctgatactaaaaactatattctggtatgttcggctggtattctgttcataatagggtataacgttgtatgtggtatcctgcgtggattgggtgattcaaagacaccgctttattttgtaggcttggcatgtataatcaatatagtgctcgattttatactggtcggctatttccattggggagctacaggagcggctattgctactgtaaccgcgcaaggcgttagctttggaatagcgctttggttcttataccggcatggattccactttgatttctcacggaaggatatccgtttgaaccggaatctgtctaaaaagatcatggtattgggagcgcctattgctttgcaagatgctttaatcaatgtttcatttctgataatcactgtcattgtgaatcagatgggagtcattgcgtctgcttctttaggtgttgttgagaaaatcatagtgtttgccatgctgcctccgatggctatatcatcggctgtggcaaccatgactgcacaaaattacggggcgggacttatcaagagaatgaataaatgtcttgcttccggaatagggattgctcttgttttcggtgtgtcggtttgcgtgtattcgcaattcctgccggagactcttaccgctttttttacgaaagatgccgctgtggtggcaatggcagcagagtacctgcggggatatagcatcgactgtatcgtagtcagtttcgtgttctgcatcaattcttatttcagcggacaagggaactcgttattcccgatgattcacagtctgatagctactttcctgttccgtataccattgtcatactggttcagccagatggatagctcgtcgctgtttattatgggatttgctccacccatttcaacggtggtttcattattgatttgtatctggtatttgcgatatacccaaaggaaattatacttgagaggcacattgatgcctgctatgtcgaattaggtgtttttaagtgacatatattaactaaaatctattttgtatggaagcttatttgaagaaactctgttttgagtatcaggttgatgaaaaagaagtgaaagagctgttggctcgtatggaaatggtgtatctggataaaggagaaacgattgcatctgccacaatgcccgagcagagcttgtatattattgtttccggcattctgcatacatacacgactcatgaaggagaggatagaaccatccggtttttatctgaaggggatgctgtattgtgctataactccagtcagtatgctgtaaaggcgctgacgaaatgtgctgcttattacatcagcgaagaggagattgaagagttgtgtgcaacatctatttcgtttgccaacttggttcgtcaactgatggaatatcagttctattttaaagaagaagagaatatgaacgttcgcaaactgacggtaagagagaggtatctttctttattggcagaaatcccggatattctgtacagggtacctttgaagtatattactcattatctgggtgccgatgtaaccagtttgggatatatggctggaagttctaaataggaaatataacctggacatctatttctctatgtattccttatcagatggttcattgactattcaaaattgactttgaaaagtctttggattatttggtaaggaatattatttttgtattccaaatgaaaaactcaatacctcgatatactttttataagaataagtatggaagcgaacttttggtcgatgtggtagaactgaaatatgtgaagaagttcttggctgaaagtgctatccatacgttgaattattatgatgttacttttataacagaaggtaaagggacgttttcagtcgataaccaaacctatgaagtaaccccatgtgacgttctattctctaaaccgggagaaatccggaactgggatacgcgtcatatcatcaatggttatgcgctgattttcgaggaagagttcttgtcttccctctttaaagattctttgtttgtacagcatctttcgttttttcagctggaaagcttttcatcaagactgcatttgcccgatgaactttatgcccgtatacttcaaattttgcatcatataaagatggagatcgactcgtatcagcaaaacgatgtgcatgtattgagagcgttgctttatgaagtcctgatgttattggaccgggcttatcttaaaatgacttcgatagaggagggcaggagcagagaagcgtctaataaccatgtaagtaaattcatgaacttggtaaatatccattctaaagagcaacattcggttcagtattatgcggataaactctgcattacttcaaactatttgaatgagatggtaacctcgacaatggggttcagcgccaaacaatatattcagaataaagtgatggatgaggctaaaagactgctcgtttatacaaacgtccctatatcggatattgcttttgaactctgcttttcaacggtctcctattttattcgcagcttccggcaacatacgggagaaactccattactttatcggaaaacacataaaccgtaaaaagtactattttcccctttctttttattacgccgtgtttcttctatttctctactttcgcatcagataataactaacaataaaaaatgaaatgatgagagacgcagaaaaaacagtagggaacatgattgataagttgaaaacagcttttatcggttctatagacagggagggatttcctaatatcaaggcaatgttgcagccaagaaaaagggaagggataaaaacgatttatctgacaacgaatacttcatccatgcgtgtggcgcaataccgggaaaacaatcatgcgtgtatttacttttgtgatacaagattttttagaggtgcgatgctgcggggtacaatggaagtattgacagacagtgccagcaaagaaatgatttggcaggagggtgataccatgtattacccggaaggagtgacagatcccgattattgtgtattgaaatttacggcaacttccggtaggttttatagtaatttcaaatcagagagctttatcgtagaatagaactcatagtacataagagaagctaagagacagaacttttatagtctcaatgtgctatttttaagattgtataaaagagtagcgactttaaaaacaatgaaccagtgaataaacggcataaaatagtgcaataatatgcggaaatgcaggtctgtttcgcataaaactacatacggtatgcatcttttctggctggcaaggcgttcgttcctcggtgaggagcaaggtgttcctcggtgtgcgtcgctaccttcctcaccgaggaacttgtttgtcatcggtgaggaagctgaaaccggtctttttgagggtggtttttctctagtttggcataactgttagaaaggataggaataataaaaagaacggttatcttaatattttatgttgaatggtgaatgaataatggaaaatagctgctatttggatgatatatgtcccaaatgataataataaagaactttctcccgacagatgccgggcttttttctatttttcttaaatcgttatgctattgtctctcttcctgattgcttaaatattccttttttaagaatggtcattctttcattcattttatgttcccggacagaatccgtttttataaaacagataactttcctctatcgcatcggcagtatcagcttctaatgcatataatatttctttgcaaaattccagttgcccggttccgttggcagttacaatattctcgtctcttacagcttgttcattgatatagttcgaatcgcctgtatatttatccccagcatactgttttagataattgagcgtattgctggtatgctttacctcattaaggaaaccgtgcatacccagaaaaacagaagcattacatattccggcaactaatttcttttctttaatagctttttctacaagtggaactattaattcagcttcaggtgagaaccagttcataccgccaattaacaccagccccgcataatcttccgccatatcttttagcccataatcaggcagcac

SEQ ID NO: 8078 - DNA, 29515 bp, Unknown
  gut microbiota DNA sequence
ggggaatcttctgtgtttgtcttgttgacgaatgggaatgagccggatactaccgggaagaagaagcgttggtttgctttgttgttgctggtgctgatgattgtgggtgcaacggtaggggagcttccggtaacgaaggagatgtttccggatatcaagttggatatgtttttctttgtgtctattactactattattatggcatggacgaatctgttccctgcccgtaaatatactaaatatatttcgtgggatattctgattacgattgcctgtgcctttgctatcagtaaggcgatggtgaactccggcgtggcggatagcgttgcgaagtttattatcggattgagtgatgattacggcccgcatgtgttgcttgcaatggtatttattatcacgaacttgtttacggaattgattactaataatgcggcagcggctttggctttcccgctggcattgtcgattgcttcacaattgggagtaagtccgacgcccttctttgtggtgatttgtatggctgcatctgccagcttctcaacgcctatcggttatcaaacgaatctgattgtgcaaggtatcggtaactataagtttacggattttgtacgtatcggtttgccgcttaatattataactttcttaatatctattatcctgatcccattgatctggaacttttaataaataaatctgtaaatggaagaaaagaaccatatatatccgatatttgaccgcatgatgacgcggcaggataaagaagaacttttagggcaacacagtgtgatgatctggtttaccggattgagcggctccggaaagagcacgattgctattgcattggaacgtgaactccataagcgcggattgctttgccgtatcttggatggggataatatccgtagtggaattaataataacctgggattctccgaaacggaccgggtggaaaatattcgtcgtatagctgaagtgtctaagctgtttctggatagtggcatcattacgattgctgcatttatcagccctaataatgatattcgcgaaatggctgcgaatattatcggtaaggatgattttctggaggttttcgttagcactccgttggaggagtgtgagaaacgtgatgtgaaaggcttatatgcgaaggcacggaaaggggagattcagaattttacaggaatttccgcaccattcgaggttccggaacatccggctttgtcactggatacttccaaattgactttggaggaatcggtgaaccgtttgttggagcttgttttgccaaaagtgaagagtataaaatgaagaatgaggaattagggatgaagaattagtatgcggttatcagcaaattcataattcgtaattcataattttaaaaataatggaagaatataaattaagccacttgaaggaactcgaagccgagtctattcatatcatccgcgaggtggcggcggaatttgagaatccggtgatgctttacagtatcggaaaggattcttcggtgatggtacgcttggctgaaaaagcgttttatccgggtaaagtgccattcccattgatgcacatcgactcgaaatggaaattcaaggagatgattcagttccgtgatgaatatgcgaagaagtacggatggaatctgatcgtggaaagtaatatggaggcttttcatgcaggggtaggaccttttacgcatggaagtaaagtgcatacagacttgatgaagacgcaggcattgcttcatgcgctggataaatataagtttgatgctgcatttggtggggcccgccgcgatgaggaaaagtcacgcgcgaaggaacgtattttctctttccgggataaatttcatcaatgggacccgaaaaatcagcgtcctgaattgtgggatatttataatgcccgtgtgcacaagggggagagtatccgtgtattcccgattagtaactggacagagttggatatctggcagtatattcgtctggagaatattccgattgttccgctttattatgctaaggaacgtccggtgattaatttggatggtaatattattatggcagatgatgagcgtttgcctgaaaagtaccgggatcagattgaaatgaagatggtgcgtttccgtacgttgggctgctggcctctgactggggcagtggaaagcggagctgctacaatcgaagagattgtggaagaaatgatgactaccaccaagagtgaacgtactacccgtgtgattgactttgaccaggagggtagtatggaacaaaagaaacgtgaaggatacttttaattgtaactagtaatggcagataataaattagatataaaagcttttctggataaggatgaacagaaagacttattgagactgttgactgcgggttcggtggatgacggaaaatcaacattgatcggacgcttgttgtttgacagtaagaaattgtatgaggatcaactggatgcactggaacgtgatagtaaacgtgtaggaaatgcaggtgagcatattgactatgcgttattgctggatggtttgaaggctgaacgtgaacagggaattacaattgatgtggcttatcgctatttttctactaatggccgtaagtttatcatcgcggatactccgggacacgaacagtacacccgtaacatgattaccggcggatctacggctaacctggctatcattttggtggatgcccgcacgggagtgattacccagactcgtcgtcacacttttctggtgtctttgctggggatcaagcatgtggtattggctgtcaacaagatggacttggtggacttctcggaagagcgttttaatgagattgtggctgactataagaagtttgttactccgttgggtattccggacgtaaactgtattcctctttctgcattggatggggataatgtggtggataagtctgaacgtactccgtggtacaaggggatttctttgctcgatttccttgaaacggttcatatcgacaatgaccacaactttacggatttccgtttcccggttcaatatgtgcttcgtccgaatttggacttcagaggattctgcggtaaagtggcatcggggattgttcgcaaaggcgatacagtgatggcacttccttccggaaaaacttctaaggtgaagagcatcgtgacttatgacggagagttggattatgccttcccaccgcagtctgtgactttgacgctggaagatgaaattgacgtgtcacgtggtgaaatgttggtgcatcctgacaatctgccgactgtggatcgtaattttgaagcgatgatggtttggatggatgaagaaccgatggatattaataaatcgttctttattaaacagactaccaatttgagccgtacgcgcatcgatacaataaagtacaaggtggatgtgaatacaatggaacatctgtctctggagaatggccagttgaccaaagagactttgcctttgcaattgaatcagattgcccgcgtggtattgactacggctaaagagctgttctttgatccttataagaaaaataaatcgtgcggttcctttatcttgatcgatccgatcaccaataatacttctgcggtaggtatgattattgaccgggtggaaatgaaagatatgagtgacacggaagatgtgccggtattggatatgacgaagctgggaattgctccggagcattatgaagcggtagaaaaagcagtgaaggagttggaacgccagggcttggccgtacgactaataaaatagattgttaaacaataatttggaagttggaaatgatggctttactgtcatttctaattttcgatttttaatttttaattaataaagtgggattactcgaatttaataaacttccgattaatacattggtaggtgccgactggaagacattcaaggctattactgccggtcgtgaaattgatgcagcctacaaggggaaatatcgattgaccaaggctgtgtgtcgcttgctttctccattggcgtcattgcaggacaagcgttacgagaaactgctcgctaatcagccgttggagcatgacccggtatttatcctgggacactggcgaagcggaactacgtttgtacataatgtattctcttgtgataagcattttgggtataatactacttatcagactgtatttcctcatctgatgatgtggggacaacctttcttcaaaaagaatatgagttggctgatgccggataagcgtccgacagataatatggaactggcagtggatcttccccaggaagaggagtttgctttgtcgaacatgatgccttatacctattataatttctggtttctgccgaagtatcagcaggagtacgctgataaatatcttttgtttgatgacataacggatgccgaattgaaggtgtttgaagaggtgttcactaaattgattaagatttctttgtggaatactcacggtactcaatttcttagtaagaaccctccgcataccggaagggtgaaggaattggtgaaaatgttcccgaatgctaagtttatctacctggtgcgtaacccgtatactgtattcgaatctacacgcagtttctttacaaatacgattcaaccgttgaagttgcaggatgttagcaatgaacaattggaggaaaatatcctttctatctatgcaaagctttatcataagtatgaatcggataagaagtttattccggaaggtaacctgatggaagtgaaatttgaagatttcgaagcggatgcgatgggtatgacggaaactatttataagtctctttctatccccggatttgctgaagcacgtagcgatatagaaaaatacgtgggcggaaagaagggatataagaagaataaatataaatatgacgaccgtacgattcaattggtagaaaagaactgggattttgctttgaaacaatgggattataaattataagaagaaaaagaaaggaaaagtattgatgattcagaaaagcattcatcgcctgttgatgacaggtttcgttgcatttatttcttccttgtctttgatggcgcaacataaagttgaggtagttcctttcggggacatggatcaatgggtggaccgtcagataaaggagtcgagcattattggcgggaatactaagaatgtatatgcgatagggccgacgtcggtgatcaagggagatcaggtttataagaatatgggcggatcgccttgggctacttcgaatgtgatggcgaaagtggccggtattacgaaaactaatacttcggtctttccggagaagcggggagatggatactgtgcccgtttggatacacgcatggaaagtgtgaaagtgctaggattggttaatattacagtgttggcggcaggttctatctttaccggttcggtgcatgagccgattaagggcactaaaaatccgcagaaaatgttgcagacgggtattccgtttacaaaaaaaccggttgctcttcagtttgattacaaggtgaagatgtctgaccgggagaatcgtattcgtgctaccggtttcagtaagattacggatgtgcccggaaaagattatccggcagctatcctgttgctgcaaaaacgttgggaagatgccaatggaaatgtgtatgcgaaacggatagggacaatggtgacttattattatcactctacggactggaaaaataatgtaacttatgagattatgtatggtgatataacgaatcgtccggaatacaaggcgcacatgatgcgtctgcaagcaaccgaaagttatacggtgaacagcaagggtgaaagcgtgcctatccacgaagtggcctggggagatgaaaatgatgttccgactcatatgtatattcaattcacatccagtcatggaggagcttatatcggttctccgggaaatacattatgggttgacaatgtaaaactggtatattaacaaagtatatagacaaagaagaaaaatagtcagtgatattatttatcattgactattttttttgttttaattcttttgtcacaaaccctttcagatgccttctggagttatctaagacttttatcgctctataaaaatctatgaatgaatgaaaatttacgtgtttttttgtttgtgttatattaaatatctatatttgcactaaatttagaaagaagaatgacgtttattgtctcttagtcaggtgtagaacatttgggttgtgtatctatcctgtaagacaattgaaatatattatttactaaaataaattgagatgaaaaagggtttattgtttattttattggcagcagcatctgtatgtttgcctgcacaagaaaaagaaaatgcagcaaagagttatagagtggaaactaaccgctttggtgctaactggtttattagtggtggcgttggcgcacaaatgtattttggcgacaatgatggtaaagccgacttcggaaaacgtcttgctccggcacttgacattgctgtaggtaagtggtttactccaggtatcggattacgcgtggcttacaacggtcttcaggctaaaggtgctactccttatgctaacggtccgcttgtagacggaggacagtactctaatggttactacaaagaaaaatggaatgttgttaaccttcacggagacgtattgttgaaccttaccaatatgttctgtggttataaagaagatcgtctgtactcattcattccttatgtaggtgctggattcgtacacacaggtaaaggtccgggttatgatgaactgggtatcaatgccggtttgatcaaccgcttccgtctctcttcagctttggatcttaacgttgaattgcgtggacttttgatgaaaggcgcatttggtaactcaggtcctgaaggattggctggtctgactgtaggtgttacttacaagttcaagaaacgtggttgggatgctgttcctactgtaccgatggttccggaaagtcagttgaacgacatgagagacagagtaaacgctctgaagggtgaaaacgaatctttgaaacgtgacttggttgaagcacgtaacaaaaaaccggaagtgatcgttaagaaagaagctggtttcattccacgttatgttgttgtatttaatatcggaaagagcaacatcagcaagagagagtatatgaatatcgaagctatggctaaaggtatcaaagcaactgataaagtatttactgtaacaggttatgctgataaaggtactggttctgctgaatataacatgaaattgagtaagaagagagctgaagcagttcgtgacctgatggttaatgaattcggtgttcctgcttctcagttgaaagttgattacaagggtggcgtaggcaacatgttctatgatgatgctaagttaagccgtgtagctattgttgaagaataatatacattttaaataatagaataaaagagacgtttcctttcacaggaagcgtcttttttgtatttttgtaccccatgagcagaatagtagcaatagattatggaagaaagcgtactgggatagctgtgagcgatactatgcagctgatcgcaaacggattgacaacagtgcctacgcatgaacttctgaactttatcggtgaatatatggctaaagaaccggtggagcggattattattggattgccaaagcaaatgaataatgaggtttcggagaatatgaagaatatagaaccttttgttcgttcgcttaagaagcgctatccggaccttccggtcgaatatgtggacgaacggttcacttctgttcttgcgcatcgtaccatgttggaggccggtctgaagaaaaaggaccgccaaaataaagcattggtggatgagataagtgctactattattttgcaaacatatttggagagtaaacgtttttaatagaagatattgaataacttaatttttagtagagtataaaaatatgattttacctatttatgtatatggtcagcctgtattgagaaaggttgcagaggatataacaccggattatccgaacctgaaagagttgattgaaaacatgtttgaaacaatggtacacgccgatggcgtaggactggctgctccgcagattggtttgcctattcgcgtggttactattacgttggatccgctttcggaggagtatcctgaatttaaagacttcaataaggcttatattaatccccacattctggaagtcgggggcgaagaagtgaacatggaagagggctgtctcagtcttcccggtattcatgaaacagtgaaaagaggtgataaaattcgcgtgaaatatatggacgagaattttgtggagcatgaagaagaggtggagggttatctggctcgggtgatgcagcatgaattcgatcatttggatggtaagatgtttatcgaccatatctcaccgcttcgtaagcagatgattaaaggaaagctgaatacgatgttgaaggggaaagcgcgcagttcatataagatgaaacaggtgaaataaagataaaaaacgtttatatccctgttaagtaagcgaaaagcattatttttgcttcgtttacaagcataaaatatcaatggtaaaaagaatcttaacagttttattactgttcccaacgctggtgtgtgctcagataaatacggatcgggtgatgactattgcccgaaacgctctttattttgaggactatgtactttctattcagtactttaaccaggttattaacgctaaaccttatctgtatgagccctatttcttcagggcattggcaaaactaaatctggaggattttcagggtgctgaaacagactgtgatgcagctatccaacgcaatccgtttgtggtgggtgcttatcagattcgtggtttggcaaggattcgtcagagtaaatttgatggagcgattgaagattacaagaaagcattgcattatgatccggagaatattaccttatggcataatctgacattatctcatatccagaagaaagattatgatgctgcgaaagaggatttggaaagtttgctgaaagtatctccgcgttatacccgcgcttatttgatgaggggggaagtgtccttgcaacagaaagatacgattgctgccttgaacgacttcaataaggctcttgaactggataaatatgatccggacgcatggtctgcaagagcgattgttaaattacagcaggctaagtatgcggaagctgaagcggatttcaaccgtgctattcctttgagcgctaagaatgcgggaaattatataaaccgtgcattggcacgctttcaccagaataatttgagaggcgctatgagcgattatgatctggcgttggatattgatccgaataactttatcggccattataatcgtggtttgttgcgtgcccaggtaggagacgacaaccgggctatcgaagactttgattttgtcatcaagatggagccggataatatgatggctgtctttaaccgtggattgctacgtgcccaaacgggtgattatcgcggggctatacaagattacacaaccgttatcaaccagtatccgaacttccttgccggatattaccagcgttcggaagctcgcagaaagattggcgacaagaaaggagcagagcaggacgagtttaaagtcatgaaagctcagatagataagcagaacggtgtgacgaataaagatgtagcacagaataaggataaggaaaacgaagaggaaggcggagagaagacccgtaagaaatcggataagaatatgaataactatcgtaagatagtgattgccgatgattctgaagctgaacaacgctatacaagtgattatcgtggacgtgtgcaggataagaacgtaaatataaaactggaaccgatgttcgctttgacttattatgagaagatgagtgacgtgaaacgttcggtgaacttccacaaatatattgaggatttaaaccgtacgggtatacttccgaaacgtcttcgcatcacgaatatggaagctccgttgacggaagaacaggtgaaagtgcattttgccttgatcgatacacatacatcggctattgtggaagatgaaaagaatgcctcaaaacgttttgctcgtgcaattgatttttatttggtgcaggacttctcgagtgcagtttctgatttgactcagacaatcttgttggatggtgatttcttcccggcatattttatgcgtgcattgattcgttgtaaacagttggaatatcagaaagcggaacaagctgtcgaaacagatgttgttcctggtgataataagcgtaaagagattaccgcggtagattatgaggtagtcagaaaagatttggacaaggtgattaatctggctccggactttgtatatgcatattataatcgtgccaatgtttctgccatgttgaaagattaccgggctgcaattgtcgactatgataaggcgatcgagctgaatcctgattttgcagacgcttacttcaatcgtggactgactcatattttcttaggaaataataagctgggtatttctgatttgagtaaagccggtgagttggggattgtttctgcttataatgttatcaaacgttttacggatcaatcggaataacatttttttgataaaaaatagaaaactcaaaagatttagttacttttgcgttcaaattatgaaaatataacatcatcatattatgataaagataacatttcccgatggctccgttcgtgaatataacgaaggagtgaacggtttacagattgctgaaagtatcagctcgcgtctggcacaggaagtgctggcatgtggagtgaacggcgagacttatgatttaggacgtcctattaatgaagatgctaattttgttctttataaatgggatgatgaagagggtaaacatgcgttttggcatacaagtgcacacttgctggcggaagctttgcaggaactttatccgggtatccagtttggtatcggaccggctatcgagaacggattctactatgatgtggatccgggtgaagctgtgattaaagaaagcgaccttccagccattgaagctaaaatgttggaactggctgcaaagaaagaagaggtagtcagaaaaagcatcgcaaagacagatgctctgaaaatgtttggcgatcgtggcgaaacatacaaatgtgaattgatctccgaactggaagacggacacattacaacttatactcagggtgcatttactgacctttgtcgtggtcctcacttgatgacgactgctccgatcaaggctatcaagttgacttcagtggctggtgcttactggcgtggtcatgaagatcgtaagatgctgacccgtatttatggtatcacgttcccgaagaagaaaatgttggatgaatatctggtattgctggaagaagcgaagaagcgtgaccaccgtaagatcggtaaggagatgcagttgtttatgttctccgaaactgtaggtaagggacttcctatgtggttgccgaaaggtactgcattgcgcctgcgtctgcaagagttcttgcgtcgtattcagacacgttacgattatcaggaagtaatcactccgccaattggtaataaattgctgtatgtgacttcaggtcactatgcaaaatatggtaaggatgcattccagcctattcatactccggaagagggtgaagagtatttcttgaaaccaatgaactgccctcaccactgtgagatttacaagaacttcccacgttcatataaggaccttccattgcgcattgcagaatttggtacggtttgtcgttatgaacaaagtggtgagttacatggtttaactcgtgtacgtagctttacacaggatgatgcgcatatcttctgccgtccggaacaagtgaaagatgaattccttcgtgtgatggatatcatatctattgtgttccgttctatggatttccagaattttgaagcacagatatctttgcgtgataaagtgaaccgtgaaaagtacatcggtagcgatgataattgggaaaaggctgaacaggctattatcgaggcttgtgcggaaaaaggcttgccagctaagattgagtatggagaagctgctttctatggtcctaaacttgactttatggtgaaagacgctatcggccgtcgttggcaactgggtacgatccaggttgactacaacttgccggaacgttttgaacttgaatatatgggttctgacaatcagaagcatcgcccagtaatgattcaccgtgctccgttcggatcaatggaacgttttgttgccgtactgattgaacatactgccggtaaattcccattgtggttgacaccggaacaggtcgttattctgccaatcagtgagaagttcaatgaatatgcagagcaggtgaagatgtatctgaagatacacgaaatccgtgcgattgtagatgatcgtaacgagaagatcggccgtaagattcgtgataatgagatgaaacgtattccttatatgctgattgtcggcgaaaaagaagcagaaaatggagaagtttctgttcgtagacaaggcgaaggtgacaaaggaactatgaaatttgaagaatttgctaaaattttgaacgaagaagttcagaatatgataaataaatggtaactttgcagccgtttcagaataaaatatttagtataacaataaaaagatcaaactaggaagtaaacgtttttaatgaagaatgacactctaaaagggcaatacagaatcaatgaacagattcgtgccaaggaagttcgcatagtaagcgatgatattgaaccgaaagtatatccaatctttcaggctctgaaaatggctgaagagagagaattggatttagtggaaatttctcctaatgctcaaccccctgtttgtcgtattattgattattctaaatttctttatcaattaaagaaacgccagaaggaacagaaagcgaagcaggttaaggttaatgtgaaggaaatccgtttcggaccccagacagacgaccatgattacaactttaagttgaagcatgctaaaggatttttggaagatggcgataaggtgaaggcttatgtattctttaaaggtcgctccatccttttcaaggagcaaggtgaagtgcttttgcttcgttttgcaaatgacctggaagactacgctaaagtagatcaaatgccgatactggaaggtaagcgcatgactattcagctttctccgaaaaagaaagaagctcctaaaaagccggcaacagctggagcaccgaaacctgctgctcctgcacaaaaagcagagaagccggaaaagggcgaagaataagaaaagatgcgtaacgcgcaggtatagtgcgttgccattatatatttaataatttaaaaacaagtaagatgccaaagatgaagactaactccggttctaaaaaaaggtttacccttaccggaacaggtaaaatcaaaagaaagcacgcttttcacagtcacattttgactaagaaaactaagaagagaaaaagaaatctgtgctactctacaactgttgatacaacaaatgtaagccaggttaaggaactcttagcaatgaagtaatcaaaagcgtaaaagtattattaaagtattaaccgaatgcattagcctgaagttcgctgcgtgaagtagcggcgctaacattcaaaaaaagtaaaactatgccaagatcagtaaatcatgttgcttcaaaagcaagaagaaagaaaattttgaaattaaccagaggttactttggtgcaagaaagaatgtatggaccgtagctaaaaacacttgggaaaagggtttgacttacgcgttccgtgaccgtagaaataagaaaagaaacttccgcgctctttggatacaacgtatcaacgctgctgcacgtcttgaaggaatgtcttattctaaattgatgggcggtctgcacaaagccggtattgaaataaaccgtaaggttttggctgatttagctatgaatcacccggaagctttcaaagctgtagttgcaaaagcaaaagctgcttaagcatcaatagtttacgagttacaaagtgtcagttactaagctagtaactggcacttttcttttgttaggcagatgaaagggaataaaaaaaatgttagttggcaaacaaaatcctttttttttcttgttagtttcatgtattcttattacatttgtgatacaaaaatattagccgtatcgactggatcgggaaactcttcaaattaatctgatgcaccgagaaagcttcgttcttcaatggcgggccacatccttcgggacagctttaagccggtggattacaaagagggcgagcgctcaaatcttgttctatcagagtttcatcacatcgtcgatgcggcttttttatatacttttctatgatattctatttctccggtacaggtaattctaaatggattgcaaatcagctttccaaagagcaaaaagaagaattggtttttattcccgatgcgttaaaggacagaacgtttgagttttgtttgcggaaagatgaaaagatcggttttgtatttcctgtctattcgtgggcgcctcctgcaatcgtacttaattttattcggcaactctctttaaaggggtataaaagacaatatttgttttttgtttgttcctgtggggatgataccgggcttacgcagcaggtgctggagaaggctttgagtcataaaggctggaagtgtcatgcaggcttttctgtgactatgcccaataattatgtattgcttcccggttttgacgtagataagaaagaactagaggagaaaaaactggcagatgctattccgactgtcaatcaaattaatgcttcaataagtaggagggaagagttgtttctttgtcatgaagggagtattccttttattaagacgaggattatcaatcctttatttaatcgctttcagatgtctcccgagaatttttatactacggatgcttgtattggatgtaggcgttgtgagaagagttgtccggtagggaatattatgatgatgggcagaaagcctgtttgggggatggattgcacctcatgcctggcatgttatcatgtttgtccgcagcatgcggtgcaatatgggaaaagaacgaaagataaagggcagtatttcaatcctaattaatctactcgccaatcaatctactcgtctttgattttaatgcagcaattggataaatcttcaatgatagctaggctttctactctgacgccttgctcctcaagttttttacgcccattttggaaggctttttcaataatgaatcccattcctaccaaatttgctccggattgcttgatgaggtcgataatgcctaatgcggcattgccatacgcgaggaagtcatccacgaaaagaacattgtcatttggagtgaggaaatcggcactgataacgacttcataatcacgatctttggtgaatgagtgcacagtggtgcttagtgcattctggatggttttaggagactttttctttgcaaatacaactggtaaatccattaggtagcctgtcatgatagccggggcgatgccgctggcttcgattgtcataatcttatttacgtttgtggctgcaaaacgacggacaaactcgactccgattgatttcatcaggacagggtccatttgatgattaataaaaccgtctactttcaggatacctccttcgtagcattttccgtcttgcagaattctttttttaagtaattgcatgctgtatgatattaattaataatgtgctaatattccattccgcatggtgaaaacggcggttggtatattagcacatggatatttgaatcgttacttgttgtctcttaagtctttcacccggacggcttttccttcgctttgcgggagagagcctttctttaccagtttaactttaggagtcaccaatatttcatccttcaattggcgggtaatatccttgcggatcttttccagttcaatataattgtcggtagaaaggtcgcttaattctacttcgacgatcatttcgtcttggttgttgacagtttccagcgtaatcaggtagttgctgcctaattcggggaattgtacgagaatcttttctacctgcatcgggaagatgtttactcccttgataatgaacatatcatcactacgtcccttgatacggtcgatacggatatgggtacggccacatgggcattttccgggaagaatacgggttaaatcgcgggtacgatagcgaattaacggcatcatttcacgatcaagagtcgtaagtactaattctccgatttctccttccggaacaggttcgcctgtttccggatcgataatttctaccaggtaacagtcttcccagaagtgcattccattctgttcctgacattcgaatgcaacaccggggccgttcatttctgtcataccgaagctgttgtatgcttttacccccagcatcttttctattttccggcgttgttcgtcggtgtggggttcggcaccgataaccagggttttcagtgtggttcctttgggatcgagtccttcttcctggaagacttctgcaaggcggatggcatagctggggatagcatgtaaagcggtagtcttaaagtcgttgatgaatttaatctgtcgtttactgtttcctgcagcggcagggactgtgaggcagcccaagcgttctgcaccgtattggaagcctaagcctcctgtaaacataccgtatccggagctgttttggaaaacgtcagtcttgcgtattcctactgcgtacagacagcgggctaccaagttggcccaagaatcgaggtcgtgttgtgagtgaacgataacggtcgggtttccggtggtaccactggaagagtgaatacgtacaccatcattgctcatatcacctgccaccagtccgaacgggtagtgggcgcgcatgtcagatttggtagtgaaaggtactttgcggatatcatccaatgactgtatgctatctgccgtgatgccatgtttgctgaaaacttctttataatatggagcgttcgcagctatattaattgtttttttaagccgttgaagctgcaattcctgcaacttctcccggctcatggtttctaattcttcttcccagtattgtgtactcatggtaatgccttttattgcatcagcttttccgcaatttctttgccggctgccaatgctttaagattcatttctacaattgcttctcccttacgcagaaagatttcgcggatgctgtcttgcactttttcgtaatcaatgcccaggaatgggattgttgctcccagtaagacaatgttggcaacgcgggcggagcctacttcttttgccactttgtctacgttcaatactatcttatgaggcagtttgttgatttctgccatcactttgtctgtttccggataattggggatgttgacaaacggagtttcgttagtcaccaaccagccggtagggctaaggtaggggaggtaacgcaatccttccatcggttccaatgagatgatgagatcacatttgcctgatgggatcaggtctgaagcaatcggctggtcgctgatacggagattggattggacatctcctccgcgttgactcattccgtgcacttccgcttgtttcatgtataatccttctttcaaggcagctttgccgattactgtggcaatggacagaattccctgtccgccgactcctgataatataatgtcttttttcatggcttacttacttctttttttgcgtgctaatgtctggatacactctctgcgtgggataatgacagatacaccacgatattcgatttcttcgcgaatgatttgcttcatctcctcatagtttttcttcaatggagtaactacacggatatgggtcggatctactccgatacctgcacagatcgcttcgatgcgtccggttccggcagaatcctgtccacctgtcatggcggtagtttcattgtcggagatgacgatggttacactggcgttctcgttcacgcaatctaacagtccggtcattccggaatgggtgaatgttgaatcgccgatgacagctacggccgggaaaagacctccgtcagcggcaccttttgccatcgtaatggaagcacccatatccacacatgagttgattgcgttgaaaggagcatttgcgcctaatgtgtaacagccgatgtcgctgaatactttatgggatggatattcttctttcagaacttcggtcagcgtgatatacatatcgcggtgtccgcagccttcgcaaagtgcaggcgggcgcatttctacaacagaaggaataccgaattccgatttattctctttacctatggcacgggctacagagtccggatttaattctccgtcctgtgacagagtaccgtcgaggcgtccttttactttaacgccgatacccagatagcctttcaattgtttttctacaaagggttgtccgtcttccagaactaggatttcgtcacaagactcgatcaattgatgcaattgttttttaggcaatggatattggccgatcttgagtaccggatattcgcaaccttccggatagttttccatcagataattgtaaccgataccacaagctacgattcccagctttttgttaggaccgtctgtatatttattatagggtgattcttctgaagctttgataaattcgtcttggcgggcaagcaatactttgtagcgtttgcgggcatttcccggcaacaagatgaactgacgcggatcttcgctgaaagagatgctgttctgcggcttttgctctttgcgttctactcctgaacgggagtgtgccaggcgggttaccatacgcatcaggatcggttcgcctagcttttcagagaattcgaagccactgtataccatatcatacgcttcctgctgattgctgggttcgtacatcggtatcagtgagaaatctccgtagaaacggctgtcctgttcgttctgcgaggagtgcatactggggtcgtctgcggctatcacaatcaatccgcctttcacgcctgtgatggcagagttgacgaaacagtcggcagctacattcatacctacgtgcttcatacaaactaatgcccgtttacctacgaaagacatacccaacgcagcttccatcgctgttttttcattggcacaccaacggttgtgtatattctgttcggtcgttataggggccatttgaatatattccgtaatttcagttgaaggagtacccggataggcataaacgcctgaaagtccggcatccagtgcagcttgtgcaatggcttcatcgccaagtaagagttgcttgctcatatctatttcttttatttagtgttgatcacagtttgttaatctatcgggcaaagataggcttttccgttcgttttatcacaaatttacttgaaaatctttctttcattcagggctttccagtattttcttgcatttgccatgtggtcagcgtaattggaggcaaagttgtgagttccggaaaaatcttctttggcacacatgtagatatagttatgtttggtatagttcaacacgctatctattccctttttagagggaatacggatgggacccggaggtaatccggtatttatataggtattatagggagaattgacttttaaatgctcgttggtaattcggcgcaggccaaaatcctgcagggcaaatttgatggtgggatctgcttgtaagggcatatcttgatgtaaccggttgatatacaatccggctaccattggcttttcttcgttgttgttggtttcttcttcaacgatggaagcaagagtgctgacttcttccggtgtcatgccgatggcggtggcttgtgccaggcgatctttattccagaatcgttcgtgttcgtccttcattcgtttgaagaattcgtctacgctcatatcccaatatacctgataggtttccggtatgaagaggctggggagtgttatgctggtatatcccatttgcgcttggaaagtagagtcgaacagttggctcgcgatttcggcagagtctatcatgagttgcttgccgatgcttcgcgccaatcggtctaatgtccggacgcttccgatagtaaggttcataggctcctgataacctctggaaaaacggctatatacatgataaacattgtcattggggcgaatggcataacgaccggtatggatattctgatcgaaatccttgtattttgccatccattggaatccggtgaacttattgacatgcccgaattcttttattttatggtaaatagaatcggcagtatcatcccggtctacataaatatatacggttttagatgggtgaaattggggggcaaacagataataataaaaggtgcctccggcaactgcacaaaggaggaatgctccgattagaattgatagtagaatatttctcttttttttcttcatcttttgaggtgtatttaaaaagttcgtcaaagataaaaagaatttggataggagtgttctctttttaggatgaatcataaggcggctacatcaaaagtatgttttctttcggtgcgattgtgaattcattctttcacgttacgtctgccttgcttgatttattcagctgcttattgtgtctctttgttttcattgtgattatctttttgtttccagagtagttccattattcccatatattgtgggactgttttcccgaaatatatgggaatgttttctcataaaataagagaatactttcccataatatgtgggaataagacaatcttttgacgttacaatgtgaaaccttgagagtaatacaacaactcccttttattgaagtgagagtctgtttgtaactagaatgccattggcacaaggagatgaattcatttcagagaaacgagttttgctatttaattaggccacagggagtaattaatatctgcttctattttgttttctatctcatcgggcagaggtgcgaagaaatccatgttagtcaggttctcgatgctatctattgttaccgcataggatgatagaggttctactgcctgctcattattgaataagaaaccgatagctcgcatcggcttgacaaaaggagaaaggactactttaaaaaacttttgaggtactacgactttattctttccgattgttttgggatgtttttcaataatagggccacatataataatgatggcgctgtctgctatggcccaattccggatcttttcttccagatttttccatcctcttctgtttagttgtggatgttgcggacacatattgctgaaataaaatgattctttcatagcttcaggactccatttcatatctgcggcgggagccatatgacctttgtcatatcctgaacgggtatagtcggcatttgtggcaatcggacctgtcactagtggatcggcaataaaacgattacctcttttttcttttcctttggtttcttccctggttaattcgtaagaaacccagttgggaatttttaaatctttgttatatgataccgtatatccgctatggcggatgatttgttcttgccggggaactagtgatatgggtgtctccagatctttaccgggtggaatttgaaaggaagtatcagtttgcggttcgttatttttctggatattaatttgctggcaatacaaataaacaccaaaaagaataggaatgagcacgataatggcgatgatacatcctaatctattattagagtgtgatttctttttgaatagttttctgtttttaccttttttatttcgattcattgattggctggtgatgacaggtttgttttattcttcttttctcatgctgaattcgcaaccgcaatattgttggttgtaaaagttatattctttaatgatggcaatacgtcgttcgctaagtccccctttccgccaattctgttcccagtatgtaacatccgggtaaaaggcggtagcatattgtccggcttcattgatctgctccagacttttccaacggctggaggcaagtgtcgtggtaattacagagaaaccatgttcgtgtgcgtaacgggctgtctccaataaacgcagtttaaaacaacgcaggcaacgtcctcctctttcaggttcctgctccattcctattatgtgacatcgccagttttcatgatcgtaatcagcatctataatctccaatcccaatgattgggcatagcgcgtacattcttcttttcttatcatatactcttcctgcggataaatattaggattgcaataataaatgacgggggtgatatgatgttgcatcatacattcaataatggctgatgaacaaggagcacaacaagtatgaagcaagactttatcggctcctcccggaacttcgagttggaatttctttttcatgctgtaaagttagtacatatttacgatacgagtcaatggtttatgttttattcagaatagtttttttagtatctttgtccactcaagtttataacagaacaataatgaatgaattaaattgcgggcaagaagagcaatatgcaggcccggagaagaaaaagagtacctcgaaaattgtaaagagaactttagttgtggctgcattagctttggcggtatatgttgtatattccgtagtttatttatttgtttcgcctgatcgtaatattcagcaaatctatctggttcccgaagatgctgcgtttatcattcaatcatcggccccgattgaagattgggaaaagtttagtggaagtgaaacatggcaatgtctgaagaaagcgaaatctttcgaggaagtaacggagagtgtagagaagctcgattcggtagtcaaaagtaataaagtgttgttgtcgcttgttggtgaacgggatatgcttatttcgcttcacaagactcgtgccacaaagtgggattttctgctgattctggatatgcagaaaacatcgaaaatggatttattgaaagaccaggtggaaaccgtattggtcatgagtggctttactgtcaccaaccggatgcataacggcattaatatccttgaaatgcgtgatcccgaaacaagggatattttctatattgcttttgtggataatcatttggtaggatcttatacgtccgggcttgtcgaatcggctattgattcgcgtaataaacccaaaatcggacttgaccagtcttttattgaaacggagaagttggtttccggtaaggggcttgtcagagtctttattaattatgcgcgcgtacctcaattcatgtctatttatctgggggcaagaaacgaatacattgatctgtttagcaattctatgaattttgccggactttacctaaatacggataaggagcggatggaagtgaaagggtatacgttgagaaaagattctgccgatccttatgtcactgctttattgaattcgggaaaacataaaatgaaagcgcatgagattctgtccgggcggacggctctttataccaatataggtttcaacaacccggtaacttttgtaaaagagctggagaatgcgatgtcggttcataataaacaattgtatgattcttatcaaagttcccggaaaaagattgaagggctattcgggatctctttggaagaaaactttttgagttggatgtcgggagaatttgctattacgcaatccgaaccggggttgttgggacatgacccagaactaattctggctatcagagctaaaagtataaaagatgcccgtaagaacatggaatcaatagaaaagaagattaagcggcgcagtccggttaagattaagacagctaattataaagatttcgagattaattacgtcgaaatgaaaggttttttccgcctgttctttggaaaactatttgataaatttgaaaagccatattatacttatgtcgatgattatgtagtttttagtaataaggctgcatctttgctctcttttgtggaagattacgagcagaagaatttattgaaaaataatccgggatttgaaaatgcgctttcctatttaaagtcgagttctaccattttcttatatacggatgtgcacaagttttattcccaactgaaacctatgatgaatcctgccacatggaatgaaatacaatccaataaagatattctgtattcgtttccttactggactatgcaggttataggagatggacggtcagcttctttgcaatatgtgatggattacagtccatatcaaccggaggaggttgttgccgttgctgccgatgaagatgatgaggaaatgaacgaagatgctgaaactgaaaaagaacagatgagcgaattgaagcgtttctatgtcgaaaagtttgaaggaaacgttttgagggagttttatccggagggagcgttgaagagtgaagtggaagtaaaggaaggaaaacgtcacggtcgttaccgtgaatattatgaagatgggacattgaagcttcgtggaaagtatgcaaataataaaccgaagggtacatggaagtactataccgaggacggaaaatttgagcgcaaagaaaagttctagattacgtcaacaaaagttgatttaaaaattatgctcaaaaaataatcggattctttttgttttctcaaataaagctgtaattttgcacgccgtaaacgagagacaaacgccgctatagctcagttggtagagcaacgcattcgtaacgcgtaggtcgccagttcaagtctggctagcggctctcaaactagaacgctgattattaattaataatcagcgttctagtttttacaggattccctattcttattttaaaagggaaatcctgcgtatgtaatagatgtgaaatataaaaatgtaatctatgttgagtcgtattattgttttagtggttgccggagtagccgtagtctatatcgttcgctttatagataactttttctcccagcgtagaagataaaactagctttcaaacattctgctgcgtgcgagcatacaagcgccaacgatgccggctttgtctttcagcttagatgtgatgatggctgaatctttattaaccagatttagagagtacttgcgtacggctgtttttatgggctgggtgatataatcgccagttaaagataaagttccacctataatgaccagttccgggttgaagatattgattagcccggcaatctgtttgcccagtttctgcccgatttcttctacaatttcaatgcaaagcaggtcttctttattcacagcggcaatgatctcatcaagagtgatcgggttttcctctgtggcgattcgtgtagatagaatggaactttccccactttgaatacgctctaataagatacgatgaagtgccgatccggaagcttccgtctccaagcaacctttttttccgcaatggcagattatctcattatcataagcactcatatgtccaaattcaccggagaatccggattttccggtataaatcttaccatcaataataattccgatacctactccccagcttacatttacaaaaatgatatccttttctcctttcacgcagccttgcatgtattcgccataagtcatggcgcgtgtgtcattatcaatggttactttatatcccaatttttcggataatacatccgccaacggcctttcctcaaaattgaattgactgaagctataccctgattcaggatttacacgtcccgacacatttacattaatatttaagatcttctctttattaatagtgagcttctttataaaattgagaatatgcttgcataactcattcatcccttcgattgagttctcaaatttataaggtatattcattttcaattctaccatatcacctttgaaatttatcagtccgatattgacggcgaatcttttgatgtctacacccaaaaagtaaccggattccggattaagcccatagaggttgggatggcgtccgccactagtctccaatttgccataatcattaatatatccgtcatcacacatttcaccgataaatttggtgacagttggtacacttaaatccagctcttttgaaagatcgggaattgtggaacttccattatatatataatgtgtaataatcctctttttgacgagagcgcttttagagcccttttctatttctttcaagaattgttggttcataactatgtatatttggtaattcacacaaagataattaatttttttattaatatgtggttttggggctttgaaaattagaatatcttgaatgttatattccctatatactatgtaatggatttatatataggataatgtagctatggacgattgtggatataataaatgaaagtagacgatttgtgaggtaattccctcttctattaattaataatgcaagaaataatgattttattaataaaatattttattatctattgtttatttaataaatatagctatatttgtgccgtgatattattaataaaactctatatccttaaatgaatttagtatgagaaactattttttaggtctgtgtttattatttgctttgtgttttacagcatgctctcattcagatgattctgttgatgtgctaattattggtggaggtgccagtggagtgactgctggtattcagtctgctcgaatgggggctgcaacattgatagtagaagaaacagaatggctgggtggaatgcttacatctgcaggtgtaagtgctgttgacggaaactatgatttaccggcaggcttgtttggtgagtttcgcgaacatttggcagattattatggagggcttgattctctaaaaaccggttgggtgagtgcagtgttgtttgaaccttcagtcggaaataaaattttccatgaaatggttgacgcggagaaaaatttaaaagtatggcataatgctactttggtaaagttggaaagagagaatgatgcttggattgctcaaattcagatgaaagataatacaatcaaaaaaatacatgctaaaatattgattgatggtactgaattgggggatatagcaaaaatgtgcggggtgaaatatgatgtcggtatggaaagccgtcatgatacaaaagaagatattgctccggaagagaaaaataatatagttcaggatattacatacgtagcaatcttgaaagattatggtaaagatgtgactattccttgtcctgaaggatataataaggatgaatttgcttgtgcttgtgccagtcacgtttgtatcacgcctaaagaaccagatcgtgtatggtctaaagacatgatgataacttatggaaaacttcctaataataaatacatgattaattggccgatagaaggcaatgattattatgtaaacttgattgaaatgacccgtgaggaacgtgaagaagccttgaaatatgcaaaacattatacgatgtgtttcgtttattttctgcaacatgaattaggttttaatacattgggcttggctgacgatgaatatcctacagccgacaaattaccatttattccttatcatagagagtctaggagaatacatgggctagtacgttttgatttaaatcatgcttgtgaaccgttcaggcagtctcaacctctttatcgtacttgtattgccgtggggaattatcctgtggaccatcatcatacgcgttatcatggatatgaagagttgcctaatctttattttcatccgataccgtcatacggtttacctttaggaactttgattccgaaagatgttgaaggattgattgttgctgaaaaatcaatatctgtttctaatataattaatggtaccactcgtttgcagccgatggttatgcagatcgggcaggcagcgggagcattagcagctcttgcggtgaaagaagataaaaatataagagaagtatctgttcgggaagtacaaaatgcgattttggatggaaaaggatatttattgccttatttagatgttgaattagatcacccaatgtttaagtcactacaacgtatcggctctacaggtatattaaaaggtataggtaaaagtgttgactggtcaaatcaaatgtggttcagggcggatacattattattggcaaatgagttgaaaggattgggtgatgtttatccttttgtcaataagcaagtattcgaaggtaataatactatatcaattcagaaagctacagagttaataggaggaattgccgaaaaagaaggttttgagatgaaagagggtagggtagaagagatatggaatgaatttgaattgaaggactttgatatgaatcgaggcatcctacgaagtgaaatggctattttgattgatcagatattagatcctttcaataataaaaaagtagatattacaggacagtatattcaataggtaataataatataagtgttaactgctgttttaattaaactaatatgaaaacattagatcgaagagactttctaaaaaaagcctcattggctggcgcgtcagccttgactgtaccaactttgtttgaatcttgtacttcaaaagctagtgccagtacagtagtggcaactgatggtttggaaagtaaactcattgttcctaaaaacaatggcttaaaaattaccggaacttttttggatgaaatatcacatgatattccacatcagaactggggtgagaaagaatgggacttggattttcagcacatgaaaaatataggaattgatacggtaataatgatccgttctggttatcgtaagtttgtcacttttccttctccttatttattgaagaaaggttgttatatgccttctgttgacttggtggatatgtttttacgtttagctgaaaagtatggaatgaaattctattttggactatacgattcgggtaaatactgggacacaggagatatgacctgggaagtggaagataacaaatatgtaattgatgaagtttgggaaaattatggttccaagtataaaagttttggaggatggtatatcagtggtgaaataagccgggcaacgaaaggggcgattggtgctttccatgcattaggaaaacaatgtaaggatatatctaatggattaccgacttttatatcgccttggattgatggcaaaaaagcaatcatgggaacgacaaaaatgactaaagaagatgccgtttctgtacaacaacacgaaaaagaatgggatgaaatttttgatggaattcatgatgtggtagatgcatgtgcatttcaagatgggcatattgattatgacgaattggatgcgttcttttctgtcaataaaaaattagcagacaagtatggtatgcaatgttggacaaatgccgaatcttttgaccgtgatatgccaattcgttttctacccattaagtttgataaacttcggatgaagttggaagcagccaaacgtgccggatatgataaggctattacttttgaattttctcattttatgagtccacaatcagcctacctgcaagcaggtcatttatatgacagatataaagaatattttgaaataaaataaatgttatgaagtct

SEQ ID NO: 8079 - DNA, 8515 bp, Unknown
  gut microbiota DNA sequence
ataataagactatccacaaactatttgtttatattcatattttcctttttcaatgaacaaacaataaacaactactctcataaaacatcacacttaatatgtttctatgaacagcgtttgttttttcatatttttttagtgaatgtaaaataagggcggcgctctttgtgaggaggagtgccgcccttattttataaccttaccatacattatgaaggttaatgactattacatttcgcttaagacttcttcgcaatcttgttccgctgcgtccacgcaaggaccataactccgatcagcaacaaagccaatgctgcataagcaatactttctgtaacctgtatgctttgtggatcaaaccacatttcgatggtatgttctcctgccggtacatttatcgcacgcaagatataatctacacgggcaatatcgacgggctgaccgtcaatagtcgcctgccatcccggataatatatttcggagaagacaacaactccgtctttaggagtggaagccttgtaaaccagacgattcggctcataactagtcaactggatggtagatagagaatctttatatccttctgtcacacctttcaattgttctttaaacttcacatccactacggctgtttccgttggaagaatatcattcaaagcgtcgatttcttcatttgcattatttacatactgcaccttatctacgaaccatgcattgccgtatgcataaggatttaccacaggaacagcctgcccttgctcgccggcagggaaaatgaagtattttgtattcagcatattcagtacacggaatttggaagcgtctacactgtccatctgtccgccggcagtagccacagcctgataggtttcctgcatttcgggcatgatatgatgatctatcatttcctgatagcgacggagcttcgctgcatgatagccaccgacactcttatgccagtatgccgtgttgttttcattaaacgtattaccggggaagcctataaagttcaacacacgataatttaaagtagtatcctgaagaatcatctcatccgcctgtgttttaacaaacgcttccgtctgtttggatttcggcacaaactgttcgtcattcaaatagcgtttattgatgctccacatatctatcagacataaaagcgcaataccagccaatgtgaaagaagctttcaacttccgctgttgatagaggaataaaagcacgcaacctatcacgataataaagaaactgcgccatgcatctgaagcaacaacagctttacgcatttcggtcagattggctacaatcggcgcaagatgttgggcacgggattcggcaggaagcacttgctccaaagtagctatttcttgtgctgtaacaaagctggaggaagagactcccggagcaaccgccagaatcaacgcaacaccggcagtcaataccagagtagcaatcacacccccgcgattctctttcaatttcaacgtatccggcttgttcaaaatctctttcaaggcaaaaatcgccagcaaaggaatggtaaattcagcaatcaccaaaatggaagaaacagcgcggaacttgttgtacatcggaacgtaatcgataaagaagtctgtcagccccatgaaattctttccccatgaaagcagaatcgaaaagatagtagctcccagcaatgcccatttgagaggacctttcacaatgaaacaacctaatacgaacaggaacattacaaatgcaccgacatataccggtccagcagtccatggctgttcaccgaagtattgtcgtggaaactgtgaataaataccgctatacattggattggcttttgccatagcaacttcgctttgcgacatcgtagcccctgatcctcctccctttacgttcggaaccagcaacgtcaatgtctcgccgataccataactccagttggttatgtagtcacggtccaacccgctacttgcctggctggccgcagcgccctcctgcttcaattcgctcttgccgcgcatcgtctccttactatattcataagtatgatacagattggagatattgatacaaactcctaccacggcagccaatgccaaaattgcgctggccttgaagaaatggggcagttctttctttttataagcatcttcaaagtacgctcccacgaagaacaggatcacaaacatgaaataatagctcatctgaatgtgattcgactgaatctgaagggcgatgaacaacgctgtaataattccgcccaacaagtatttcttccggtaagccagaacgacacccgcaatcgtaggtgggatataagccaacgtcacaaacttccaaatgtgccctgccggtatcagaatgaagaaataggaagaaaaagcccatatcactccgcccaatcctgccaaccaagccgatattccgaaagcccgcaaaagaatatagaatccgagcatcataataaaagtcagcactacataatccgggagaaagaggcgataaaccttctccacccctttcagggacgttgtcgagtcgtaactcggagacatctgataggtaggcatacctccaaaaatcgaattcgtccagcgcgtacgttctccggtacgttcgaaatactctttcgattcttgtcctgcgccgactccggcagccgtgtcatgctgaaacaagatacgaccttcaatatcagccggaaaaaaataggcgaaagaaagaatgataaaagccagaatggctattaagtcgggaagaaactttttcatttgcaatgacacgatttactatttacgattgaagtttgaatataaaataaattacgatctgacaatccaatatttacaattgataacggtagaataccgatctcccacatttatcaatcgtaaatagtaaatcgtcaaatcgtaaatctaattagtatctataatgatctgccttataaggtccgtccactgacacaccaatataggcagcctgttcaggagtcaacttggtcagtttcacaccgatcttttcaagatgcaggcgggcaacttcttcgtccagatgcttcggcaagcgatatacattgatatcatatttcttgttgaacagttccatttgtgccaatgtctgattggtaaatgaattactcatcacaaatgacggatgaccagttgcacatcccaaatttaccaaacgaccgtcagcaagcaaaatgatgctgtgtccatccgggaaataataacggtctacttgtggtttgatgttcacacatttgatacccggataatgtttcaaggcatctacctgaatttcattatcgaaatgaccgatattgcaaacgatagactgatctttcattttctccatgtggtcgatacggataatatcgatattacctgtagtagtcacaaaaatattgccttccatgcaagcttcttccatagtcaccacttcaaagccttccatggcagcctgcaatgcacagatcggatctacttccgtcacgagcacccgcgctccgtaagaacgcatagaatgagaacagcctttacccacatcaccataaccacatactaccaccacttttccggcaatcatcacatccgttgcacgcttgataccgtcagccagcgattcgcggcagccatacaggttgtcaaacttagattttgtgaccgaatcattcacattgaatgccgggaacaacagtttgccttcttcctgcatctgatacaaacggtgtacgcctgtcgtagtttcttcagacacgccacgcacttcttccgctacacgatgccagcgagtactgtcttccgccaacactttcttcaagattgcattcagttctatttcatcctctgcatgtacttctttatccaatacggcagcattattctccgcatcataacctacgtgaatcatcatcgtagcgtcaccgccatcatctacaatcacattcggtcctttaccaccggcaaagctcaatgcctgtaatgtacaccaccaataatcagcaagagtctcccccttccatgcaaacacaggcacacccgtagcagcaattgcagccgccgcatgatcctgcgttgaatatatattacaagagcaccaacgtacttcagctcctaaagccactaacgtttcaatcagcacagccgtctgaatggtcatgtgcaacgatcccataatgcgggcaccttttaacggtttggattctccatacttttcgcgaagagccatcaggccgggcatttctttttctgccaaatcgatttccttgcgtccgaaatcagcaagcgtaatatctgccaccttatagggcagagtagagaataattctgtagacatattgtaaatcatttatatataatggatgcaaagatagaacattctgattagtagggcaaaagctatccgttttttttatattataataacttgggaggcaatccgcgtctcggaatattgtcttatatttgcaacagataaaacaatttctacaatattctaatgaataacaataaatcttctatgagacattacgagggcaaaacgaaggagaaacttttagaaataatcgaacaattagaagagaagatagattttctttcctctcattcttcgcctccttcccaagaacgttttcgcgataaatacagcacccggatattggatgccctccccgatatgctcaccgtcttcgaccatgatgccaatattatagagcttgcttcttcaccggcaaccaaccacgtagaaggtattaatgccagtaatatcaccaccactaacgtaaaagatattctgccggaagaagcttatgagagtgtccgcaagaatatggataaagtgatcctcacgggagaaagttccacagccagacatgacctgatgttggacggtgttttacatcactacgaaaaccgcatctttccgttggataataaatatctgttgtgtatgtgccgtgatatatcccaacaatgggaggcagaacagacgaacgcgcaacaacagaaagagctgaaggccgccagagtcaaagcagaagagtcggaccggctgaaatctgcttttcttgcaaacatgagccatgaaatacgcactccgcttaatgcgattgtcggattctccaaactaatcacttacgcaacatctacggaagagaagaatcaatatgcggaaatcatcgaacgaaattcggaaatgttactgaatctattcaacgatattctggatctggcctcactggaggccgactctttaaaattcaacattcgtccggtcaagttaacagatatctgtctgcaactggagcaacagttttgccataagacgcaaaacggagtcaaacttattttagatgatgtagatgcggacatgtatgcttccggtgactggaatcgtattatacaaattataagtaacttacttagtaacgccacgaagtttacccccaaaggagaaatccatttcgggtatcaggaaaaagaggaatttgtagagttctacgtgaaagatagcggcatcggtattccggcagaaagagttgccactattttccgccgttttggaaaggtcaacgattttgttcagggaaccggattggggctgactctttgcagaatgttagtagaaaaaatgggaggacgtatctggctgcgctcccaggaggggcagggaagcaggttctatttcactctccctttgattcgccaataaatgtgtcagtttgaggatacaaatgactgtatccgggaacgacacttatatgactatttacaattagatacagatcatacagaaaacgcggcctgtcgatgacaaagccgcgttttctattttatctatatttgaaaaatattcttttatttcttagcagccggggcgctaagcatttctttgtatttcaccggatcattcagtattttcatcgcttccttcaaaccgtcatcatcctttaactgctggatgatattaccacgttgataatagtaacgtttgataatttcagtagcaatcattttctttatgtcggtagagaaataatccaagtcacggtcgagattatgattcaacttcttctcaagagctttgaactcctctgaagcgtcatccatatatccttcaaactcggcagcttctttcaacgttttcagaattttctcactctgttggtcatacttgaagtcggctttcttcaccaatgctttaaaatcattataatcagcatctgtcacctcaaacttctccggagcaacgatagtgggatgtttcaaacaatactgcgttgcataatcgaagattagattatcacgtaccaaatagaaaaggatattcggtaatttctcttgtttgatcgtaatatccggcattacaccacctccgtcacggacttcacgtccggcagccgtatagaataccttagttaaactgtcgggaatagtgccgacacttccgtcttcattgcgatgtttgtaatcaatagcctgcacgcaacggccgctcggaatataatatttagaggtagtcactttcatcgttccgccataaggcaaagaacggggaacctgtaccagtccttttccaaaagtacggttaccaacgatcacagcacggtcgagatcctgcaaagaacctgataagatttcagaagcagaagccgttccgctatttaccagtacggcaatcggaatatccaaatccaacggttcacgcaacgttttataagtgttactggcctgtttgatttttcctttggtcgtcacaatcacttttccacgcggcaagaaataattcgcaatttctactgcttcatccaacagtccgccgccattactgcgaaggtctatcaccaatgaagtagctccctgtttcttcaaatccagcaatgctttcttaaattctttggaaggattgccggaaaaagtactaaggctgatgtaacctatattgttatccaatacggcagtataaggtattgccggattctgaatagactcacgcacaattgtgaactccatcggcgtacgtccgcctttcacattcggacgttcaatcttcaacttaaagctggtacccgcctgtccgcgcaacatctggctgacttccgcattattcttaccggcaaggtcttttccgtcaatctccatcaggatatctcccgctttcagtccggcttttgcagcaggtgttccctcgaaaggttcagaaatcatcgaacgctttagtttcgtattataagcaatgtaagaacctataccaccaaatgatcctttaatcatctgctccaactcactctgatcttcttccggataatattccgtataagggtccaaggtgtaaagcatattatcgattccttcccgaatcgttttattcggatcgatggtatctacatagaacatatccagttctttcacaatcgcgttaaatatatccagattctttgcaatctggaaattacggtcgtctccgctcttgaaactaaagaaagcaactgtggctatcactgctactgcaacaatagctattcgcctgttcagcaattttttcatacctctttttaatctaaatgagtcgtaaaagtagcttaatcctttgttattctgccagaatcctgttaatatttaacttaatttcatcccaacgttcttgtggcatcgttgttccgattacctgaataacatttcccgagagaatagaacctatttttgcacatttatccaacgagtatccacaggtcaatccatataagaatccggaagcgaaatagtcacctgcaccggtagtatccaccactttctgaaccggaatggccgaaacctttatttcctctgttcctttgcggatataagaaccgcttgctccgacttttacaatagcaatactgcatttcttggcaatcactcccaaagcttcctccggttccttgccggtaaaggctttcgcttcttcttcgtttgcaaagacgatgtcgacatatttgtttattaataaagagaagaactccagatcattggccacaatattataactagccatatccagacaaatctgcaaacctgcttcttttgccagttcaatggcatgaagaatcatttcatggtcctgaacgagatagccttctataaataggtacgcgtaacctttaaacatatccagcgtcagttcttccgctctcaaagaagccgctgctcccagataggttccgaaagtgcgctccccatccggtgagataaaagtggatgccacgccggaaggtagtcggtccgaggtcaataatttgtcttcaatcttatttttctgcagattttcacgaaaaaattctccataattatcatttcccacttttccgataaatcctgttccagcccccaaacaagccagtccgaggatggcatttcctgccgatccgcctgttgccaaatgggttttcatctgtgaaaattttgtgttaatctgctgtaacttagcgtcatcgatgagctgcatgcttcctttgggtaaacccatttcatccaaa

SEQ ID NO: 8080 - DNA, 62281 bp, Unknown
  gut microbiota DNA sequence
aaggagaaagcaaaaagctctctccttcttttaaaacttgtataatctagtctaattaattattctccggacgaagtttacgaacagttacagcagtctgccacatttcgctttcgcgtaattgacggagttcttcgttcaatttttcacgataatcaggttgtgaattactgtcgatagaaatctgtgcttcgttaccagtcttcacactgttatacaacttttcaactaccggtttgatagcatcgtggaatgggcccatccaatcgagagcaccacgttgagcagtagtagagcagttagcgtacatccagtccataccgttctttgcaaacaacggcatcaacgactgtgtcagttcttccactgtttcattgaatgcttcagaaggagtatgaccgttttcacgcaatacttcgtactgtgccagcaacaaaccttggatagcacccatcaatgaaccacgttcacctgtcaagtcagaagtagcttcacgttggaaagttgtttcgaacagataaccggaaccgataccgatacccagtgcgatagttctttcgtaagccttgcctgtagcatcctgatagatagcataagaagagttcaagccacgtccttcgaggaacatagtacgcaaagatgtaccggaacctttaggagcaaccatgataacgtcgatatcagcaggaggaactacacctgtacggtcgttccaagtgatagcaaaaccgtgtgagaaataaagagcttttccggcagtcaggtaaggcttgatagtaggccatactgacattactgctgcgtcagacaacagacacattacaatagtacctttctcgcaagcttcttcgataccgaacaaagtttcacccggaacccatccgtctgctactgccttatcgtatgtttttccttcacgttgaccaacgattacattgaaaccgttatcacgcaagttcagtgcctgtccaggaccctgtacgccataaccgattacagcgattgtttcatttttcaatacttcacgagctttttccaatggaaattcgtcacggattactacagtttcagtagtacctccaaaattcaactgtgccattttctttttgtttttagtttttgatgacttacgccatccgttattaattgattttatattctcacatttattcaaatatcactttcgagcggcaaacaacttcattgccattcttcttcacttctacgtgaaactcgtttgcgttcacttcatcgcagaagaaagagagttcatcaccaaaatagctttccgccacatacgccatttcaaaacgacggatacgtttggtcttatacaattcaatcgggaacaaatcaaggatatgctcgatgtaacggatgctgtttacatgaccgttgatatctatatcactgtattttgccgtcagggtagctatcggctgatcgcttgtcactttgatgcgtgaaggcttttcaatcgggcaaggctcatcacaaacatagtccacgatacttcccccatgcaaagtcaacaaatcggcaggcttgcgggtattaagattaatcattgcccatacggaacgtgcgtagccaatcttcttcccatccttatcaataatagcaaaattacggtccgtaaacaaacggtagacattttccacccacgtctgaaccgagaaattctcatactgataaggcatttcatccaactcaatagccagacgtgaaagcacccatgtataattgtcctcattcagcgttgcaataccaaaaccacggtcattggcgtgaaaacctgcacaattcagcagatgatttcccagtacccccatagtcagacgtccgttgaagtcaacatggaacggttctgccacaaactgataagtccctattctattttcttcactcattattcttattggtttttactttggttatacatagcttcccgtccatcgagaaactcattcacccgttcaaagcagctggtagtaatcgctacacgtcccgaacgaacaaactgcaaaacacaattcaaagccttcagttcaccatagagcgaagttatatcttcgctcattccatttttctcgacaatagaaaataccggattgacttccactatacgtgcattgtatctacgaatcagcttggatgcttccggagtttcctgaaaagcaggagtagataccttatatagtgcaatctcatggaagtatatttcatcctcggtgaaataatgtgcctgaatcacatcgatcttcttttcgatctgtttcactaccttctcaatggtgtccttatccgtcaaagctgtaatcgtatacttgtgtacacctttaatagaagaagcagatacattcagactctcgatgttgatttgccgacgagtaaatacagcagttacctgattcagcaatccggctatattttcggaatgaactattatcgtatataatgtcttgtcactcataatcctaaattttaattgcgaactttcaatcttccattctcaatattcaacttctcctagcattccaacagcatctgattgaccgaaccacccggaggagtcattggcaaaacattgccttcttccactacgcacgcttcgagcaggaacggaccatctgtcgccagcatttctgcaatagcttctttcagttcttcacgggtgaaagcacgtttggaaggaatatcataagccgaagcaaccttcatataatccggattcaacatcggagtaaacgaatagcggcgattgaagaacatagcttgccactggcgtacgtttccgaggtaattattattcaggcagataattttcaccggagctttctgctccataatcgtacccaactcctgaatattcatttgcagtccaccatctcccataaatacgcatacggtacgttccggtgctccaaaagttgccccgatagctgcgggaagaccgaagcccatagttccaagtcctccggaagtgatgatactgcgttctttcgtatatttgaagtaacgtgcagatatcatctgattttgacctacatctgttaccaaaactgcttcatgttgagtggcattgcttaccgcacgtaccacttcccccatactcaaagagtttgtggcaggatgaagttcaggacggattactttttcctcctctactttctcatattctttgaagctatcaatccattcggtatgagtgttctttttcagaagtttcgtcacagaagccagcgtttccttgcaatctcccaatacagctacatctacctttacattcttattaacttccgcaggatcgatatcaaaatgaatcacttttgcctgtttggcgtaagtagccaaattaccggtcacacggtcgtcaaaacgcataccgacagcaatcagcacatcgcatttattggtattgatattcggtcccagattgccgtgcatacccaacatacctttattcaacggatgttctgtcggcaaagccgaaagcccgagcagcgtacaacccgcaggcatatccgctttttcgataaactcacgcaattcgctctgtgcatttcccagttcaacaccttgtccaaccaatacaagcggacgttcagcgttattaatcagttcggcagcagcctgtacagactcctcatccgtatcgggaacaggaacataactacggataaaatcgactttcgtcggttcgtatttcgttttctctacttgcgcatttttagcaaagtccagtaccaccggccccggacgaccactacgagcaatgtaaaacgcacgtgctaccgcccaggctacatcttccgcacggcgaatctgataactccatttagtgattggctgggtgatacctaccaagtcaacttcctgaaaagcatccgtcccaagaaagcctgttcctacctgtccggcaatcaccacgataggcgtactatcgatcatcgcatctgcaatgcctgttaccgtattggttgctccgggaccgctcgtcaccaggcaaacacctacatcacccgatacacgggcataaccctgtgcggcatgggcagctccctgttcgtgacgaaccaagatatggttcaatatattttgatgatcgtacaaggcatcgaataccggcataatagaaccaccggggtaaccaaagatggtagtcactccctgatgttccaaggagcgcatcaaagcctctgcacctgttattaaatctttcatattagttgatagttgataaatgataaatgatagttgagaaatgacagttgaaaatgaatggtttacaatcattgcgctaagtgctgcgcagctaactattacctatcaactatcaccaactatattatataattctcactgctcccttatcggcagagcttaccatgctggcatacgccttcaggctcttcggtacataacggtcacgagtgacaggagtcatcggacgggccgccagttcttcatccgtcagtcgcacgttaatcttccgggccggaatatcgatttcgataatgtctccgtctacaatttttccgatattgcctccagctgccgcttcaggagaaatatgtccgatactcaatccggaagttccaccgctgaaacgtccgtcggtaatcaaagcacattcttttccgagatgacgggattttatataagaggtaggataaagcatttcctgcataccgggaccacccttcggaccttcgtgcgtgatgacgacgacgtctccactgacgactcgacctccgaggatgccttcacaggctgcttcttgcgaatcaaatactttggcaggtccggtaaacttccagatactttcgtctacacctgctgtttttactacacaaccgtcttgagcaatattgcctttcaatacggccagtccgccgtctttactgtaagcatgttccaagtcacggatacatccgtttgcacggtccttatccagttccttatagtacataccttgtgaaccaagtacgagattgaatttatttccggctgcgctcgaatatttcttaattgctttttcgctcacattcgggctggtgattgaatattcgttaatggcttctgccagtgacattccgtctacccggcgaacggatgtatctatcaaacctccctttgccagttcgtccataatggcaatgataccaccggcacggtttacatcttgaatatgatatttctgtgtattgggagccaccttgcagagacaaggagccttgcgggaaagcatgtcgatatcatccatcttgaagtctacctctgcttcgtgagcaacggccaacaagtgaagaaccgtattggtagatccccccattgctatatccagcgtcatggcgttcaggaaagcctgacgggtagcgatgctacggggaagtacactttcgtctccctcttcataatataattttgcatttttcacgatcagttccgcagcgtctttgaaaagttgcgtacggttttcgtgtgtcgctacaatggttccgttgccgggaagagccagtccgattgcttcattcaggcagttcatcgagttggcggtaaacataccggagcagcatccgcaagtaggacaagcattttgctcgatattcgctacttcctgatcgctaacactttcgtcggccgatttaatcatcgcatcgatcaaatccaggtgctggccattccattctcccgcttccataggaccacccgatacaaatacggcagggatattcagacgcatagccgccatcaacattccgggagtgatcttatcgcaattgctgatacataccattgcatctgccttgtgcgcattgaccatatattctacgctgtctgcaatgatgtcacgtgaaggaagcgaataaagcataccgtcatgtcccattgctataccgtcgtcgatagctattgtattgaattccgcagcgaagcatcccagcttctcaatctctgccttcaccagctgaccgatttcatgtaggtgtacatgccccgggacaaactgtgtgaacgaattgacgatagcgataatgggtttacccatctgattcttcttcatgccgttggctgcccacaatgcacgggctcccgccatccgacggccttgtgtactaaacgaactgcgtaattgctttttcatttcaatctatcttttaattaaagagccttcctcacacaagtgagaaaggctctaaattctatcttttatggtacgaacacatacaacacaaaaacctttctcacgctcttgatgggaccaccacgacgcgaataatatgcaggactgctaggttaatagatgtatgtaacatattcatatcttcttttctttattttcgtgctgcaaaggtaagggcttttttattatatccaaacaaatcgaagaaaaaaatcacttaaaagcgaataattgtaagaaaagagaggtattatttctctattttatcacttaaaggttgaatttacaactattatctaactgcgcgcctcactttctttttctgacaaaagcacttaataatctgaaatttaccctccctataccggactacaagcaaataattcgtatctttgtagacccgtatttacgggaattattaatcagaaacaaaaaagatcagatggaaacagtagaaaacaagtacattaccgttgcatacaaactatatacaatggaagatggtgaaaaagagttgttcgaagaagcaaaagcagaacatccctttcaattcatttcaggattaggaacaacactcgaagatttcgaaaatcagataactgctctttctaaaggtgataaatttgattttaccattccggcagataaggcttatggacaatatgacgaacaacacgttattgacctccccaaaaatatttttgaaatagatggcaagtttgacagcgaacgtattaaagaaggtaacatcgtacctttgatgactggcgacggtcagcgcgtaaatgccagcgtagtagaaatcaaaccggatgttgtagtagttgacctcaatcacccgttggctggtgccgacctgattttcgaaggtgaaatactggaaagccgtcctgctaccaacgaagaaatccaggaattggtgaaaatgatgagtggcgaaggtggttgcggttgcggatgcgacagctgcggtgatggctgtggcgacgactgcggttgcgaaggcggacactgtcattaattgaagtattaagtataaagtattaagtattaattccgtgcggatatagccggagttttaatacttaatactttttttatgccgttattccggctaatacttaatgcctaatacttgatacttaatacttaaaatcagcatcctttgtgcgtcatgatgtcaagtaccattttatccgtttcgttcatggcttgcgagccgattcttgtcaggttacggatactttggtctacatcttcatctataattccttctacggaagtcacacaacggtcttccattgccatcatggcagacagtacggctgtcgaaactccggtggttaccttcaaggcacaactcggttttgcaccgtcacaaatcattcctgtcaaattggcaatcatgttttgaacagcgaaggcaacttgattgtagtttcctcccattaaccaggtgattccacaactggaacctgtggcagctaccacacaaccacacaaagcagacagacgccccaaactttgtttgatatatataacagtgagatggctaagcattaaagcacggatcagttcttcttcactttttccgttttcttctgcaaagacaacgacaggaagtgtagcggatatcccctgattaccactgccagaattactcattacaggaatcatagcaccggccatacgggcgtcacaggcagccgacgtataagagagaatatgagaaaacacactatcccccatcactttatgctcataagttccccgaagcattttccctaaagaatgtccgtagttacctttaaaggcttgctcggcagcagctttgttcaaacgggctgtgtctaggatgaaacggatttcatccagcggagcagtcagtgcaaagtcatatactttacgcaagtttagttcgggcgaagcctcttcctcttcctcgctgactgtctgttgcttgtcgagcaacgtttgttcatttttggctatatatataaaggtagtatgtccaccggcaatgatggctttagccgttttatcttccgttttacagatcacttcgatatacagcttttccgtaatatcttcttttagagaaatacaaatccgtttttctgcgatgaattgttttccctgttccaccgcttccggcgtacaatccctcaatacctccaactgataatctgatttgccaatcaacgcacccaaagcaaccgctatgggaagcccgaccatacccgttcccggtattccgactcccatggcattctttaatatattagcacttaacaggacttctatcttttccggtttcgctcccagtgtttcggcagctttagctacacaaagcgctactgcgataggttccgtacatccgatagccggaatgacctccttcttaatcaattctataatttgccttctttctgattcagtcatagacttataagttttggttccacaaaaataggaaattctttcttttccaacattctataatgaacaaataaaatctcatattgttataaaacctcccatacaccaaactttaacagaaagaattgatagaaaaatgaaagcaaaacacatagttgtttatttgctactagctattgtttcctcttcatgtatccgcgaagaagctctcaatgcagaagcagacatattaagttgtatactaccgggagtagccatgacaaccagtcctattattaacaataattccataactatctttgttggtccgggaactgatatttcagaactcaaacctgaatttacactgactccgggagctgcgatcagtccgcttagcggcacggaacgaaacttcaataccccacaggaatatactgtcacagctgccgatggtgtttggaagaaaatgtataccgtatcagtgatcgacacggaacttgccacgaactataatttcgaagatacactgggcggaaagaagtactacatatttgtggaacgcgaaggagataaggtcgtcatggaatgggccagcggaaatgcgggttatgccatgaccggagtagctaaaacagccgatgattatcccactttccaaataacagacggaaaagccggcaaatgcctctccttagtgacacgcagtaccggattcttcggccagatagcaggaatgcctattgcggcaggaaatctgtttatcggctctttcgatgtgaataacgctatgagcaatcctctgaaagcaactaaattcggcctccctttccggcatgtacccacttatctggctggttattataaatacaaagcaggagatcagtttacagaaggaggaaaacctgtgaacgggaaacgggatatctgtgacatatatgctatcatgtacgaaaccagcgaatccgttcctactctcgacggaacgaatgcattcattagtccgaacctgatttcaacagcacggattaataatgccaaagaaacaaacgaatggacttactttaaacttcctttcatcactctccccggaaaattcatagataaggagaagctaagggatgggaaatataatatagccatcgtgttcacctcaagcctggaaggagatcattttaacggagcaatcggaagtacattactgatcgacgaggcagagttaatctatcgctcggaaaattagcgggatttcgaaaaagaattttccatagcaatacgctgataatgcgctcaaacaatgtactcatacaaaacgtacacattatcaaacaaacggaattaaataactttataacaatcataatgataaaaatctatccgtatatattcagtttactagcctgtataggaatagctctccccggctattcacaggtagaccgaaatgaaacactgatccgttccgcccttcacggactggaatatgagattaaagcaggtttcagcattggcggcacagccccgcttccccttccggtagaaatccgttcgattgacggatataacccgacactggccatcagcatagggggcgaagtaaccaaatggattgccgttcagaacaaactcggaatcatagtcggactccggctcgaaaacaaagcaatgatcaccgaagccaccgtaaaaaattacaatatggaaattctcggacaaggaggtgaaagaatcagcggagtatggacgggcggagtgaaaaccaaagtacataccgccggactgactatacctctaatggctacctacaaactaagtaaccgatggaacatcaaagccggaccttatttctcgtatctgctttcaagagaattttcaggtcatgtgtacgaaggatatttgcgggaagatgatcccaccggtccgaaagtagaatttaccgacggcaaaattgcaacctacgatttctcggacgacttgagacatttccagtggggattacaggtgggagccggatggcgagctttcaagcacctcaatgtgtatgctgatctcacctggggattgaacgatatatttaaaagcgattttaatacaatcacttttgcaatgtatcctatctatttgaatataggttttgggtacgcattttaagtctcaccacagattacacagattaacacagattgatttataagtcatagactatcaatataaataatctgtgtaatctgtggtgaacaagaaattaatttccaccagactccgccacctgtttcactccggagtaggtcacctttacagtctgttgcaatgtaggcactttcacgttaatggtcatgtctgcatttccatcttctaccgttcctgtaacagttacaggacaagtacccaaagcagcggcatttccctcaaacgtaaggtcttgctgtccggtaaatgtagacacaccttcccctttcttcacttcacacttatcaacaacaatatctccaaacttcagaatctgttgattgatgaacaattcaaactccttcagttcaatcttcacttccgtattgctgacctgcgatagggtaataaacttctctattccatctcctatgacaatttcctggtcagaaccatccggtatcatggatatatccagatttccccaatacgttccgactacatccggagccgttatcacagcttcctcttcaggaggattcccattatccttgttatcactgtcgtcatcgtcactgctacaagcagcaaagaaagtaagagagcagaccaatgccaataaatacaatagattctttttcatacgtctttggtttagttattataataaattcgtcccttataaactaaaaagaagaaaaaaggttcaatatgcttcctttttcgaagatatttcgagttcacaactttcttatcgaaaactttgttatatttgcatatagtaattttaaaaaagccacaactatgtttaattcatttggcaatatctttcggctcacaagtttcggtgagtctcatggaaaaggagttggaggagtgattgacggatttccggcaggaattgtcatcgacgaagaattcgtacaacaagaacttaatcgtcgccgtccgggacaatccattcttaccactgcacgtaaagaagctgataaagttgagtttctttcaggtatttttgaagggaaatccaccggatgccctattggttttatcgtttggaatgaaaaccaacactccaatgactacaacaatctgaaaaatgtatatcgtccttcacacgctgattacacgtacacagtgaagtacggaatccgtgaccaccgtggcggcggacgttcttccgcacgcgaaacgatttcgcgcgtggtagccggcgcattggctaagttagcacttcgtcaactgggtatcaatatcactgcctatacttcgcaggtaggtcctatcaaattggagggtacttactcggattacgatcttgatttgatagaaacaaacgatgtacgttgtccggacccggaaaaagcaaaagaaatggcagaccttatatataaggtgaaaggagaaggcgacaccatcggtggcacactgacctgcgtcatcaagggatgccccatcggacttggacaacctgttttcggcaaactccatgctgccttgggtaacgccatgttaagcattaacgctgccaaagcattcgaatacggcgaaggattcaaaggactaaaaatgaaaggttccgaacagaacgatgttttctataataacaacggacgcatcgagacacataccaaccactccggaggtatccagggaggattgagtaatggtcaggatatttatttccgtgtagtattcaaaccgattgcaacgttgctgatggaacaggaaaccgtcaacattgatggtatcgacaccaccctgaaagcacgcggacgccatgacgcttgtgtactgccccgtgccgtgcctatcgtagaagcaatggccgccatgactatacttgattattacttactggataaaacgacgcaactgtaatgaacgaaattcagaaatacataatggcgcacgagccagaaatgatgaatgacctgttcagcctcatccgcatccccagtatcagtgctctgccggagcatcacgatgatatgctggcttgtgcggaacgctgggcgcagttgttacttgaagccggagcagatgaagcattggtgatgccctcaaagggtaatccgattgttttcgctcaaaagatggtcgatccggacgcaaagactgtattggtttatgctcattacgatgtaatgccggccgaaccgctggagctttggaaaagccagccgttcgaaccggaaatacgggacggatatatttgggcacgtggagcagatgacgacaaaggacaatcattcatccaggtaaaggcgttcgagtatctgcttaaaaacgatttgctgaagaataatgtaaaattcatcttcgaaggtgaagaagaaataggctcacccagcctggaggctttctgcgaagaacacaaagagttactgaaagcagatgtcatccttgtctcggatacgagtatgctgggagctgaacttccgtctttaacaaccggtcttcgcggactggcttattgggaaatagaagtaaccggaccgaaccgggacttacattccggacatttcggcggtgcggtggctaatcccatcaacacactttgccagattatcagtaaggtgacggatgccgacggacggattaccgttcccggattctatgacgatgtggaagaagttccgcaagccgaacgggaaatgattgcgcatattccttttgacgaaaagaaatacaaagaagcaatcggcgtaaaaaagcttttcggagaaaaaggatacagcacattggaacgtaacagctgtcgtccgtcttttgacgtatgtggcatttggggcggatatacgggagaaggttctaaaaccgtacttccttcaaaggcgtatgccaaagtttcctgccggttggttccgcatcaggatcatcataagatttcgcagatgtttgcagagtatatttcaagcattgctccggaaactgttcaggtgaaagtgactccaatgcatggaggacaaggatacgtatgcccgatttcgctttctgcttatcaggctgccgaaaaaggctttgaaattgctttcggaaagaaaccgctggcagtacgccgtggtggtagtattcctatcatttctacttttgaacaagtattgggaatcaaaactgtattgatgggattcggtttggaatcagacgccatccattcaccaaacgaaaacttttcactggatattttccgtaaagggatagaggcagtcattgaatttcatcaggaatacgccagacgataaagcggacagacaaaaagtctaattataaacggtatataaaaaagagcgatggacaagtgtttgattacaaacccgtccaccgctctttttatatatttacagataccaacaaattacatgaccggagtctggaaaaggaaagtgaatgattgactgtctttcaaatctttcactgcatcacctgcataaatctctccctttgtcagagacaatttcttaatccctgctttcggactaaaatctattttcttcaagtccagccaaaacatattcggtgtcaaagtagattcgaaataatacactttattcttctgatcggaaacggaacgccaacgggtagaagaaatataaggcttctccggcgtgttaataccaaatggtacagaaacattacgcatcacactcaatacactgggaactgcaatttttgcatcagcagtttgcggaatggcatgaatgtagaaagaagccctgacaaagcggtcactcgcacgatttgttcccggtagcatctgtaagccaccaatttctttccaataatcattaatagccaattgatagtcatatcggggagaatttgtcatcacccggtattctttcccttcgtgaatacttaattttccatccaaatattccaatacagccgtattcccagtttcatcggttatagccagatgcaaggtagattccggtcccccattcggcatacggggagcatcaatccggaaagtctcttttttcagttcatccacggcttcgcgtaccgtagcaaagttatcaagcacatactgtgtccaaatgctgattcccattgccggacgggtatcaccgggaagagagtaaatagattccggtaagaaaagcagactcgccaccaatcctttctcgttcattccatcgcaagtaccaatatcatatcctgtggcaattacacttccgtatttggcagtccagttcaccgttttatccttgttatgtcccgcacgctgaataccacgtggaaacacatagatattcgtcatgatatcttctttccagtccatggtacgccccgttatcaccatctggtcaggacctatgtatactgcacgcgtacatgcttccacaggctgtatactccccaaagagacggcaaccaacaccaatgcaactcctgctaattgtttcttcatattctttctttttaaataattgatactcttatttataaataacaaatatgacacgattattgcctacaagaaagatgattttaatgaaaaaaaagaatttattcagtgaatgaggaagtttttggttttcgatgcatgacagttatcatcgcagaactcatttctagcgatagatattaaataaatgaaaaggatatgcataaagtattacgcggaggcagttattacaccttcgagaaatactgtaaagtcaccagccgttatggagtgaccccacaacggtgggatattgattacgggttgcggttagtagtgtctctctaacttatgtataaatgttaagtcggcttattaatcggccaatctataaagctcatatcctcccaatgccagtatgtagggcagattataaattacatcagcatccttctctacctcctcgggatacttttgtagtaattcgctgaaaggcataataagaggatgttgcaaaaataccttatccttcaccttagcacgtctccagccggccaccgtacgctcggcattccatcggtacttctccatgcgtactaacagatacaaaacttgagctggcagatcttcattgaacatagattcggatatgtgtgccggtgagtggtcactccgtctgatgccgtagcccaatgtgcgacaaaatacactataggcatctagttgatagcggttagcccaacgcaacggctcgcttagtttattccacaaatactgcgcctggtggttcatcaaaataaagtcggcagaatggttaccataggattcatacatcttcttcaatacctctttttgtttgaggctttcatcagcataacaacaatcgtataagtagttcacatacaaagccagtttatcttgcaagatgtttttctttattcccctgtctaccataccaaacaccttgacatagcgatagcgtcccttctcgtcgtccaccatcgacgacaaatcattattaaactcctgacggattagcacacgacactgatactgataaacttcatgtggtaagttgagtcctaatgaaagactcaaatcaggatcatgcacacaaatggccactgtaagcatacaatgcttattttgtgcccactgctgcaggcgggtacgcatagcagtactgcaaatatcgtcatggcaatattccacctcaatatcatctatttggctctctatataggggaattgagctttgaagtagtctttctgtgcctccatctcgcgatccactaaagtgatacgggtacgtatacgttcatctgcaggcagacggtcatcataattggcataatggcagatacgcaatgcttcgagtagcaacgaacgtcccactcggttgaatcccacgataaccagatgcacatagtcttgactggtagcgctccaacttccatcaggttgttgtgtaatgcttatggggcgataatccagcggatcataacgcctttcacaatcagctccataaaggctccatagctgccgggccaagttttcatggagattaaagggccgaaagaaaatattaggcttgccttctatacaaaagacttcgggcggcagattcattttctgtatgttagaatacgaagggatgctatcaaactgtacatacacaggcatcatcttaccatcataacatttaccacgcagagtacttaccaagtgcacaatagctatatttttagcatcgcgcccgtaacgttcttcatcacccagcacatatacttcaatagcactctctatgttcaaccgctgaagttcttcgatcgactcaatgttgccaaagtaaacaagcacttgtcgctcaacttcaacaggcagggccgactgtatacgatgccgcaccgttgccgactccataccgctcatcagcaaaatacgtgccgaaggacattcgtcatacagttcacgtatcatattgatagacaattcgttgaatccgatcagtacataatgattttttatattacggtaggtcattcgccccgcgtataccactcccacacgccgctctataatattagagatagtagagatgagcacaccgcccagtaaaacggatcccgaaatgctgataagccccactaatatcctgttaggccaggcagtctcttctatttggttaccgggatcgacaaagttgttgtacactgcccagagcctttctccccattcctcgtgtccatgcaattggatggaaaagagcatcgcgataataaaaaagatagccagcgccgtagcaatggtaacgagtagcaaggtgagctgtgacttgataccgcccgaaatggtgcgatctatatactcttgcgagaatatcttcttgtagtagtttgcaaaacggttcatagtagtccatatagatttatgtacaaatataatgtatttttctataaatcaagtagttttccactaaactatttcagccatacactttacctcgttactgtgcagaaaattagaaattcttccggaaagtacatccatttctccattccgaacacccgtaagcagtcttccctttaatgatggttcctttaccacaaagtggacagggttgacctacaaacgcatctacctcacctgctgcagaaggagttgaagctgccatggccaccggagcaggagaaccgggcgaatcagtcttcacttcattcgtcgttttttccgcttttggtttcttttctttcggtgtactcggttttcgttcacgctttttaggttctttcttctctttctcttcggcttttgcagcaactgcgtcctgaatagttatgcgtcgattcgtattatcagaaagtacactcattacgatctctgaaaccatctgctttagttcttcgaggaactggcgggcatcgtatgttttcttttcaatctcacgcaacttcttttcccaaatacctgtcaattctgccgatttcaataattcttcgtgaataagctgcaccaactccactcctgtcggggtggcaatcaggttctttctttccttacggatataatttcgcttgaacaacgtctcaatgattgcagcacgggtagacggacgaccgataccattctctttcaaagcatcgcgaagttcatcattgtccaccagttttccggctgtttccattgcacgaagcaaggttgcttcagtataaggtctgggcggctgtgtccatttttcattcaggtccggaatatgaggaccactttcacccttcacaaaagcaggaagtacattttcatcctcttcctctttttcttcagcagggtcttttacttccttggcaaacacgacacgccatcccggttccagaatttgttttccggttacccgaaactctatcttatccacttctcccattacggtggtagtagaaattttacagtccggatagaacacggctataaaacgacgggctatcaagtcgtagacacgacgttccatatccgtcaagttttgagcatagactccggttgggataatggcatggtgatccgtcactttcgagttgtcaaataccttttttgatttaagaagtgtagtgccagctaacggagctgtcaagacttcgtaatcacggagtcctttcaggatagcaggacatttcggataaatatcatcgctcaagaaagtggtatccacacgcggataggtagccactttcttctcataaagagactggatcagtttcagtgtttcatcggctgaataagcgaatttcttgttacattctacctgaagggaagtcaaatcgaacaaacgtggagcgtattccttcccgtctttcttgccgacattggtgactacaaaaggtaggtctttaatacgttctaccaatgcttcgccttcttcccggttggcaatagggtcgatgcccgggttatctattttcttttttccgccgttcttttcctcttccgcggcaatttcttcatcacttttgcgaatgagtgcagagaaagtggtattacgatagtttgttttcagttcccaatattgtttaggttcaaaattggctatctccaattgacggttgacaatcaatgccagcgtcggtgtctgtacacgaccgatagagagcacctgtttgttttgaccgtatttaagggtataaagacgggtagcgttcattcccaacagccaatcacccatcgcacgggaaagaccggcttcgtaaagtgattgaaattcagcttggtctttcagtttcgagaatccttcacgaatagcttcttccgtcaacgaagaaatccacaggcgcttcaccggacagcgtgcgccagctttttgcatcacccagcgctgaatcaattctccctcctgcccggcatcaccgcaattgatgatttcatccgcattctgcatcagccactctatcacatgaaactgcttctcaatacccggatcatgcccaatcagcttgataccgaaacgtggcggaatcatcggcagactgctcaagctccatgatttccagttaggggtgtattcatgtggctccttcagggtacaaagatgcccgaatgtccaggtcacctggtatccgtttccttctatatatccttcttttctggtatgagcgccgagtacttcggctatatcacgtgctacagacggcttttcggctatgcaaactatcattttttctcttcttgtttttaaactatcaatttgcaaagttacacgaatatttgtctaaaagaacaatatcccacaaaatatgttacctttgcaagagtagaattcttataacaaagaacaagtatgattgatttaaaccgcaaattgcccatcggaatacaaactttcgagaaaatccgcaaaggaaattatctgtatgtagataaaaccgcccttgtcggaaaaatggtgtccacaagcatcccctatttccttagccgtccccgacgtttcggaaaaagcctgctgatttccactttcgaggcttactttctgggacgcaaggacttattcgaaggactagccatctcacaaatggaagttgactggcaagtctatccggtttttcatattgacttgaatgcacgcaagtatgattctccggcagatctgatagcgatgctcaaccaacatctggaaaaatgggaagcaatctacggaaccgaaaagcaagatcgacaaccggaagaacgattcgcctatattatagaacgcgcatgtgtgcaaaccggaaagcaagtagtcgtattagtagacgaatatgacaaacctcttttgcaagctctggataatctgcccttgtttgaagaataccgcaaaatgctaaaagcattctatggagtattgaaaagtgctgaccgctatctgcgtttcgtatttctgacaggtgttaccaaattctcacaagtcagtgtattcagtgatttgaatcaactgaatgatatcagcatgaaaccgccttatgccaccatttgcggcatcaccaagcaggaactgatagatacattcactccggaattggataagctggcctcatacaaccggatgacaccagaagatacaatccataagatgacctcactttacgacgggtatcatttctgtgaatatgcagaaggcatgttcaatccgttcagtgtattaaatgtgttcgatggatataaatttgagaattactggtttcagacaggcactcctactttccttgtcaagatgctgatggatagcaactatgacctgcgaacgctcattgacggagtggaagcaaacgcagcgtcattcaacgagtaccgggcagaaagcaggaatcctattccgctgatttatcaaagcgggtatctgacgattaaagaatacgaccctcgtttcaagacttatcaacttgcttttcccaatgatgaagtgagatatggctttatgaatttccttctgccattctactctaatattcccgataatgagcaagatttctatattggcaaatttgtccatgagttggaaagtggcaatatcaatgcttttctaacccgccttcaagccttctttgccgatataccttacgaactgaatgaccagacagagcggcattaccagactgttttctatctgatattcaaactcatgggacagttcacacaagcagaagtacgcagtgcaaaaggacgggctgatgcagttgtcaaaacaccgaagtatatttatgtattcgaattcaaactaaatggcacagccgagcaagcattacagcaaatcgaagataaaggatatcttatcccttatcaggcagatgaacgggaagtcaaaaaggttggaatagaattcagtactgacacacgaaatgtcagtcgatggctacccgaggaataagagagtataattacttcttcctcatatttatctacaaatgattcatattaaacctcccaacacttccaccctttgttggcacagatatacacaatgtacgaacgaacatggtaattggggaattttctttttgtatctgcggcataacctttcacttgctctacgtgttctaccagcggttcggtgagcgcaagcatacggtcggcatctttggaacgatagtatttaaattccaccacgcgatcgtccgtgtaataatccgtgccggggatgccgatcatttcaaaatccgaacgaccgacggagttattttgttcgatggcaaaagtgtaacaatggctcaaatagcgggagacaagctcgtagaaagaacaacggataaagttctcgttgatcttatcgaaaacctgtgcggggaattgtcccagatattgctcgaaatagttctgcacaaggggttcaaaactacgattggaatcataaagttcataaaccgggacgtaacgactggcgttaccttcgatcttgttcagttggttgtaataatccatgtagatgctgcgcatggtcatgttggggagcaccatgcggtaagcactcttcaaggttgtcatgcctaaatagaacaggctgaccggatagaattctttctcgaagaatttcttcttgttaaatttgccggacagatctctgacgttgtatgacaattcaccgcctatcaccagggcatcgagcatctctttggcgttgttctgcgaaagagtcaggcagcgaatccagttgatgtccgtacgcaggttttcatcgatcagttcggagggaatacttccggcattagcggcaaatttcttaaaaaaataagttaagatagtggagttaaaaagacgttcaccgacagggctaaaacgataaccgtcgtagttgttcacaataagctgccagatttcctcgaaacgttcttcgcttgcaccgggagcatatttatcaagtacatagcgcaagtatgttttcgtttcttcataggtgaagccgagcatattcaaaaaaacgggtttgaatgtgaggatttccgcaatgttgtacccgctggtcaggtcgtccatgatgacaggcaatacgcctgtgcagaaacaagtgcgaatcgtgccttcgccgatacccgctttgataactttaaaaaaggtgagaagaaaactatcactagtggttacttcctcataaagtgagtcattataggaagtaagcagttgattggtgaagttatcgtattcgtcaatcaatatatatgctttaggcaatccatgtgagctgatataacccaaaagttcctccaacatctgcacagcatttcctcgagttgtaaactgaaaatcaccaaacaggtctcggttatgttctaccgtaacttccacgggtccacaattcaggtcattgaagttctgtaccaccccttccatatcatccgccatcaccatagccgagaagtcataacgaatcaccaaatattgattatgttcttccgtaggatgttcgccaatccaggtgccgccaaaaagttcttcaaaacgattcgctttcgtacggtcgtagtagtgggccaacatggagatgagcagacttttcccgaaacgacggggacggagaaagatgggagcattatagtcttcaagccccggaatgtaatttgtcttatcaacataataaaagccacgttcacgcatttctgcgaagtcggccactgcgtatggaatcgttattcttgccataatcgttgatcttttctttcggtaaagacaaaagtactaataaattagtaccataaaaaagataatgcgaaaaagataaataaataccaagctcaattatggctatatacataagtctttgatgaaaaagaggacaaaacagagaaaaagatcaaagttatgcacttatcatgtataaccctatacacgaaggctgcacaactctatacatgatgcgtgtatagagctatgcagcctctctgcataaggggatgtgtcaaaactctcctttctacgaagtcaccctcgccacagatagttgtagcgagggtgactttttgtttataagagttttgacacatcctccaagagaacatttatgccgcaggatcgggcgcctctcctccgccgccttcgctaccaccggaaccggagccgcctcctgcatcgggtttcgtgccgacgtagaaagtagcgatagcggttcggggtgtcttcaggagcgtgcttcctgcatactgtgtagtgacggtgagggtatattcgccatcggccagaccggcaggaacaatgaatgtgagttgtgacgggttgttgacggccaacatattgaggtcgacaggtgtggtttgttctttgctgtcggtgatagtgatgccgacggaagaatccgtacctgcaattttcaacatacggccattgactgtgaacggacggcctgcaatggcggtggcaggtgagaatccggcaacgtacatcacgctttggcgttcgcccaaaatactgatagaggtttgggcgatagcttcacgcagttctttgtcttgggtgaaggagacgtagacggagttcttctcgggattccattttccgccatcgataacaccgcggagttgcgctacggcgtggtaaagaccggtgttgacactatatccgctaaggatgagatcgctcacaacacggttgtagagcttcacgacgtgctcgatggtttcgggacggagcccggtgtcttccttgtgcatctcgtcgaggatgtccttcaacgaaagattaccggacgattcgagctgaccgatcttatcgtctttgttgtcgacggttacagtgttgtcgactaaccagattttcaatacattcttcattatgatgttgtttctacttggttttatgaatattattaaacgaaaaaataaagaatatcaataaaaagtttaccggattgaggcagtccgaaaagatattgtttgctatcatttaactctgtcattcagagctaagcgaagaatctactctttcgaatatacaaagaaaagattctttactacattctgaatgacagaatgatatacttatcagacttacagggcaacctcttccttattttattcccttaccagtctttgcggaaagcataaaattgcgtcgcaactcgagcttcttgtacagctgcactatatttaggataattcccatcattattgtcatggaagcacatcaaaagattcttaaatccatcaacaaccatcgtttctaaattatactgcctataaggaatgttttctacaaccgcaacttttccaagtccttcgtctatagtgattactctagcttttgcctgcaattcttcaaaaaatcccatgtcttctggggtccgttctttaatataaagcgcaattccaccataacgttctttcgtcatccctgcaatgggtttgcgttccgaaccatccgcccaaggatttaccggagaatcccagattacattccaagccaagtcaatataatcgcccactacaatgccctcttgtcctttattcattgtggctgtagtaccgccatcatctgcaagagtgagcattatatccggcattgcttcacgcagagccttgattaatttcggatacgaagtttcattgacagtcggtgcttcggccttgtcatatccggctccctcatcacgcaaatgaataccatccaactgaaacagttctacagctaccttaacttgagccacaaaatcaattatttgaggatctgtcaaattagcgaagcctattcccgttccacctccttcgatagaaagacacactttcagaccattccgcctcaacggttgaatgtactgaacattgtgcttcagcacatattccatatctggtgtatacttcaaaattactctccgagaggaagcatcatatcccaaaagggctttgcgcacatttacaatatcaacaacaggtacattttcataaatcgtttctctgtctctacgagatctcagatactccagtttagctgtagttttgtcagctatcaaaggattcatcacttccgtatcaatatacgctactactttataatcctttttagttctatcctgatattcctcatctcgttccgtgatagaatagaaaagctgatattgattgccatcctcgtccatcgctaccaatggtaacagatattgagacccagacattgaagcatcaacagtcattcttgataaggcaaagcttacccgcgtcgatttccgttcgcctttagctatcgtcacttttccttcgttggtaatagttagcttatctcccggttcttctatcacgttttctataaatatattataatactttgctggcaaagctttcaactcctcgttacttaaaggaatattcaaacctatggtaaaagtcatgtcgtgctctgccggtttcgccaattccacatatagttcatcacctgtctgtaccacaaagtcacggaagataagtccacttcccggtgctgaagcactttgcaaggaagcggcttcaacaacttcttccggtgactgtgtagatttgtcatgcgcaacgcttgggttcaccaatgcagcctcttcctcgcaggctcccattgccactgctagcaacgcacacaaagatatatttcgtattattcgtttcatatatagattatttaaaaagttctacacacttattcctgattcactttcggtacttcgattccgctcggccacaattccgcatcggttttactgtacatttcgagatggtcactacctttccagtaaggtactaccttcgcatcgttcccatgcccggttcggtctgccacgacagtgcctgtcccttcgtcgaacttccaataagcacacaaagccggttcggttgtcgggttagagatttcatacatattctgataaatctgttcttgtgtacgggctacattccaaatgcgagcttcacatatctcaccatcaaactggcggcttatatcgtgcgactctccataagaacgcccaaaatagaagttaaaatcacccccattcccaaattcatcatcaggtaacttatctcccaaactgatactagtcaagtcacttttaccatgactggtacttatactttgtaattgtccgtttacatagaaagcaatagtcgcagtagctatatcccatgtcaatgccacatgataccactcacctgccaacagtaatttctggttattgatttcggggaatttaccaaacgtagtctgtgtttgtaactgtcggttcggaaattctttatccccaatacgcatcagaaaatactgttcaatgcccattatagaggatatttcttgctggaaactgttcactcgtataatagcttccattgttaccgcactcaagttattcaccacatctgacgtcgaacttcctttatcgaacccaggcacagcaacataaatattctttaagttcattgccgtagtaatggcactggaacggcgtaccaaataatacatcgtgcgcgaaccgtccattactcccactccatcggctcctccaatggaaagcgggcagaggtaagttacgtcaatctccaactcatcgagtttggagaatttaatgcctacttcttcggaagtagtctttccggcaggaatcaccacttctgttttcaacagctgataatatgtttcaggcagcacttcataatgcgtgtcgttctttgcattatattcactagtcaacgaagcgtctaccttcaagctgaccttcacatcatcccccgccggataagacaatttcaccgcaaaagtcttcgtttggcttgtcaccttacggttaaaagtgaaagcctccgtatttttactggcagccacattcaagtatgccgaattatcgaacggtgacttttcgctgtaatccgtattatcacaggcaaccggcagaaataacaaaactgcggctgcaaagcactgataaagtttatgtattctcatagtttacatcgtttagtgagccgaagcaggattcaggaattgaatacctccacgggtctgtttataaataatatcagtatcgtagtaatcggtagagatattgtaaatagcaatacctcccaatggcgtttccatattgagagcaccgtaagcagctccggcgatggcattgcgcgtcactccgttatagtcggtcaatgtaccgtcaggagtgacagccaacagcaggcgatccggagcggccttgccatatccggtggcataaaatacggaggtttctatatcatattcatcggatgcaccggaaatatcaagtacgaaatagttgaaaaggctgcgctgcgcttccggcaacaaggaaggggtaccttcaaaaactaacagacacggtgtctgtcccaaagcatccagtagcgactttaacgccgagacgtctaccgcagagccttccgaaccgagggcaagcccgtcaaatgtccctgtacgcactgcctcaacagcagaagtaatagaggtattcagtttatctttagccgtgcaatctatatagtaaagcactttcgtaccataatcctcacgtaccaacttcatatcctcccggtcatattcggacagacggtcggcattacgcatcgtcactatatcgatactgtccggcaacgcacggagaaagtccttctcaccggtagatacttccggagcattatccaaccgggcataaacgacagcatgtttcgttgctttatatgcgcgaagattctgcgtatatgccgcatattcttgcggattctgttccttaaacccattcacctgactatcgtgtatttccatttccgtccagtcgtcgcaactgatggtggcaaccgacaggaaagtagtcagtaggcataacttaaagattgatttatatttcataatctcattgatttaaaggttcgttctagtttgaagattgactattctcaatggaatggtctttcttatcccaccaaagtttagttcctgcggcatcgggaccattcagcatttctacagcttgatcgatgtatttcggatttcccgtatattcatctgcagggaaaggcagacgacggggaccgattgttacattcacactattattggggtctttattctccacggcaggcaacaacttcgggtagcccgtacgacgatgttccgcccatgcttccagccccagcgggaatattgcaatccatttttgagtaatgatacgctccaggttccgttcgaaatactccgctccaggttcccaggcaatcgtaatggtacttaccgccggatggctatacttaatatcagccccgtccatcgggttcacatagtctataggctttttctccgcatccttcacatattggtctgctccggtggctccgccacgctcttcgaatgaaagggcaatagccttttcatacaatgcctgcgcatcgcctcccatattccaaccacgcaacgcgccctcggcacgaaggaaagtcacctccgccgcattcatccagagataagggtcggtgctggaaatcacctgctttgagtaaagattaatcatgtcgtctttcttctgggtaaatatgccgatacgtacaccgtaataatcgtatacatcgactttctcgccatcctgatcgactgtctgcacacctttgacaaacatcttatccaaacgcggatcttcataacctttcataatagaaactaaatcggcactaatacggtagtcattccagttattaaacagcaactccgaacggttctccgccacatgaagcatggcgttgtcctcattcgattcaatcactcccgcttccacagccttctgcgcaatacgttgcgcctcggtaggattgacatagctcatacgcatggcaatgcgaagttgcatggaatgtacaaacttacgccatttggaaatgttaccgtaatacaagtcttccagtttgcggaaagcctcggacgacaggtctttgttttcctccaacactttatccgcttcttccagttctttcagcatctgtgtatatacctgctcctgcgaatcgtaagcgacagccaggtcttcacccgaattatcattatccatcatcttcgaataaggaatcggaccgtaaatgtccgtcacacgatgcatgatacacacccggagaattttaccgaaagctaatgccacagggtcatccgtcttgttcatcatatcgcggtactgcgggtacatgtctttaatcggatcggcaaacggggatttgagccatccctgttcgggattgaaagtagagaatttcatcacccaagtgtctacaattccttccaaataaccaccgtatgctcctcctgccatagcatccataaactggtaaaggtgttcacgtgtaggaatcaccaatccctgcattcctttgagcgtagcacctacaatatgattctcacgctgcatttcttctccgtccgcttcgtacatactccggttgatgtcgctgtcgaaacaaccgcccaacggaagcagaaataatgaaaggatcattatcagaagaatgttatatattcgtttcatgtccatcatagtatttagaagttaatctttatgttaaatcctatattccgggtactcggcatcatgaagtagtcgattccctgataatagttgttcgtagtagctactgcttcaggatcgaaaggagctttacagtagatcatccagagatttctgcccacaagggatacattgatatcacaaacattgcccagccagcggcgcggaacggtgtaaccgatatgtgcctcctgcagacgcaggttggtagcactataagtatagtaggtaggcaatccgctctgcgatgctaccacttcatagaagctttgcggattcacgcggctacggccatttatccatactcctccggcatcacgcgcggcagcagatgtttcagatactccgtagagatcaagataagcctgtgttgccgaataaacgattccgcccaaacgggctgtcaacaagaaaccggcattgatacctttataagagaagctattattccaggctaaatttgccttaggaagtacgcttcccaactttatgtcaccggcattgtcgatggctgtcacattgccgctatcgtcaatcaggacattaccgttaatatcacgctttaaatcggcatgggtataaagatcgcccagcgtaccaccttccttcaggataaatttcgcctttccgaatccgcgaccttcatcggttttgagttccagtttatcgacgttgtaagttttgcccgtttccgggtgaacataatccttcactagttcgacgatttcattcttgttggccgagaaagtaaagctgctgtcccagccgaaatctccccaacgatgcccataagacaacatagcctcgaaaccatagttgcgtacatatccggtctgtacatacaatttgtcatatcctgacgaaacaggaagccgaggatcaaatgtctgattataagtattggcgtaatagaaagatccgctcaatttgaaatctttaaatagggttgcatccagacctacttcccatgagtcagtacgctcggggtatagtttaccaatgggataattcgtctgcgatttccagtcctgcttattggcatcatacgagtaagtaggataggtaagaaaacgagaataaggattacctacggaactgaacgatccacgtactttaagataatccacccaatcaggcagtttcaatatttcagtgatgacagccgaaagccctacggaaggatagaagaatgaagcctgcggagaatgtgtcagctgcgaagcccagtcgttacgtcctgtaacggtgagataaagcatacttttccaccctacttcggcactggcaaaaatagattcggtcgcttcgcgccaacccacctgcgtagcacgtttttttgcgttgtcaaggtcgtaaacattgaacagattaggaataccagtttctcgtataggccccgcatagcccaattccttactagtcactccactataactggcaccgatattggctacaatcgtaaaatcctgaatacgtttattaatattcaccaacacatcggcataagtctgcgaatattgtccgttatttactgtataatggccttgtgaactaccgtcagtcagcgtgttgctactgcttgcataaagcttgccttcatattcgctatgagtattgtcgatgcggacacgccctgccacattcagccagtcaagaatctggtaactcaaacctgctgaagccatatagcgtttcttattgttgagacggagattacggtaagcaatccaataaggattctgcatacgaaggtcaccttcgccctgcggccaaaactgtacgctaattttccgggcttcatcccaacgctcgaaattcttcactatagagaaatcatccccacgagggaaaagataagcagaaaccaacggattggagtactgcccctgattggtcatattacggtcgttctgaagaatatagcttgcacttacatccagtttcatcttatcattcaagaaactggtcgtattgcggaaagtgaaattatatctgttatacctattgttgggaaccatccctgccgaattgacggcagccgcagaaaagaaagtctgatttttatccgttccggtagacagcgtaacggaatttgtatataccgcacccgtatcaaagaaatcatcgggttcatatcctgtttgagcagccgagttcaacttcggtccccagctataaatattggaatttcccgcttttccattgctacccgtaccataacgtccttggaattcgggcatcttaaaagcattcaaccattcaatgccacttgatacacctacttgcagcttacctacctgtcctttttttgtagtaatcacaatcgcaccgtttgccgcattactaccataaagggcggcagctgccgctccagtcagtacggaaatactttctatatcttccggattaatatcagcaatggcctcggtagctccctttgaaccaaattccgtatctcctccgccaccgaaattatacatcggaatgccgtcaatcacgtacaaagcgttactactctgttcaatagactttgttccacgcatcaccactctacttgccccaccgacaccggaagagctcgtattgatagtaacacccgcaactttaccattcaggctgtttacaaaattagcatccttaatctgggtcagttcgtcggactttacttgctgtacgttgtagctcaatgctttctgctcgcgtttgatgccaagtgctgttacaacaacttcactcaacagttttgtatccgaagccagttgcacgctatatgtattctgtccggttacttttaccgtctgtggagtgtaacctacataactgatactcaacacacttccaacaggagcttcgagcgaaaagttaccgtctatgtttgtgatagttccaatgcttgtaccttccacacgtacattgacaccaatcaacggttctccgctatcatccagtacgcgtccggtgatacgtttggtggaagcagtttcggttgctttctgttcttgtggaacgatgatgacatattttcctttgagctgatacgtatatcctgtaccttttaggatttccgtgagagagttctccaacgtggctttttccaacgccaaatcgatggagggtttgtttttcaactgcgactcgttgtaaccaacggacagtttcgtttgtttttccacttctttcaatgcctcgatgaccgatatgtttttcttatggatcgtaatccgggcattactactttgagcaaaagtaggggtagaaaggagcagacagcacaaaaaaagcataaatactcgactgattgcctgcttattggctataaattcataaatttgctgcatcttcttagtattagtttatacagataaagttagattctcgaatttagtagcgtctggttaacgctaatagtaagaatttcgatttcacatccgggggaaggttgcagcttctcccggatattttttccgcataggctcaatgtattttaaggttaatattcagtgtttacaagttctattttgttccccggtgccgaagcatgtcttccccggtaccggagcctatcttcatcggtgccggagacgcccttccccggtgcctgaaatatagcacttgtctcccactattttatagtccagatttcccgtcacacgagcgataatatccatcacttcttccatagaagcattttgcccgaaagtaagattgaaccggtcttctttcagactacggaaactataaacaaaggtgtaagggtatttgcgttcgagacgggtgaagatttcttccaatgtcatactgcggaaaacgatttcgccacgttgccaagcagtgacatcctgcatatcaggatgaagtacgtttccggagcgggtacgtttgttataagccagttgctcgttcggcttcaagatctcctgcccctgctgattattgtactctaccaacacttttccggaaatcagggtagctgtcacttcctcttcgtcggggtaggctgtcacgttgaattccgttccgagtgccgtcacctgaaagtccgaggacttcacgataaaaggatgctcttcgtcacgtttcaccttgaagccggcttctcccacaagatacacacaacgggtatcacccttaaattgctgtggataaagtaaagtgctttgggaattaatcaatacctgcgtaccatccggcaaagtgatgttccgcatctcggcggtaggaatatatgcttgcaacaaatctggtgcctgccggttctgcaaagccagatagatagaaacggaagaaactgcaatcaacaaagctgccgctacgcgccacactaccagatgagtacgtaaagaatgtatcctgcgcctcgttccgatgcctgtcagttcacgcatccgttccaaagaatgacggtagccggaagtcgttgccgattcggtagcttcccaaagttgattgagttcatgatctttttcatcggcacgttcttcgtcggtcagccatgtacggaaatcctgatcgacttctttcggatagtcgtgattgatataacggtcgattacatcgcgaatataattcctcataaggtgatatttattgttctgtttagaaacgcttacgtaaatatcactactcagcaaggacaactacgggaaaagacggaatagaataacaaacattaacactttgcggagttccgtcaatgttttatagatgtgatcttctacggtacgcaaggggatttgcagtttatctgctatttctttatgagaaagtccttcaaaacggctcatctcaaaaacccgtctacggcgatcaggcaactgactgagtgtcatcctaataagcattaatacttctttatagtatagattttctaacagggaggaatcttcgtcacaaagttcacccaacaactgggctttcaaaactttgtcttcatattcctgctctaccttctgatgcttgaacaggttgaatatttcattccgagtcacagtatagagataaccagtcatggtttcctgatcttgccaaagttcaggacgtgtccataacttaagaaatatattctgggcaatgtcttccgcatcctcctccgacttggtcaacaacttcgcaaagttcttcacacgagggaagttagcggcataaaactgctcaaaacggatatccaattctgctatcgtttcgttcatctgtcgagtcttttactatgaaacccggggcaaatataggcaaaattaatttcaggcaatggatgcaaacaaaaaaaacatcccaccttttaaaccaaaacaagtctaaaaggtgggaatattataagattctaaagaatctcagaagttattcttcatccatcagaatttccaaaatctgacaagcagccttcgccaccggagtacccggaccaaagatagcagctacacctgccttatacaggaagtcataatcctgtgcaggaataacaccaccggcaatcaccacaatgtcttcacgtcccagtttcttcagttcttcaataatctgcggaaccaatgtcttatgaccggcagccagtgaagaaacacctactacatgaacatcgttttctaccgcttcacgagcagcttctgccggagtctggaacaacggtcccatatccacgtcgaaaccacagtccgcataacccgttgctactaccttggcaccacggtcatgaccgtcctgtcccatctttgcaaccatgatacgaggttgacgtccctcttttttcgcaaacttctctgccagttcacaagcacgcttgaagtcgctatcgtttttactttctgatgaatacacgcctgatatagttctaattattgctttataacgtcctacaacctgttcgcacgcataagaaatttcgcccaaagtagcacgaacacgagctgcttcaactgccagttcaagcaagttacccttgccggtcttcacacattcagtgatagctgctaatgccttgtccacttcagcctgattacgtccttctttcaaacgtttcaggttttcaatctgttcaagacgaactgccgtattatcaatttcaaggatatcaatcggagcttctttttccaaacgatacttgttcacacccacaatggtctgctgaccgctgtcgatacgagcctgtgtacgtgcagccgcttcttcgatacgcattttaggaatacctgtttcgatagctttcgccataccacccagtttttcaatttcctgaatatgttcccaagccttgtgtgccagttcgttcgtcagagattctacatagtaagagccgccccatgggtcaacgttcttgcagatgtaagtttcttcctgaatataaatctgtgtgttacgtgcgatacgtgcagagaaatctgtcggaagagcaatagcctcatccaatgcattggtatgcaaagattgggtatgtcccaaagctgcagccatagcctcaatacaggtacgtcctacattgttgaacggatcttgctccgtcaatgaccatccggaagtctgtgagtgagtacgcaaggccagtgatttcgggttcttcggattaaactgtttcacaatcttcgcccacagcatacgtgcggcacgcatcttggcaatttccatgaagtgattggttccgattgcccagaagaaagaaagacgcggagcaaatgcatcaatatcaatacctgctgctgttccggcacggagatattccaaaccgtcagccaatgtataagccaactcaatatctgcggtagcacctgcttcctgcatgtgataaccggagatagaaatagagttgaacttcggcatcttctgtgaagtgtattcgaagatatcagaaataatcttcatagagaatgcaggcggataaatataggtattacgcaccatgaattctttcaaaatatcgttctggatagtacctgccatttcttcgagtttagcaccttgttccaaaccggcattgatatagaatgccataatcggaagtacagcaccattcatcgtcatggatacagacatcttattcaaaggaataccatcgaacaaaaccttcatgttttccaatgaacagatagatacacctgctttacctacgtcacccactacacgttcgtggtcgggatcataaccgcggtgagtagccaagtcaaatgctactgacaaacctttctgaccggaagccagattacggcgatagaaagcattggattcttcggcggtagagaatccggcatactgacggatggtccagggacgaagggtgtacattactgaatacggaccacgcaaataaggaggaagtccggcagcatagccgagatgttccatcccttcgaggtcttcttttgtataaacaggcttcacttcaatgtgttccggtgttttccagtcggcggagataccgttagccttttgccattcagcaccattagcaggctgaaatgcggcatatatatcgatgtttttaaaatcttttctcatcttacttcaatagtttagcgttaaactctttcaaggtatccaatacgttgacacgaacatggatgaagttttcgatacctgcggctttcaagtcatccatacaagccggagcaccggcaacgataaacatagcacgaccattcaaggccttgaaagcaggaaccgcatattcagcatattcatcatcgctggaacagatgacaacaatatcagctttcgcagccatcgctgcctctactcctgcctctactgtttcaaatcctagattatcgactacttcataaccggcacaagccaggaagttacaagaatattgcgcacgtgcctgacgcatcgccagattaccaattgtcaacatgaacgccttcggacgtttgcccgatgcttccgtttcaagacgtaacgcttcaaactcactggctgcacggtcgaataccaatgtatccacatctttctcacaagtatgagagtcacctccacagcagcattttccttccacaggtttcttgtcaccggctttttcgttgaaattcgggaattggttagtacccaacagaatttcacgacgctgtgccactgctttatgacgagctttattgctttcgtttactgcagcctgaaccgtaccagcttttaatgcggcatagaaaccacctgcttcttctgtagcaaggaagatttcccacgcttgtttagcaatggatacagtcaggttctcaatataataagaaccggcagccggatcaattactttatcgaaatgggattcttctttcagcaatagttgttgattgcgagccagacgttctgataactcatccggagtcccataagtcttatcaaacggaacgactgtcattgaatctaccccacccaaagcggcactcattgcttcagtctgtgtacgaagcaaattcacgtgtgcgtcaaacaaagtaagattaaaagtagaagtttcggcatgaaccgccatttttgctgcacaacgacattcgccgttagctcccttattatcgcaatcacgcagacattcaggtttataagaagctacgatatttgcccacaatagacgtgcggcacggaacttcgcaatttcaaggaagtaattggagctgataccgaagttgaattttatctttttagctactacggcagcgggaatgccggcatcagtcaactgattcatgtattcattaccccaagccaatgcataacccaactcttgagagatataagcaccggcattgtttaatgagattgcatttacattcaatacacgataaaaaggaagcggctggatagcttcgatcaacgctttcgctgtctgcaccatatcccctttttccttaccgcgagtcagcatcttattgaagaaatcataattgatagagcctttcagcttcttcacatcatagtctttcttctggaaataagccaccagcaaattggccaactccacaacatgcccctgacaagttgagaaatttaattcaacgcactctgcctgaatatcattcaacagcgtctcgatatattccgcattgagttcttttgcttttacatggaaagatagtgaatcaacacccttatttaagatgtccagtgcttttgcattggcctctttggggcattctaccctgatttcctggcgaaccaaccactcattgttgtcttttttagttcctctcagataagggaactctccgggaagcgcatcagtagtttttaaaccctccagatcttccatccggtagaaaggtttcactttaaacccttcgtttgttttccaaacgagcttcttctcaaaatcagcacctttcaagtcggctgtaaccttctccatccattgttcggtggagacaggagaaaagtctgagaagagtttttcttttttgtctgccatagtttatctaaaattaaaacaagattaatattgtctttatttttatctatctctttctaattgtctgttgttcgacatgcaaatataaccaataagttaaaacaaaacttctttttatagaaaattcgcacacctctcactctcgcatagaatctgtatagaaattcttcattctttatttttttagttctccatttatttgatttgctccaatgttatgagtaattttgcacccgtttttagaaaaacattataaaaactgctatattatggattggttacaaagtttattgtgggaccccagctccgtactcacatcgtgcttctctacgcatttgtagtggcagccggagtgtatttgggcaagataaagatattcggagtatctttgggcgtcacatttgttttgtttgccggcatcctaatgggacatttcggcttcacagccgatacacacatcctacatttcatccgtgaattcggattgatcttgttcgtattctgtatcggtcttcaggtggggccatctttcttctcttctttcaaaaaaggaggaatgacattgaacctgttggctgtaggcatcgtagtgttaaatattgccgttgcactggggctttactacctctggaacggccgagtagaactgccgatgatggtaggtatcctctatggagctgtcacaaacactccgggacttggtgccgccaatgaagcattgaaccagcttaattacactggtccacaaatcgcactgggatatgcgtgtgcttatccgctgggcgtggtaggtattatcggttcagtcattgctatccgctacatcttccgtgtcaatatggctaaagaggaagaaagtctgaaaatccaaagtggagatgcacatcacaaacctcacatgatgagtctggaggtacgtaatgaatcaatcagcggaaaaactttgattgaaatcaaagagtttttaggccgtcagttcgtttgttcccgtattcgtcatgagggtcatgttagtatccccaaccatgaaaccatattcaatatgggggatcaattattcattgtctgttcagaagaagatgctcctgcgattaccgtatttatcggtaaagaagtggaactcgactgggagaaacaagacctccccatggtttcacgccgtattctggtgactaaaccggaaatcaacggaaagactttaggatctatgcattttcgcagtatgtacggagtgaacgttacccgcatcaaccgttccggtatggacttgtttgccgatccaaatctggtacttcaggtaggtgaccgtgtgatggtggtaggtcagcaagatgcagttgaacgtgtagcaggtgttttgggtaatcagttaaaacgtctggacacaccgaacattgtgactattttcgttggtatcttcttaggaattcttctgggtagccttcctatagcattccccggtatgccaactcctttgaaattaggtttggcaggcggaccgctggtagtagctattcttatcggacgtttcggtcataagctccatttagtgacttataccaccatgagtgccaacctgatgcttcgcgaaatcggtatcgtgctcttccttgccagtgtcggtatagatgccggagccaactttgtgcaaacggtagtcgaaggtgacggattactatacgtaggttgtggtttccttatcaccgttatcccattgcttataatcggtgctatcgcaagattatattataaggtaaactactttaccctgatgggattgatagccggtagtaataccgacccgcccgcattggcttatgccaatcaaacaacatccggagatgctccggcagtagggtattctacagtttacccattatccatgttcctccgtattctgacgggacagatgatattattaacgatgatgtaaatcatgttttatttataaataataaagccggtcatatccttcaatggaatataccggctttatttctttttcttatagacttcttctacgcctataatataagctgtagtttcttcactacaaattcttctataaaccgaactgtctcttcaactcccaaagaagaagaatcgacacataagtgataagtagcagctgctccccacgttttataactataataattataatactccgaacgtctcttatccgctttttctatcatttcttctgcagcttccgcatcaatatgatgcatggcgcataatcgcgtaatacgatcttccttagaggccgaaataaaaacattcgcacaacggggatgttcacgcagaatatagtccgcacagcgtccgacaaagacacaagatttttctgccgccagatgacgaatcacatcactttgcactttaaacagggcatcattactcaaacagttattacatggcatagctccttcactgataaaaggaaaacgcatgccgaacaatccgccaataataccttgcgaagctttctcatccgctttttcaaaaaattctttgcacaacccgctttcttcagaagccagattaatcaactctttatcgtagaagtcaatccccaaacgggctgccaacttctctcctatttcttttccgccgctacctagttgccgaccgatgttgataacataattaccgctcatagtacattttgttttatggttctgtagcaaacatacgacttttttctaaaaatcacatcatcaaacgaaagttatatttgaaagtaacgatgaaatacccttttatttcctgcgtacgatactcataaaagccgtcagaagtcgccatacggttataacttttcctctttcctaaaatgtctacccaatgagcagacagttctgcttctttctttttcaagaacctccaggtagcactcgcattccataatatctcatcatcttctcctttgcggatatttgtaccattacggaaagtataagccccatccgtccgtaattgtatgcccaaaggaagatcaacatatccttccaaacggaaattataataacgtgtatacgtattgttatcattcacagagttgagcgaatactgataattccaggaagtagagaagtcaatacctccccaggcaggctgataagaaacattcgcttcacaattcaagccggtgtcacgcgttgtacttttcaccggctcaagacttctatcttcattaatcatgctgacactattactatgattaccgttcatatccaaccgtaaagagaaatgtcctaaacgtttccaccagttagcacttccatacacattccagttaccgtttatattgacaggatatgtctcacgtccgccagtctgtgcatcatatatcattacttgtgtaacgctattctgttccaactgtcctccaagattcgcagatatgccttttttagaatgttgaaagcttatacgcatactatgagcaaacatttgcttcaaatccggattccctcgagtaatatataatggattactattatctgtaagtggcattaagtccgataaagaaggttgccgggttctaccgtcataattgaaagtaattcgtgcctctttctttttccaggccagccatatcataggctgaaagtcgatagtatgcacagtggtatccgcatacagtttccccattttccgttcaatggttcgcctttgcggagtaatccctaatgatgcattcaccatccatgtatcatcagagtaattgaagcctacattcagatcatgtccattagtacgactatgacttcgattactcaaactatctacataccccgtttcatagtcaggaggcaactcaccaaaaacatccgacttcgccaaagaagacaattcataagtgtcgcgattatcgcgttcataatgagtgttccagttatacgctgcacgaatatgcattttcttaccgataggttgggtgaagttaatccctacccgccacgaattatttttctggggtgacttcaaatactggttacgataaagtaaagaatcgttgccctgcttatctttaagacggaaataagtagtttttgaaagcgaaaaactttcattatccccccaagaatccgaactttgaatgttcaatcctaaagttgtacctttttcattcagccgcctcataatccccatcatccaattataacggttcgattgtccttccgaacgcgaccggttttcactacgatttactttgatatcttgggaaatcgattcaaaatcatcgaacaagctttcatgattgacgttaggaggagcatcaaaagaagcattctggctattactttcattccggttaggagaaaagctgaaaccaccgttaaaatgtatgcgtgtacgtttatccacttcccaactacccatgatattagaattgaacgaccggcttttagagttaccttcattagtggacgcagaatattggttaccagcagttaaatattgctcctgatacatggaagaaatatttccgttccgattgagattatagttcatgcttccggtcaaagaaaacttctttccgaatttatgagtcatattcattcccaccgaattattaatattatccttgtaagtgctattctgatatcggttggtggaacgtcctatgaaagaaagattttccccgtctttactaaaataattcacctgcccttccaaatccttcttttgattgtttccatatcccacagtggcatttgtcagccaggttttattcaattcatccttagtctgcaagtcaagtacatatttcttttctcctgaactaattccggtaaattcttcttcttttgattttttatcgtacactttcaacttactaatcaaatctgccggcagattttcgagtgccgtctttttatctccggagaaaaaggcttcgccatttacattgatttcactgatgggctgtccgttgtatgtcaacgaattatctttcttattatataccaatccgggaacacgcttcaccaaatcctccagataagctccttcacgagttttaaaagcggcagcattgataaccgtagtatctccctccatcactacttcctgcaattttcccgttatcgtcacttcactaatctgaatatcatcatctttcaataccactgtaccgatattcaccaatacagagtcttccagtgcccggtatacagattgcattcccataaaagagacctttaacaggtatttctttttcttctgcggttgataattaagaacgaaacgcccattcttatcacttgttattcccttgataaaagcagaatcgcttttcgccaaaataacaatgctggcagatggtaatgcccgcttctcattactgccggcttccactgtctgcactcttcctcgcacagttctcacttgttgagcatacaaagtagtatgtccccaaagtagcagcaaaagcaatcccactaacttacaagcgttcatatccaatagtagttaagtctgatatttatgttgatctaaaacaaatcgggacaaagttaataacttttacgtgaaacgtttaatcccagagttattttttatacctttgtccatccattattcaatcagcaacttaatgaaaaggattatattaatcacaggaggacaacgatccggtaaaagttcgttcgcggaaaaaaaagcgcatgaacttactacgtcaccggtttacttggccactgccaggatatgggacgaagaattcagaaaaagggtggaacgccatcaaaagaaccgcggtcctgaatggacaaatatagaagaagaaaaagaattgagccgtcacaatgtagcgggcagagtcgtagtgatagattgtgtaactctttggtgcactaacttctttatggagtttgattctaatgttgcctcctcattggaagccgtcaaaaaagaattcgacaaatttacccagcaggacgccactttcatatttgtaactaatgagattggttgggggggagtttccgagaacaaactgcaacgtaaattcacagacttgcaaggttggaccaatcaatacatcgcatcgcatgccgacgatgtatatctcatggcaagtggtattcccgtaaaaataaaataaacatgaaaacgtttcatattcaaaagccggatgaagctatcaaagaagctctgattgacaaaatcaataatctgaccaagcctaaaggatcgcttggaagactggaagaaatcgctttgcaaatcggactgatccaacaatccctttctccacgattaactcatcctcaaaatataatctttgccgcagatcatggcatcgtagaagaaaaagtcagcccatctcctaaagaagtaacctggcaacaaatcagcaactttcttcatggaggagcagggattaacttcctgtgccgacagcacggtttcactcttaaaattgtagacgcaggagtcgattatgatttgccttatgaaaaaggcatcattaacatgaaagtcggaagaggaacacgcaatttccttcatgaagcagccatgacacctgaagagatggaactctgcctggagcatggtgcccaatgtgtggacacttctcaccaggaaggctgcaatatcattagcttcggtgaaatgggaatcggaaatacttcgccctcttccttatggatgacttgcttcaccggaatcccattagatcaatgtgtaggtgcaggaagcggactcaatcatcagggaataaatcacaaatacgaagttctgaaaagatctctcgaacaatatccgggagagcattccacagaagaaatcctctgccgtttcggaggttacgaaatggtaatggccgtaggagcaatgctcaaagctgccgaactgggaatggttattctaattgatggatttattatgaccaattgtattcttgccgcttcacgcctttatccggaagtgatgagctatgccatattcggtcatcagggagacgagagcggacataagctattattggactatctcggagcacgtcccctactcaatctcggactaagacttggagaaggaagcggttccgtttgtgcctatcccattgtagattctgctgtaaaaatgctgaatgagatggattcatttgctcatgcttctatcactaaatatttctaagatgaaccagatacttgccgccctcatattctttacacgattgcctttctggaaaataaaagaagttccgcaggagtgtttcaaacacgttgtcagttattggagtttcagtggctggctgaccgggggaatgatggcattgattttctggggagccagtactattttacctcacggagtagccgtaatcctggcactgacttcacgtttacttatcacaggagcattgcatgaggatggattggccgatttcttcgatggattcggaggtggaacgaacagggaaagcacgttacgcatcatgaaagattcccatatcggaagctacggagttttgggattaatcatctattatctgcttgcttacaatctactggtcgcacttcccttaacagttactcctttcttattactaagcggagatacctggagcaaattcatttcttccaatatcatcaattacctgccctacgcacggaaagaagaagatagcaaatccggaacagtatatacaagaatgaatttgggggagatcgttatgtctgcgatggggggaatactgcctctcctattacttcctccaagctactggcccgtgtgtatatttcctattctggtattctcctttatctgccggatgatgaaacgacgtttgaacggatataccggagattgttgtggtgcattatttctcttaagcgaaataagtttctggctgggagcagtgatgtctatctatataaaataagtaatcctatgaatatttatctaatcagacatacctctgtcgacgttcctaaaggtctttgttacggtcagtcagacgttcctttacgtcctacatttgagatagaagcagccgtaaccaaagctaaaatcgaatccattcactttgatatggcttacaccagtcctctatccagatgcacccgtctggcacaatattgcggattcggagatgccatccgtgacccaagaatactggaacttaatttcggagattgggaaatgcagtattttgataaaatcaaagacccgaatctacagtgctggtacgacgattacttgaatgtaaaagcaaccaatggagaatcgtttgccgatcagtataaacgggtagccgcgtttttagacgaagtcagacaaaaggaggctgaaaatatagtagtatttgctcatggcggcgtattgatttgcgcacagatttatgcaaagttgattcaaccggaagaagcatttcaggcagtacctgcctatggaggaatttttctatatcaagagcgcccgtaaacaaacagtcaggacaatcatcatctcttctgcacgacggttgacagcaactcccatccgcatatcggatgtgtccagcaaacgttcattcactccgatataaggctttgtaaagagttgaccaaaatagtgatgaggaccgccgaaacgacaattcaggatacctgcaagagcggcttccggatagccggaattgggacttgcatgttccctgccatatctcttcacaaatgacaggagtttcagccgaccacttgccaagaccatcagaaaagcagtaagacgggcaggaatataattagcgacatcatcaacacgagctgccacacgcccaaaaaggagataacgatcactatgataaccaatcatggaatcaagcgtattcaccattttgtaggccatcattcccggaacgcccaacaacaaataccagaaaagaggagcaatcactccgtcactcaaattttccgccaaagtttcaagagcagcagtcctgacttcctgtgcagaaagttcggaggtatcacgccctacaatacgggcaacctgaatacgtccctcttccaaagaacgatcaaccgcctcaaataccattctgacctctttaatcaatgtagttccggccagacaaaagaaaatgcagattatatcaaaaccgatcaccgcaggagttcctaaaaaagaaagggcatattcgattcctatggtgaccgaataaacgaacaggatcaacagaacagacatgattcctcctttccataacttataagatcctttattcagtctcttttccccgaaagcaatcatcttgccgaaccagatgacaggatgaggcaaagacaccggatcaccgaatagacgatccatcaaccaggccggcaataaaacacgcagcactactcctataacgataaagtaactcatcataaacaaaaatatatcttaactcattatctgctccatccattcactgattgctttcaccagcttatcattttcttcgggagtttgcgtagcaatccgaaagaaacgctcgtccaatccctcaaagttggatgcatcccgaatgagtattccatgattcacggctagaaaatccttaagggccgccgctttccccatacgtagttttatcaacatatagtgcgtatcagttggccatatttctaacatccccgtggcaagcaggaggtttgtcagtcgctcacgttctgccagaagttgcggaatatccgctgaaatgccgtctccctcttccagaagatattttgcggcttcaatagccaggctattcacagaccaaggcatccgacggcaacgaacatcatcggtcaatccctcggaggcagtaaaataacctacccgcagtcccggaatcgcgtattgcttggtcattgaatggagcaggatcacatttggaaaggaagcggcttctttaatcccaagaagtgactttaatgtgaaatactcgtaagactgatcgaatataaacaatttatcaggatgagaatcgaccaatgctttcaggtcttccttatttcgcacttcacctgtcgggttattcggattgcagatccacaccagttccgcatcttccggtaaagcgtccaacgaataaaaaggcttcactttgtgccgatgtacccggcatgcgtccgcatactcgctaaaggttggtcccaacacagctgaaatacgtccttgaaagacttgtgctatcaagtaaatagcttccgtcgctccattagtcacacaaacttggcggggagtgagcgaatacctccgggctatttcactttccaaagaataaggcatcggctcgggataactgcaaatggtagagagccgctcattcagtcgttggtaaagtcccgaatgatcgatccggttatacacattcgaactgaaattgctaactattttctttccgtatttataaagatcgtctccgtgtccctcaatcatttctttctaatattttataaagtaacggcatattgatgtgttttctcacatgttccgccaacttatcatattgttcttccttgaatgttgcatagtcaaaggtctgctgttccagtttgtcggcataaggcttgagcaggaaatctataaatgactggttgtcaagtatgccatgaatatatgttcccatacacttccggccattccggtaaccatcctctcttccatcctccagtttatttaaaggagaaggggagaatcctccggcaggtacgcttctgcccatgtgtatctcatatcccttacaaaccgtatccgactcatcaaaagtgaaattcacctgccgggtcactttatctccctgcatggtagtgatgacaggaagtaaccccaagccgggaagtaatttaaaacttccctctactccgtcaggatcgcgtacttccagccccatcatctgataaccgccacagatgcccatgatggtcgccccttcccgatgagctttcagaatagcttgtactactccgttacagcgcaattcataaagatcatccagcgtattcttgcttccgggcaacaatacaatatctgctttcgctatttcattcacattattggtataatacaaatgcacccgttcatcccgttccaacacattaaaatcggtaaagttagacagatgacgcagcaagatcacagctatattgatttttccggctatagcctcccggtttttagactcaagcatcacagagtcctcttcttctatataaattcccttatagtagggcactactccaagcacaggaaccttgcagaggtcttcgatcatctttattccggactcaaacaggcggatatcccctctaaacttattgataataatacccttaatcaatgaacgttcttccggagtctgcaacagaatagaaccatacacactggcaaatacaccaccacgatcaatgtccgctaccagaaaaacatctgccccagcgtgttttgccataggcatattgaccaggtcgacgtcccgcagattaatttccgagatactgccggccccctccatcactatcggattatatctggtagcgaggcgattatacgactcattgactacttttcgtaattcttcccttccctccttgcggaaatactcatacgcattccggtcaccgattggtttccccaataacacaacctgcgaagtatgttcggaacttggcttcaacaacaacggattcatatccgtatgacagggaacaccggcagcttccgcctgaacggcttgcgccctgccgatctccaatccctcgggagtggcatacgaattcaaagccatattctgggccttgaacggtgcaggatgatatccgtcctgcttcaatatgcgacagaatgccgcagccagaatacttttcccgacatcgctacctgttccggcaagcataaaggaatttagttttttcttctccatctttctatttactttggtcaggggttgaagctttgcgcttataaccgaaagctttccatttctcttcagtccagtgctgccgatacatttcatagcgtgccatgacaaagaacaagtcggataatcggttgatgaattcaagcagagattgcggcaccgggtcctgccgatgtaatgtgcaaagcctccgttcggcacaccttgctataacacgcgcatgatgcaattgtgcagaaatttgtgtaccacccggtagtataaaatagccattatcttccatagcggtattcattgtatccattcttttttccagaagaccggtcagatccgtacgcaaggtattcgggttttcgccccttttaacggatggagtagccacatgactcatgcatgacatcagttccatctgtatttcatacagccattcgtgccattcatcctgttcaggaagaagtgagcggactattcctatcaccgtattcagttcgtcaatcgtaccattagcctcaatcctgatatcatctttttcgacacgctcaccaccaaagattccggtagttccattgtcacccgtacgggtatatattcttctcatcattcccaaagtttcattaagttcatttcaccccaatagaggtgtgtatagcctgcaatcagattcttatatcgataaagcggagtggaaacaggatttccttttgcatctgtcacctccgcaatggatggaagttctttttcaatggaagagtaatgaaactcatgtcctttccatacctgctctcctatccggagggttcgataaccaagccttaatttcatattttccatagtagccctctgatgcagtaatccgaccatgacatattgttttccatccattccccggatactgtcacaaagatacatcatcccaccacattcggcaagcaaacggcctccgctttccacatacatttttaattgttgcttgatggctatgttactttccagctctttcaggaaaaattcagggtaaccacccggcaaataaactaaatcacaatcgggcagatgttcatcgctcatgggactgaaaaaggtaactgtccccaattcttgcaaacgagccaagttctcccggtatatgaaattaaatgcagcatcctgtgctactgctatcttccattttttttcagaaaaaatgccttttgagatttctgtcgatgaaatcgaagtatgtgcattataatcaaccaatggtacactacatacttcaagaatccgatcaaccgccacatgctcttcaatcgcctgcgccaccacagaagcgaatttatcaaactgataggaagcatccaacgtcaatcccaaatgacgggagggtacttccagttctttcaatcggggaagaaagccgaaacattctacgcctacatcttcacaggctttctgtaaaaaagagtaatggcgttcggaagctacctgattgaataccacaccggcaagtcgcaccgatggattgaaatatttaaagccatatagaatcggagctactgtataagacgttgatttggcattgattacaagaacaacagggatattcaataaggcggcaatagccgcactgcttccctccattccatcgaaaccgtcgaaaagtcccatcactccctcggtcacacatacatccattgcagccgcgtattttgcatacgtctcctttacatgtttttgagaagagagccagagatcgagattgacggaagtattaccagctgccatctcatgatacttcgtatcaatataatcagggccacatttataaggctgcacattcagtcctctatcacgaaacagtcttaacaaccctgttgtaaaggttgtttttccacctcccgaagaagcggctccaattaaaaaatgactggtttgtttcatcgttttatagctttcagtgtatcaatgggattatgctcgtctactgtcagtcggatcacttgttcaagtttcaatccattatcgtctattgctttctcaaattgcttcctactgtcttcggatacagaattaaacaccagcgtcccaccaacaggcaataaaggagctattttctttatcatttctcccaacttgccaccatgacctccaataaagacagcatcaggcatggaaaatttctctaacggcatatccagaaaatctccaatcaccgtcgttattcccggacaaccaaaccgacgactattcgtttccatcaattgccgccccgcctctcttttttcaaaagcaacaatatcgagatgaggaaattgtaacttcgcctcaatggaaacagaaccggtacaaaaacccacgtcccacatcaccgatctggttctcaaatcgagcagactcaatgacagcagacgaacaggcattttggttatcatattcgcccgcccgtccaacaattcaaactgctcttccggaattccgaacggccgttcacgaacagtaatacgctttaaaatcacacaattcggcatcctgaaatgcctttccatcgcttcctccatactatattctgccactgtttcctcttcattccccaactgctcacccacaatcatccggtagttggcatatccgtatgcttgcatccgggcagctatggaagcaggtgttttttctctgtcagtaagcgaaccaatcaatgtctctccggaaataagagcctcatccaaggctttccacggtctgccagtcagagaaatcgtccgcatatcatgataaggcaacaaagctttgtgtgctaaaagctgcaaggaattgaaagacggatagattttgacaacagcctcggacagtttacgcatcaccgtattggcaaaaccaaaaaacaaaggatcaccggaagcaaaaactactatttcctgataaccggcataacactcgaacacagcgtcaagaggcacagttatatctatccaaaccgatgattccggtaacatggccgccacaatttcatggtgtctctttccacccgaaaatacatgagaacgggcaatcaaagcctgaacctccttactgaaagagagttcgcgactatctgttattcctatgatatgaaattcctgcattctgtcatataaaatgtccatactcttctatacatccctaccggggcgcagtgtccgggcatcatcaaaacataaaatcgcgttcaccaatgtagcggccagattacttcctccccgtctgccctgaacaataatcttcggtacttccgtgaatgtctttatcatgtatttcgactctttcacatgcacaaatcctacgggagctgcaataaccccggacgggtgtgcctttccttttcgaatcagatcgcacagttctattaatgccgtaggcgcattgccaaatacaaaaagagcatccggatgttcttctacagccagacgaatagcctcctgcgaacgggtagttccccgtttcttcgactgttccactgcacgttcgtcggagagataacatttcacttccacccctaaacgctgtaaagcacctttccgtatgccggcagctaccatcgtgacatctgtgataatcgtcttaatccgtccggaagcaatctgttcatacaagttctttacaacctccttatccgtatataccagcttctccatttcaaaatccgctgtggtatgtatggcatgaaataaagcccacttacggtcaaggtcgatctctttattctgcatctcttcctctatcttccggaaagagttcatcataatctcctgtccttttccgacttcacccttttcctgttcgcgataatatccgcgaggagttaccatccggttctgaaattgataagtttgtgaattaccaatcagcattactgtaaacatatccacttcttccggatcgaaatcccgtaaggtggtcactaccaccgtttcttcttcccgacctgcctgacgaacataacctacgggcgtttccggtgaacgggattcctgaaagatttctttcagacgatgaagctgccagtaacgtccctcactcttagggttgtaaatggctgttacaaagtcggcagtagcagcggcagtgattcttttttctatgatttcccaggaagtcatcaagtcggacagagagataatgcaaaaatcatgaccgatgggagcacccagcaatgacgcagctttctggaaagcactgataccgggcagcacgaggatctcgacctcactcccccgttcccgtttcatttcataaatcaacggagccatcccatagattcccgcatcaccggaactgatgacacaaacagtttttccctgttcagcatattcaaaagccaattctgcacgggctttctcccgcttcattccggtatctatgcattctgtctgttccgacagccaggaggtaataaactgaaaataatacttatatccaatcactacatctgactctttcaaggcattaacgacagctggagtaatatcttccgggctaccgggaccgatacctgctactatgatcttattttctttcatacatcttcaggattatacctgaaacaaaggtaaagataaaaacttaaacaagataaaatgtaatcagatagttctgaataaaaaatcacagaatatcctgactatataaaaagccaactaaaatgatcccgttttatttatagcaaatacggccattttggttggctttattttgtttattagcagtatgattatttcacactcaactaatcaaccaattattcttcttccgcatccggatcatacattgcatcattatcagcgaccttcttctcaatatggctaacccatacgcttacaatcttggaataatcacctaatcctttgatatcacagttagccaacgggcaagtatatccggcttttgccaattcatagcgccaacttccttcttcagccgtggcaccaacaccacccttcatatcattattagcatgatcgcctgcaatagacatcaacggatgacagatcacattacctgatttcttgttagctgcctgcatacgggaaatcatatcgtctatataattatcttccatatctacagtagccacaaaataattagaattaagtttctgcaactctgcttccatcatcgtgtagcgagagttaccattcccgtagttataattttcgggatttccatgtcccatgaaagtcacaatattattcgactccactttacttttataagtttcatgcagaatctttgctacattggttacatcttcctctgtttccaacaacggaccacccaaatatactttcacgttggcaaattccgggtgctcaccatcattatggaaatctttcacgacattctgtacccgaaggaattcttcgccgggaataacatgaagagattgcacgcaaaccgtcttatatcctgccagaccaatagcttccaaatagaaagaaggtgcataataattccaaccttttgccgcgcaacgggtcatacaaatctccgaagtgaaagaaaaataaatatccatgttagggaacttactagcaaactgcgctttcatattattgaaagtcgtttgaggcgcatcccacgtactaccaaaagtcactagcagcaaggctgtatcatgctttttgttggcttgtacttcggcagttactgcttccatcttcttatcgtggttggattttgccacatcatcatcgtcgtcggagcaagatactgccgaaagggacattacagctactaaagctgtcatcatcataaatctaaactgtttcatgtctttaaaattttaaagggttaaacatcatgtattttttgtctttttttgtccgaattgtatcatcaacgaaccatagaaagttcgtcccgctgtagttgtaccataattcaggctgtgatacgttgtctcataataattgaagatattgtcgattcccgcattcacctcggcattccatcgtttgcccaatttgaattggtgacgggtattcagcctccaaagattataagccttgccatttccatcatcctgataataacgtttactctgaatacgaccataaactccaatgccaagacgatagttactccgtctccacgcatgcgtccagatggcactcacagtagcacgatgatgagccataccatcaataatgacatgtttcattacttgatcttcttcatcatattggttcgcttcagtatccagatagctataacctcctgtcagagtcagtgattggaccggtgtccatttggcattcacatccaccccataagtacgggcatcatccatgttctgatactggcgtacacgggcaggatcataggtaacaaccagatcacccggagcctgcgaaagaggaatagtgactagagttatcatattatctacccagttacaatatcccgtgacattgatactgaaacgagttccattatattccagtccaccggaaacataacggctggtctgtggatccaactccgtatttcccagattcaatgagattattgacatctgacggatataacggtaatgcaattctttcagtgtcggtgtcttgaatccttccgaataggtagcacgcagattaaaagctcctaacttataaagtgccgatactttcggagtgatgcgcacaccaaagttctgattcactgtcagtctccctcccgctgtgatattcaaccgttcaataggcgtccattcatcctgcgcatagaaagaggtcgtataatcggatacctgatctttttcatccagtcgacggggagcatccagccaattgatttccgtatcagtacccacactcaaacgattgaagtatggcagattgaatatacctttcaactgcaataacaagcggctttgatcgctttgcaatcctttatcaccagggaaatatggaaaactgatctccttgccactatcatcatactccttatcccaagtctcgcgagtgtacatataataataagcatgactatcatagttgacgtccagcataatgctattgctatttttcagcttcaacttacctcctgtcgcaacagaagagttacgataaaggaaatcataagtcttatagtcaggcactccgcaaggacgatatatccgtttgcgataaaagctaccgtcagcgtaaaggctcaaatcctttgtagcctgataatcgaaacgctgtgccacttgccagtccgtatagcgatttacagtcttattgatggaattggttataggatattcataacggttcggatcttcataagttgtattctgccatccgtctgaatgcttcagttggaaattagtggaagaagtaaatttaccaaccttgaactgcacggtattcgactgccggaattctccatacgatccgccgcgacttgtattttctatcaaaatattttcgcggtgtttctttaatataatattcaccactcctgcaatagcatcacttccgtaaagtgccgaagcagctcctttcacgatttcaatacgttcaatacgagccggatcgatcaagcccagattattctgtccgcctacatcaccatgcatcttcttaccatcaacaaggattaatatataaccattgccgagtcctcccaattgcatattggctcccatatcaccagcactaaaatcaaaagaagcacacagtccgctcaaaatatcttccaaggtagcccctgcataactatccagcattttgcggctaatcacttccgtctgcacaggtgcatctttcagatagtgttccgttcccgtacctgtcaccactatttcaggaatcgaatcctgcatggcgacattgctctgtgcacttacctctgcggataaagacaacaaaacaagtcctgctaaccatatttgtctcattcgtttcatctaccttttattatcattaaagagaaataaggaaattcccttgccaatatatctttcttatcacacgtataaaattccccgtccgctcccacattctcgaaataatgacagacaagtctttcctccaaacttataaaatgcttcacttcctcctcacactgcgatagtttcatcactaccgccacttcactaccggaagcaatccggctgaacagttctctgtccacttttcccggacacaccgtcaaccgttcttcttgttccacaatggaaagaccgatggaagccgccgctgcaataaacgccggaacaccggcaatctgcttgataggtattcccgctttcttgagccttccgaccaaataactggtagaagaataaaaaccggcatctccttcagccactatcgccacacataaaccttccgaatacaggctgactatttcttcaaaaaccttatcgtaagcctcataagccatctcacgcttcttactcatcggcaatgtatagcgtctgatagattctttctttatcttcaattctttcagaagaacagaagaccgggaacgcgcatttgttttcgggcaaaaaatagcatttgcccgacatagtgtagcacctcctatcaaagagataagccccgcttcacccggacctaaagaaacgatatataccggtttcaaatcttccatctttcttatcgattatttcttatccttattttctaaaacgaatcgtcaggcttgcatagaaagctcttcccggtgtaatggtcgaataaggtttcttcgtattccagggacggtcgtctacccagtcgaacaggttctcaacacccaaaccggcattcagaatgaaatatttcagattgaatgtatgtcctgtattcaaatcccaaagcataaaaccggatgaatcatagtcatacgtttcggaatatctctttccctgtccgcgaccaaccatattgatgttcagtccatacaatccccagttcttagaccattgcgcatttacgtttcctgcatacttgacacttttgtcaatcggtttgtccgttatcagatttcttgcatccaacagcgtatagccggctcccagattgaatccaagtcccaggtaagcatttgcatttacattcacccctttgattctcactttatcgatgttgtcacgctggcgcacttcatcataatcaccgtactgtgcagcttcttcatcgctcaaagtacggtaattaatcatatccgtcacattatttacaaaagccgttgctgatacagaaaaacgggaatgagtatattccagattcaatgagaaattcttgctttcttccggtttcagttccagatttccgatagtatagcgattggtagtctttgccagatccgtagcgtaaatttcagaaagagtaggcgtgcggaaacctgttgcaaaagacaatcggccacggaaaccaccctccctatacataatagaagctgtcggagtgaaatgatcttcaaatgtttcattataaatgtaacgcaatcccactactgcttgcagagattcggcaatcgtccactcatcctgtgcatataaagccatggtgtagagcgtcttattagagatattgtccgattcactttccagcttttcatccagatattccaatccggcagacagtttgttcttgctgttcaccttgatgatactcttcacatttccccggtaaaaatattgtttcttacgagtttccttatctccaatcttgaagtcaccgctttcctgaatatagtcataagccgacttgtaattgtccgaatagaaatcggcatcgatatatgctttcttattcacaatatacttcataccgaaaccatacgtataattctcatgatacatattatatttatattccgttaccggacggtcattcaggaaattatagtacgaaccctgtgcatacagcgttgtcttatgattcagagaataagagaaactctggttgaccgtattcgaatgataaccggtgaaagcctgtttatcggtaggatccagtttcacttccccttttttattcaccgtttcggtcatcggatgaagtttccagccatccgactgttggcgttggtaagaagtatacgatgaaagtttgccaacattcaaatccagattcacagcttccgaaaaacgtccgtggtcactcaccttagtagtgctcgatgcgtcaatcttgtttttgctatcatccgtgatgatattaataactccaccaatggcgtcactaccatacagcgcagatgccgaaccgttcagtatttcaattcgtttcacgtttgccatgttgatgcgcatcaacgcatcatcgccaatcagtttccgaccgttcaccaatacaaggatataatcgctattcaagccattaagcaccatttccgttcccataccgctggtagagaaagaaaagttagaagtgagtttggtaagagcctcctcaagattcgtaacattggcctccttgatatctttggcagtcaagacatttaccgggatgggactatccaccatccggcgatgtgttccggttccggtcactaccacctggtttaaattgttatgactttccgtcatgcgtatcacgacgtcatttacactctttgaagtggaataccgttgcggttcataattgagatgtgatacttgcagggtttgtttgccatcaggcaatcccttgattataaactctccttttgcattcgtagttcccccctgcagactatggtccacccgaatattcgctccgacaacaggctctccggtttcagaattcaacacacgccccttgattgtaacctgagcggacacaacacaacatacaccgaccaacatggtggtcaaaataagttttttcaacattttgtgattatgcttaaat

SEQ ID NO: 8081 - DNA, 26072 bp, Unknown
  gut microbiota DNA sequence
ctgtttttcagccttttctctgtttatgcagaagatgggagcgctttgtggcttcgttattcaacgggagcaaaagcaataataatgaataagaaaaagtctcccacattaaatatcgccgtttccgaattgcggaacttctggcagggaggaatccccataacgctggaaatacagaaaagtaaggaactgcgtgcattaggaaatgacggatacatcatccgcgcttctaaagacggtaaccatctgacaatcacttcttccggtgagcaaggaatactttacggaacttatcatctgcttcgtctgcaagcctccgggcaattatccgaatcaacattgaagtctttaaatatctccgagaaaccggattaccggattcgcgtcttgaatcattgggacaatctggacggtacaatcgaacgtggttatgccggacattcgctttggaaatgggacgaacttccttctgttgtttctccccgctatgaagcctatgcacgtgccaatgcttccattggtatcaatgctactgtgataaacaatgtcaatgcaagtcctaagatactatctgatgattatttgcagaaagtcaaagtgctggcagacatcttccgtccttatggtttgaaaatatatctttcaattaacttttcttccccggcagctttaggtggtttatccacctccgatccgttggataaagaggtgattgcctggtggaagaagaaagccaaagatatttattctctgatacccgatttcggaggctttttggtgaaagcaaactccgaaggacaacccggaccgtgtgactacgggcgtactcatgccgaaggagccaatatgcttgccgatgtattgaaaccttatcatggtatcgtgatgtggcgtgctttcgtttactcgcctaccgacagcgaccgtgccaagcaagcttatcttgaatttgagcctctggacggaaaattccgggataatgtcattgtgcagataaagaacggcccgattgatttccaacctcgcgaaccattcagtccgttgttcggagcgatgaagaaaacagcggtgatgcccgaattccagataacacaggaatatctcggtttttctaaccatcttgcttttcttgcacctatgtggaaagaatgtctggatagcgatacatacatgcaaggtgaaggctccaccattgcccgtgtgacggacggctccttgttcccccattcattgacggctattgccggtgtcaccaatatcggtgatgacatcaattggtgcggacatccttttgcccaagccaactggtatgctttcggtcgtttggcatggaaacattcactttcttccgagcagatcggtgaagaatggttgaggcagacttttcttccggttgccgtacagccgtacaacgattccgtcaatgaaatatctccaaaagagagacaacaacttcactctcaactcttccttctcaactctcaacttctccaagagtcgagagaagcagtggtagactacatgatgccgctcggtttacatcatatttttgcttgggggcatcattacggaccggaaccctggtgcgatattcccggtgcccgtcccgactggatgccttcctattatcaccgtgctgacagtttaggaatcggtttcgaccgtagcagtacgggaagtaatgctaccgggcaatatcattccccgctgtgtgaagaattggacaacgtggatacttgcccggaaaacctgcttctctggtttcaccatgtttcctggaaccatcagatgaagagtggacgtacgctttgggcagaaatgtgttatgcgtatgaccgtggcgtaaaagaagtgagaaactttcagaaagtgtgggatagtatgaagccgtatatcgattccgaacgttttcaggaagtacaacatcgtttgaagattcagtcacgtgatgcagtctggtggcgggatgcctgtttactttacttcgggcaattcagcaagcaaccgataccctatgaacttgaacgtccggtacacgaattgaaagacatgatggaatatcaactcgatataaccaattttgaatgtcctccttacggatttactaaataaaggaagctttgtttttccatgaactaaagctatccaatcaatagaaatgataagaatatgtttgtatatagacggcttttatgataaaattgttacctttgcgggcaataacgaaacagaataaaagaatatgagtcaaaatacattctgcatggcggggggcgtagcacgcaacccgcttgtgcgtttagccaaacctatcacggcaactatcggagcgaacgaacacatagccattgtaggtcccaacggtggtggtaaaagtctttttgtagacactctcatcggaaaatatccattgcgtgaaggaactgtacaatatgatttttccccttctgccacccagactatttatgataatgtgaaatacattgcctttcgcgatacttacggagcagctgatgccaattactactatcagcagcgttggaacgctcacgatcaggatgaggctcccgatgttcgtgaaatgctgggagaaatcaaagacgaacaactgcaacatgaactgtttgaactcttccgtatcgagccgttacttgataagaaaatcattcttctttccagtggtgaattgcgtaaattccaacttaccaaaactttattaacagctccccgtgtcttaataatggataatccgttcatcggactggatgctcctacacgcgaattgttattctctttacttgaacgcctgacgaaaatgtcgtccgtgcagatcattctggtactttccatgttggatgatatcccttcatttatcactcatgttattcctgtggataagatggaagtctttcctaaaatggaacgtgaagcctatctgaacgcttttcgtagcagagatgtgactacctctttcgatgacttgcagaagcggattattgatttgccttatgacggcaacaattacgactcggatgaagtagtaaaactgaataaagtcagcatctgttatggtgaccgaaccattctgaaagaactggactggacggtgtctcgtggcgaaaaatgggcattgagtggcgagaacggtgcaggaaagtctacattattgagtttggtttgtgcggataatccgcaatcgtacgcttgcgacatcagtcttttcggacgtaaacgcggaacaggagaaagtatttgggaaatcaagaaacacatcggttatgtaagtccggagatgcaccgtgcttatctcaaaaacttgccggctattgaaatcgtagccagcggtctgcatgatagtatcggtctgtacaaacgtcctcaaccggagcagatggctatctgtgaatggtggatggatatattcggcattgcagacttgaaagataaacctttcctgcaactttccagcggagagcagcgtttggctttgctggcaagagctttcgtcaaagaccccgaactgctcattctggatgagccgcttcatggattggatacctataatcgtcgccgggtaaagaaagttatcgaagctttctgccagcgtagggataagacgatgattatggtgacgcactatgaatcggaacttccgaacactataacagaccgtattttcttaaagagaaatcgataactattttttggctggttatatgtagtgagcaccggttgaaattcgcttctaatgaagcggatgtgtaaaccaaaaacaagaaccttttcccggttccgattctactccgatcttacctcccaattgtgtgatgatactttgacagataggaagtcccagaccggtaccgggaatgaaactattcagtttcacaaaccgggtgaagatagcttcttgtttttccggagcaatgcctattcctgtgtccttgacggagaatcgtacttcattcccattaatccggtaatcaataatgatactgccttcagaagtaaacttcaaagcattggttacgaaatttagcaatacctgatataatctgtttttgttacttgtgaaaataagttccggtaattccggagccagaagaatttttacttgtggtgtcgctttcatttgcatagcctgaaacagttcgttgcagagctgctgtgcattcacctgttccgggataacatcgaaagtcccggcttcgatttttgacaagtcgaggatatctgatatgagttgtagcagtaacttattattttcttcaatgatggtaacatactggtgtttctcttctgcatcctccgcttcttcaagcagactagaaaaacctactattgcattaagcggagtacgtatttcgtggctcatatttgcaagaaaagcagattttaaccggtcggcttcttcggctttctctttggcgccgatcagcatccgttcagtttccttcaattgagtaatatcaaaattgatgcataacatttcgataatgttgtcctgcggctgataatttctgactaatacattcacccgtgtccaggtatagttaccatttgccctgcggatgcggacatcccggcataatttggaactttcccctttcactactttatccagaaagtcaatcatgaccgcttgatcttccggatggaaatgagaatgaatgccgatgatttccggtaatggagtaccttcttcttcaccaacatttctataccagcttcgcaaggcatacccatcccggctcaaagcatcgaagtgggcataacctactttggcataatctcccaccaaatcgaagaaactctcgaattcctgaattttattataggcaattgtatcttcggtcttgtctacattaatcaaaagataattgataggctcgtgattgtgatcgtatagagtagttgctttggttactaaatcgaggaatcctgtcgatttctccggtgaataatagctgtcaaccttggaaaagtcataccggaatgtgaaatctacattttcataatctctaagtttctgctttatttcatccggtaatataggattatcgaaaagattgattcctagaatatcttctttggtacgtatgtggaacatttccagttccttcttattcagatcaatcaggcggccttctctgtcatataattcaatgcctaccgggagattcttataaatattatgtaggatacgctcgctattttgtagagcctgatgagcagatgctatacgaattccctcttgtgtttcggctatgccatatactttggtattgccgtcttcgtctgtttcttcaaaacacactttactgcgaatccatatgctacctttaggggtgtcaaataaatagacttcttcagttgtctgttgcagttcgtcaaaagaaggaaaagtggtgtagctttgatcttccctaaggatacgttgattgaaatcttcaaaactgattacgccgtcttcctctaatccgagcaactcggagatcaattcagaacatttatacgtctctgtttttaagtcagcctcccaccagcctatattcgccttgctcatcaacttatgcaggaatgcacctttgttttgttcgcttattttcaaaatgaatttgtattattgatagttagacaataattagctcgtaaaaataatcatttttgttgaattttgctttaaaaaggaaaaagatagtattgcttcatcctaaagaaagttgggaaacaaagtgtttacctatatgagcaagttattctttgcatatattctttcaatgattatcgagtggattctttttgcagaaagaatcattatttctgggtattgacaactatttgttttctagtgaactttgtgaagaaacaatctgttgtatatataaaaagaagaaaggagaactttagaaatgaaaaagatagtattacttcgtcacggagagagtgcatggaatagagaaaaccgcttcacaggctggacagatgtcgatctgacagaaaagggagttgccgaagctgaaaaagccggagagacattgaaagaatatggtttcaatttcgataaggcttatacttcctatttgaagcgtgcggtgaaaaccttgaactgtgttctcgataagatgaatctggattggatacctgtagagaaaaactggcgcctgaatgaaaagcattatggtgaattgcagggattgaataaagccgagactgccgagaaatatggagaagaacaagtgctcgtgtggcgtcgtagctatgatatagctcccaatccgctttcggagagtgatttgagaaacccgcgttttgattaccgttatcatgaagtgcccgacgccgagttacctcgtaccgaatcattgaaagataccattgaacgtatcatgccttactgggaaagtgatatattccccagtctgaaaacggcccatactttattggttgtggctcatggtaatagtctgcggggtattataaaacatttgaaaaatatctccgatgaagatatcataaaactgaatctgcctactgccgtaccttacgtttttgagtttgatgaaaacctggacgtggtcaacgactatttcttgggaaacccggaagagatcaaaaaactgatggaagcagtagccaatcagggaaagaaaaaatagaaaagttacacattaaaaaatgaagttatgagtaaagtagtagaattattaagagataaggcctgttattatctggaccacacttgcgaaaccattgataaatcactgattcacgttccgtctcccgatacaatagataaagtatggattgattcggaccggaacatcagagtattgaacagtctgcaaacgctgttgggacatggccgcctggcaaataccggttatgtatccatacttcctgtcgatcaggacatcgaacatactgccggagcatcatttgctcccaatccgatctatttcgatccggagaatatcgtgaaactggctattgaaggaggttgtaatggagtcgcttctacctttggtatccttggttccgtagctcgtaaatatgcccataaaatacctttcatcgtcaagttgaatcacaatgaactactttcttatcccaacactttcgaccaagtactgtttggtacagtcaaagaggcctggaatatgggagcagtagcggtaggggccaccatctatttcggttcggaacagagccgccgtcagctcgtggagattgccgaagcttttgaatatgctcacgaactggggatggcaaccattctttggtgttacctgcgtaataatgatttcaagaaaggtgctgtcgattatcatgcggctgccgatttaacaggacaggccgaccgtctgggagtgactattaaagctgatatcgtaaaacagaaacttcctactaacaatggtggtttcaaagccatcggcttcggcaaggtagacgaacgtatgtataccgaactggcttccgaacacccgattgacctttgccgttatcaggttgccaatggctatatgggacgcgttggtttgattaactccggtggagaatctcacggagaatcagatttgcgtgatgctgtcattacagccgttgtcaacaaacgtgccggtggtatgggattgattagcggacgtaaagcgttccagaaaccaatgaacgaaggggtggaattattgaataccattcaggatgtatatcttgattcgtcaattacgattgcttaatcagggatgaataaaaataaattcttatctttgactattagatcgttaaccattaaaaattaagagtatgaagttttttattgacacagctaatctggagcaaatccaggaggcttatgacctcggagtacttgacggagtgactaccaacccttcgctgatggcgaaagaaggtatcaaaggaacgcagaatcagcgtgagcattatattaaaatatgcgagatcgtcaacggagatgtaagtgccgaagtgatagcaaccgattatgaaggaatgattcgtgaaggcgaagaacttgccgcgctcaatccgcatatcgtagtaaaagttccctgtattgccgatggcattaaagctatcaagcattttacggaaaagggaatccgcacgaactgtacattagtcttttcagtagggcaggcattgctggcagctaaagccggagctacgtatgtttcaccttttgtcggccgtctggacgatatttgtgaagatggagtaaggcttgtgggagatatcgtacgtatgtatcgtacgtatgactataaaacacaggtattggctgcttccatccgtaatacgaaacacattatcgaatgtgtagaagtaggagccgacgttgctacttgcccgttgagcgctattaaaggattgctcaatcatccgctgactgactcgggattgaagaagttcctggaagactataaaaaagtcaatggttgagtaagcaatgaagcttgcaatatattaaaatattaggcacggattacacggatttcacggttttaaaaatggtagttatcataaaacaactataaaaaagcgtgaaacctgtgtaatccgtgcctaaaaaatatttattttccgggtagcttcttattgctcttttttcctttcctgtttctgcttttctttgtattgagtcggcgtttctccagtatattgtttgaaagccgtactgaaatagcgtgaagtagtaaaaccgaccttctcggcaatttccgtgaacgataggtccgtactggtgattaacgtgattgctttttccatccggaatttattaatgtaatcattggctcccatatcggttagagctttcagcttattgtaaagggaggctctgctcatacctatctctttgcagataaaagtgacatccagatgactgctatccaaatgctccaggataattttattcagtttcaacaggaatgtttcatctgcctggctaaaggtgctttcttccggcgcagggactagtcctgtattcaaatatctcttcttgatagattcgcggttcttcaaccggttgcgaatgatttccatcagcatttctatctcaaaaggtttagtcagataagcatccgccccgttcttgtaaccactcaactggctttgtttatcatctcttgctgtcagcagaacgataggaatgtgactgatcgtaatatcttcctttatatttttgcatagttcatatccattcattctcggcatcatcacgtcgctgatgataatatccggggcatggcttttggtcagttgaagggcttccacaccatccgaagcaatcactacccgtttgaaatattctcccagtgactttttcaggaagtccgtcaagtccggattatcatccactactaaaacactgtaaggactcgtgtcgaaattatcttcctccggttgttgttctttactatcgtcactcatcaattcgttcaaatatgcttttggttggcagataatctcttccgattgttgtctcaagggcagttcaaagaagaatgtcgcaccggcatcctgattatcttgcgcaccaatggaacctccgtgtagttctaccagaatcttggaataagacaatccgatccctgtaccgctctgctctcctgtaccctgatagaaacgggtgaagagtttctgtgtatttacttgtttcaatccgtttccccggtcaatgatggagatacgtacgctatttctttcggaaagcaactccgatataattgttatttctgcatcctgcggactgtgtttcaaggcattgataagcagattgcttagaataatctcacacttatctttatcaaaacttacagtatcgatatgtggatcaagctgataacggatatggacgttctttgcttccccttcactgatgaaatcttgggatacatgttcaatccattgattgagaacatacggttgtatctgcaatttgctttctccaacctccatcttgcgtacatcgagtaccatattaataaggtttttcattcgctgcgcttgacggtagatcgcttttattggcaaatactgtgtatcttcggtagaaagggatttcaacatccggttaagtggtgcgtatattaacgttaaaggtgtacgcaactcatgactgatattaataagaaaacgtaccttttcttcatatacctgttgctcatgttctttcattgcccactttaacttctcttctttacgtttccatgctcttcggaaagcttcgataatagcggcagcaataaaaacggcgcaacaaagaataaaccaccatgtccgataccagggaggaaggatggtcaattccagtacttcctgactgggaatccaattaccatccttggcggtacaggacgccatgattttataacttcccggaggaagtgaacgtatggccagttcgggattgtatgattcgatttgctggtcattcagcccctctatttggtatctgtacactttctgtcgaaaaatatctttctctttcgacatgattcgaatagtgatattactattccagggagcagaaatccctgctggatgattcgttaattcgttatttactgactctccattaatgatgacatctgataattggagttggggaagttcggaagtggttaatggtattttgctgttaatatgcagtaaccctttcactccacccatgtagacgtctccccgcatacttaatagacgaggtttggaaagatattcgttttggattacaccgtctgattcaccgaatagaacgaattttttctctttgatgagccaggcgaaaagcatactgtcggctcctatccatacttttccttgctggtcgcatgcgatcaatgtgatttcactaaatagagaggtcgggattggtgtctgtattttggtggcaggattgtagtgtaccaatccgtagttgtttccaatccagaaatttccctcttcgtctcgtgcaacagagttgatcgttgtatctttccaacatctgtatagggctttcagccggttggtatggttgtccagttcatatatgtgcttcgtatcatttagataagtgatattcttataattgtcgataggtaagagagcaccgataatttcctgctcttcttgttctataacggtactgaaagtacgtgtattcaaatcatatatatagatatgttctccaaggaacagaatattgtgatgagtgtttcgaagtagatttacagccttgcctcgattgcacaagagtgctgtcgttttagcgtcaacaatggtgaaaggctgtttttctcctgttgccggattgaaaataaatactccctgtgagaaaagagaaattaataatttgccgggagtaaactggcagatagaggctactttgtcttcccaggtggaagggtaatggataaatttctctgtgagtgggttaaagctgttgatgcctcctccgtctgtaccgacccaaatttggtcttgggattcttggaaaagacttagaacggtattgttgcttagtccgcggtcgttgccgggaggtacatctgtatacgttttcatggaaacttcccggatgctgattagtccgttacggatgctacctgcccacatattattgttgcagtcgttgtatagacataaaatagagttagcggggagtgagtagttgtcacttccgggcatatgctccaacagcgaaaaacgtcttgtttccgggtcgagaatattaatgcctcctccgtctgttccaatccagatttctccttcccgttcggcgaggcttagtatgacattgttgcttaaagaggagttgtgggtagtatatgtagccagtagtttaccgtcgcgtgtcagacagttcagccctccattgtagggagctacccagattcttttttgtgagtctatgagtacattcataatttcttttccgcaatcgaaaggaggacgtcggcattttccggtattcaggtcgagcaggagtagtccttgccaccggctgcaacagagtaatgtgtgtttatcccatagatttagtagagtcacattataattgggttctaagtcaaatgtttgtaggaggcgtaaagaggtatcctgataattatagaaaaagattttatttttcgaaccgaataacactccgttatcagtcaggcaggcggaataggcgatgatattatttcctgtctcatcagtcggtataaaaaagtcatcgctttgcctctgataacgtgccactcctttgtctgtcagaatccagatattgttttgttcgtcttctatcatctggtagattaaattgtgaggaatggaatgagggttatttgcctgatgaatatattttttaagttcgtgtccgtcatatctccctaatccggaacgggttccaatccatacaaatccttgtttgtccgttaaaatacatctcacggtagagggaagaccatcttttagggagatttgcttatagtaataatgaccggcttgaagaggggaaccgccgataaacagtgtgataaatgcaatgcatagtagtaaaaaggtttttgttctcatgagatcaggtcagttaaactgaaacaaagatagtgtattcggatgaatattagttaaatcccctctcttattttttggtttttatgcttatctttgctcgaaaatatacgactatgattaccgaagaactacagaaactttatcagtcatatacgggcgttcccgctgaaaacataacagaattaccgtcttccggttccaaccgccgttattttcggttggcgggtatagaaacattgattggagtctacggggcttctattgatgagaatgaagcttttctttatatggcaggacacttccgcaaatgtggactgcctgttcccgaagtgcgcattgcctcggaagataaaacctattatttgcaggaagatttgggcgatactctgttgttccatgccatagagaaaggacgtgctaccagtgttttttccgaagaggaaaaagagttgcttcgcaaaacgatccgtctgcttcctgctattcaatttgccggggcggatggatttgatttttcccgttgttatcctcaaccggagttcaaccaacgctccattctgtgggatttgaattacttcaaatattgcttcctgaaagctaccggtatggagtttcaggaagacaaactggaagatgatttccaaaaaatgagcgatgtcctgctccgcggttcttccgctactttcatgtatcgtgattttcaaagtcgtaatgtgatgataaaagacggggaaccgtggtttatcgactttcagggcggacgcaaaggcccgttctattatgacatagcctctttcctgtggcaagcgaaagcgaaatatcctgatagcctccgtaaagaactgctgcaagaatatatggaagctcttcgcaaataccaaccgattgacgaatcctatttttatagccagcttcgccactttgtccttttccgtacgctgcaagtgctgggagcctacggtttccgtggttactttgaaaagaaaccgcattttatccaaagcgttccttatgccatcgaaaacctgcgtgaactgttgaaagaagaatatccggaatatccgtatctctgtaacgttttgcgggagcttactggactgaaacaatttacggacgacctgaaaaagcggcagctaaccgtcaaagtaatgagctttgcctataagaaaggaattcctgatgactctaccggcaatggaggaggatatgtgttcgactgccgtgccgtgaataatcccggcaagtatgagcgttacaaacctttcaccggactggatgaacctgtaatcactttcttggaagaagatggcgaaatacttcgtttcctcgatcatgtctatgctttggtagatgcctccgtgaaacgttatatggaacgcggattcagcaatttgtccgtctgcttcggttgcaccggcggacagcatcgttctgtttattcagcccagcacctggcagagcacctgaatcagaaatttggtgtgaaagtcgaactggtgcatcgggaacagaacatcgaacatacgtttgaggcaacaatctaagaagagtaaatataaagaagaaagtaaccgaaagaatgaaagcaatgatatttgcagccggtttgggtagccggctgaagccactcaccgataccatgccgaaggctttagttcccatagccggacgtccgatgttggaacatgtgattttaaaactgaaagctgccggattcacagaaataatgattaacatccaccattttggcgaacagatacttgacttcctgaaagccaatgaaaattttggactcatcatacatatttccgacgaacgcgacttgttgctcgacaccggtgggggagttaagaaagcccgttctttctttgaaaattccgatgaacctttcctgatacacaatgtagatattctttcagacgtgaacctgaaagaactatatgactatcatctacaaagcggtgctgttgccactttactggccagccaacgtaaaacctcccgctatcttctttttgatacagacaaaagactttgcggatggataaacaaggatacggaacaagtgaaaccggaaggttttcagtatgatccttctctttatcaggaatatgcattcagtggtatccatgtactttcgcccgccatttttcaatggatgacctctccccgttgggagggtaaattctctattatggatttctatcttgccacttgccggcaagtaaactatggtggttatttgaaagaaaagttacatctgattgatataggcaaaccggaaacattagcgaaagcaacagactttttataccaaaataccaaataaagatactgaaagaggctaaaaagcctctttcttgctatgtaacaaaatatttaagtaactttgcttggataaacaatcaatattgtaatactatacaaattttgctgcatggaacagactttggaaaatgggatagctgacaacttattgcacaacatctttaatgacctgtctgtaggcttggagttgtatgataaggacggtctcatgatagatgtcaattattcgcggttgagatcaatggggataaaagacaaaaaggatattctgggctataatctatttaattacactagtttctctgatgaaatcaaagaacaggtcagaaaaggagaaacagtgcgtttcatggcaaaatataattttgatgacgtgcgtcatctttttcctactaatctgtccggtataaaattctttgagattaccgtttctttcgtacataatgaaaagtcggaaattacgaattatatggtgattagccaggatgtcaccgaacgtgttctgtggcaaaacaaatatgataatctttacgaagaagcggtgcgctcaaaaaaagaactccttgagagcgaacaaagaatgatccaattgattcgtcagaatgagttggtattgaacaatattaattcgggattggcatatattgcgaacgattatatcgtacaatgggagaatatctcgctttgtagtaaaagcctttcttatgaggcttacaaaaaaggggagccttgctatctgacagcccataatcgcaccactccttgtgagaattgtgtgatgcaacgtgcccggagatccggtcaggtagagtctatcttgtttaatttggataacaagcatgtcatagaagtttttgctactcccatatttaatgaacagggagatgttgatggtgtcgtgattcgcgtagatgatgttaccgagcgacagcacatgataggtgaacttgaaacggcaaggagccgtgctgaacaatccgataagttgaaatccgcctttctggcaaatatgagccacgaaatccgtacaccgttaaatgctatcgttggtttttccgatttattgatggtgacggaagatcaagaagagaaagaagaatttattcagattatcaatgccaacaatgagttgcttttgaagctgattaacgatatactggatctttcgaaaatagaagccggctcggtagaactgaaatacgaagattttgatttggctgtttatttcaacgaattagctgcttcgatgcatcgtcgtgtagtaaatccgcaggttcggttagtttccgtgaatccttatgaaacctgtaccgttcgtttggataaaaaccgattagcgcagattctcactaactttgtaactaatgctatcaaatatacctccaaaggaactattgaaatggggtatgaaaagatagacggagatattcgtctttacgttcgcgatacaggtattggtataccggaagataaaaaagacaaggtgttccatcgttttgagaaactggatgaatttgcacagggaaccggactgggactgtctatttgtaaagccatcgttgaggcttgcaggggagagataggctttgagtcggaatttgataaagggtctttattttgggcggttttgccatgccagttcgattcggttgacagcgagccgacttcttcacgtcggaataatgagaaggatgcagataatgaaagcattcttgactccgaagaaacaaagaaagtacctaaaagagtactggtcgttgaagatattcaaagtaacttctttttggtatcttctatcttgaaaaataaatgccagttgttacacgcaccgaatggactggaggcagttgagattgtccgtacccaaccggtggatttggtactgatggatatgaagatgcctgttatggacgggcgtactgcaacctcggagatccggaagttcaatgctgaaattccgattatcgccctgactgctcatgcctttgatgccgaccgggtagctgcgttgaaagccggttgtgatgattatctggtgaagccgatcaatggcgcgaagttgatgcagactctgaaagagtatggttgttgaaaggatgggattaaaaatgtgctgatctgaaaaatggtatattctattctttctgtttttaatatatcagtcacttgtttgtggtgaaggaaaaaacgctctgcattttggatgaaagaatgtagggttgtttgttgtcctggataattcctgtctaaaaataaataattcctctgtattgctatctatatgcttactgtttgcccgtatgtagtttgctttatcatttttcttttgtgcgcttgtgatgatgaactagcctataaacgggcttttccgagggcttttataacttggtcggtgagtatggaaggctttctcggtgagcaaggatgtgttcctcaccgaggaatggcttattgctcaccgaggaacatcatttatttctttaaagaaaacgcatatcatctgaaaatatatgctgtattgtggcggtaatatgcatatatatgtgataatatggatgcttttaattccggattaccatcttcaatagttttgttttctttcttaatctgaaaaatagaacatttctcttgtttgtttggaggaattgaaagggagacagcttactataaaaggctataaatccgtaaagtttgggattgttttttatgtttatggatttaaatagttacctttgctaaaaatagaatatcatgtccaaatacgtcaatccttttactgatataggatttaaaattatttttggtcaaccggccagtaagaatttgctcatcactttgttgaacgaattacttgcaggtgaacatcatattacagaacttacttttctggataaggaagatcatgcagacaatgtgagtgataaaggtatcatttatgatctttattgccgtacagcaagtggtgagtatattatcgtggagatgcagaatcgttggcacagtaattttttagatcgtacactttattatgtttgtcgtgctgtgagtcggcagatagaatctccttcttcaaaagaagtccctgtccctgaagatccgatgactgcaagagaaccacttgtctcttatggaaagcagtatagactacctactatatatggaattttcctgatgaatttcaaagaggaaaatttagaggctaaattccgtacggatacggttctttccgaccgtgatacagggaagattgttaatccgcatctccggcagatttatttgcaatttccttattttacaaaggatttgtcggactgccatacattatatgataaattaatttatgcactgaagaatatgagcaattggaatagaatgccggatgctttgaaagaacaagtgtttgaacatctggcgagattggcagcagttgccgatctttcggaagaaaaccgtatcgcttatgataaggcattagatcggtatagggtcaaccaaattgtagaggaggatgaacggcgtaaaaacgaagagatgcggagaaaagcggctgaagaagggttaaaggaagggatgaaggccgggttggaaaaaggagtgaaaaaaggaaggctagagggaataaaagaagggatgaaagaagggatgaaggaagggttggagaaagggttggagaaaggagagcaaaagaagcaaattgaaattgctcggaagatgagagaggacggaatatccattgatataattatcaaatatacgggtcttcaatcttctgatatagaaaacctataatatatcttcataggaaaattgttgtagttatattaggataaaatataaaggaggcgggaatattcaagaatggatacttccgctttctttttttgattcgtaagatgtccaacaatgtctatgatggttagatatatcgatgaaatggatgattttagacaaaattggaaaaatagtagctaaaatagaacatgcatattcagtaaccacgtctatatttgcgtatggatttcagcaaaaaatctggaataagctttttaatctttaaatttaataatttataaaaatgacttctatgaagaacctatcaaaagtttttctgctatgtttcatcacattgtttgcgtttgcagcgcaatctatgggacaaggaaaaaacattaccggtcaggtagtggatgctctaaatgaaagtatgcctggtgtcaatgtacaagtaaaaggtactactaatgggacaattaccaacattgatggaaaattctccatttccgttccaaactcaaaatcagtgttggtctttacttttatcggttattccaaacaagaaatagtggttggaaatcagactaaaattaacgttcaattaaaagaggatgcacaaaatttggatgaagtagttgttgttggttatggaacggctaaaaagagcgatttaacaggcgctacagccagtcttcgtcctgatgcgaatgatgcttcaaaagctgtatctattgacgggctattgcaaggtaagattgcaggtttaaatgtaacagcttcaatgtctactccgggtgctgcttcttctgtcactattcgtggtgctaactcattacgtggagataatcagccgttatatgtgattgataatgtgccgcaagcatctactggtgagtttgccgagtctgctgtgggaggtggtgacttccaaatagctcaagatccgttgagtgcaataaatcctaatgatattgaggatattaccgtcttgaaagatgcttctgctactgcgatttatggttctcgtggtgccaatggcgtaattcttattacaactaaaaagggaaaggccggaaaggcaaaagtaaatgtcacagcgaactttacgatagctaatgcacgtaacttgcacgatatgttaaatttggaagagtatgccgattacactaattctaaattagaccaaccgcgatattatctgcaacctaatggtgaaatgcgttacgtatttagtggtaatgaatccgcttatcaggcagatccgaataatccggaattatataaggttattacctatcgcaactggcaaaaagaagcatatacatcagctttctcacaggtctactcggcttctgtcagtggaggaactgccggtatgaaatattatatctccggtaactttaaggatattaatggtatcgtagaaaatacaggaataaaacagggtgacttgcgtgctaatttaactgctgaattatctaaaaaagtaactttaaatttgatattgagcggttcattaaagcagaatgatatgatgacgggcggtaatacaaccggaggcgttgccggatctttggctcgtacggttcttgatacagctccttatattgttcctgatgatgatccgggtgctttggaatcaaaaatgaatgtatttagttgggtaaatgattatgatgatattactaataataagacatttaatggaagcttgaatctgaattggaacattaataaatatttctcgtatagtctgcgtgcaggggggaatataattgtcaatgaccgtaaacgttggtatgggattcagttacctccgggagaaaatgtgaagggtttactggcaatcagtaatgtcaataagtctaattatacagtggaaaacctgttaaactttaatatggacttgactaaggattttcgtctgtcggcaacagcgggtatcacttatgatgaatatcattttctgacagagaatgtttcaggcaatactttttctatctatgacttacgtactaaaggattgtctaatgcaggaaaagtggatgtaaaacagcctatacaaaaagattatcaattactttcatatttaggacgtgttaatttatctgcttatgataagtacttgttgacggcttcattgcgtgctgacggatccagtaaatttaaaaagggtaatcgttgggcatatttcccgtctttctcattagcatggcgtatggaacaggaagcttatatgaagagcattgattggctaagtcagttgaaggtacgtgttggttatggtgagacaggtaatcagggtattgatccatatcagtctctatctatttatgaaaataaggtggactatgctgatggagatgggaataaactgacgtctatgcaaatcaaaagtctgcaaaatgagggtttgaagtgggaacgtacttcttcgtggaatgttggtcttgactttggtttctttaatggtcgcctgaatggtgcatttgattattaccgtaaaaacacaaaagatttgttggttgagcgtgctctgccatattccagtggatttgcaacagtgatgataaatgaaggctcgttgttgaataaaggttttgagtttagtttaaatgctgatattattcgcagtaacgggtggaagtggaatgtaggcggaaatattggtttcaacaagactacgattgagaatttaggtttggaagtttctgatataggttccttgaaaggagtacgtggttatttaggtaagacgattggcgatcattttggacctgcaaatgtttttattgagggtgaggctccgggactatttttcggttataagacacagggaattattcaggaagaagatgttgttgatggcaaagtaggatatatctcatcagatggttctaccaaatattacacttcatctgttggaaatgatatggcagctggtaatattaaatgtgtggatgtgaatgaagatggtatagtagatcctaatgacatggttgtgataggtgatccgaatcctgatttcacctatggtttccagacacgtttggaatggaagaatatatctctttctgcttcttttacaggtgtttatggtaatgatattctgaatacaaatatccgttacgaacagactccttccaggcaggccggaaacttgagaaaagatgcttattataatgcctggactccggagaatcgttctaatttatatccgtcgtctacttcaaatgtaaaaggtgttgtttatgatcgttatgtagaagatggaagttatttgcgttgttcagatattacgctgaattatattttgcctaaagcgtggatgactaagattgggttccagaataccagtatttttgcttcagtaaagaatgcatttgttataaccaattatagtggatatgatccggaggtaaatagctttgcatttgatggcctgcgtcggggtattgatatgaatgcttttccaaatatgcgttcttttgtgtttggcttgaatgtaaccttttaatttacaataaatgattatgaaaatgaagaaatttacctatatatttttattagcaagctgcttattattggcttcttgtgaatcgtggttagatgaagacccgcaatatactttgaatacacaaattcagttttctacttctgaaaaggcacgtgcagcattatatggatgctatggttattttgcattgactagtggaggatatggtcagcattggcaagaaattccggtacgatatagtggtttcggatgggcacagactaatgggggtacaaatgatatgtgtggatggctgcaatgtgactatacagatgatctgttgacaaatgcatggtatgtaatgtataaagtaattaatgaaacgaatgcatttatagccaacgtagaaagtacttctttggaggataaagacgaaatggctgcagaggctcatttcttgcgtgccttgtcttattataaccttgcaatatgttggggagatgtacccttgaagacaactccttcttctcatgacggcgtagctgtacctcgttcctcgcgtttagaggtgttggatgttgtacgaagtgacttggaatttgcttcaaaatatttgccggaaacgaattctgatggatttccaacgaaatggactgcagaagcatatttaggtaagttgtatcatactttaggttgtttgggtgatgctacagcttgggaaaaagcaaagacctattttgaaggagtgaaaggtaaatatgatttggaatcgaaattttctaatttatttgttgataagattaaaggttctaaagaatctatatttcaactgggatttcaggtgaatggtgagttgtcttcttttaataggggatcttgggtttttaatcctgctgcatcatcgtatggtaagagtttccatagagtgaagtgtacgaaagctttttatgatttctttgcgggaacctattggggagatcctcgtattgagactacatttatggcaaaatggagaaaatgtacaaacaatatcggacctgtagctcaagtagagcctgtgccgtctgcccgtgactctacctatgaatatccttatttcacttatgatagcggtataaaacctgccggttggaaaaataacaagttgttagttggtagaattccttatgagttattgactaataaagagaatccgagcgcggatgaaattttggctatcacgaatgatgaaaccaaatttgatgagaaatatcgtaaaggattgaaagattttttgaatgtatgtactgcggcgggtaggacaggagaaagagcggcatggcctcattttgcaaaagcttttgatatgaatatggcaggtattgccagtcataaaaatctaattttatatcgttatgcagatttattattgatgttggctgatgtctataatgaattggatagaaaagacgatgcaattaatacagtagatctcgtgttggcgcgtgcacgtaagtcgggagctaaggtttcgacacaaccagccaaatgggagtcaacattaacaaaagatcaagtacgtgaaaagatattctttgaaagactttttgaaggtgccggtgaaactgaaatgtatcaaatgatgcgcttgcgtggaactgaatatttgaaaaaagcacttactgtgaataataatcactcaataactaaaaagtggcaggagaataatcccaatgcaacgggagtctggggtgaacgtatttacaataatggaaatttgaatgatgagactttcttgaaaaagaatttgttgttccctattccgcgtgatgaaatgaatactaatatagctattacaaaaaataacttcggctattaaaaatagtagttataacaagttgttttttcccgaatgcagaggaggagtgtttctgcttttcattcgggttttctttatataaatagaaatcattgtatatattttcttggatttgctggattggaaatgagttgtaaatagtgtttttgccatttttccttctgaaacagacaaaaatggagaatattggaaattaattggttatttgtgaacatggattttgttgacaggtctctacctttgtcactacaatctaatataaagttgttttatggaaaaactgcaatcaaacttattctttcctttagcaggaatagctgccgtagcttcccttgcttcctgctcaaacaagcaaaagtctgcggagcaactccctttgaatatcgtctacattatgacagacgaccacacagctcaaatgatgagctgttacgacacacgctacatggaaacccccaacctcgaccgcattgctgctgacggtgtacgttttactcaaagctttgttgccaattctttaagcggccccagccgtgcctgcatgataacgggcaaacatagttgtgctaataaattctatgataataccacttgcgtattcgacagttcgcaacaaacttttccgaaactgttgcaggaaatcggttatcagacagcattggtgggtaaatggcatcttgaaagcttgccttccggctttgattactggcagattgttcccggacaaggagactactacaacccggatttcatcacacaaaacaatgacactatccaaaaacatggatacatcacgaatcttattaccgatgacgccattgactggatagaaaacaaacgcaatccggaaaaacctttctgccttttgattcaccacaaggcaattcaccgtaattggttggcggatacttgcaatctggctttgtacgaagataaaacctttccgctaccggataatttctttgacgattatgaaggacgtcccgccgctgccgcgcaagagatgagcattgtgaaggacatggacatgatttatgacctcaaaatgcttcgtcctgataaaaacacccgtctgaaatccttatatgagaagtatatcggacgtatggacgaaggtcaacgtgctgcatgggacaaattctacacaccggttatagatgatttctacaggcagaacctgcaaggcaaggaacttgccaattggaaattccagcgttacatgcgtgactatatgaagaccgtaaaatcactggacgacaatgttggtcgtgtactcgactatctgaaagagaaaggcttgctggataacacacttgtcgtctatacttccgaccaaggattctacatgggcgaacacggttggtttgataaacgcttcatgtacgaagaatccatgcgtacaccgcttatcatgcgtctgccgaaaggattcgaccgcagaggtgatatcacagaaatggtacagaacatcgactatgcacccaccttcctcgaactggcaggggcagaaatcccttctgatatccaagggatatccctcgttcctttactgaaaggcgaacatccgaaagactggcggaaagctctctactatcatttctacgaatatcctgccgaacacatggtgaaacgtcattacggggtacgtacagaccgctataaattgattcatttctataatgatatcaactggtgggaactctacgacttgcaggcagacccgtcggaaatgcacaacctctacgggcaacctgaatacgaaccggtagtgaaagaactgaaagaagaaatgctgcaacttcaggagcaatacaatgaccctgtccgcttctcaccggaaagagacaaggaataacaccaacgtatatacaccatgaaaagatacatcttaatcattctcatactgctttcgccactgacagtgttcttgcaggctgataacttaacatcccctttaatttcaatagtaccacgcccgacacagattgtgccgggtagtggtaatttcaccttttctgcaaaaacggcatttgcggtagaaaatcagga

SEQ ID NO: 8082 - DNA, 32356 bp, Unknown
  gut microbiota DNA sequence
gctgccttagctgaacaatactgttactttagcagaacaatacctgcttctttaatgaaagataccagatgcgcagtatttatttaacgggggcgacattcgcttcgtagcgagtttatatttcttatacgctctttgctaatattgaacttcctctctttcaatacaaaacttcctgtatttatttccgtatttccactttgtttcgaaaaaaaagcatatctttgtcatacgctttctgttcatcagcgtggtgaaaacaggtaagaagcgttatttattttgaaataggaatattattgcattatccctcgtccttgaaatctagcaagtttctgtccgtagaggggtggttcaacagatattccacgtgaacggtcgtatatcaacatattgatggaagatgtgttatatataaacgattagcgtggatgtctgttgttatcattatcttatggacgggtttgctaggcctcaaggacagataatgattcaacagcattcacgcttttattgtacccggttggtttcatgatccttataaatccccaaccccaatctcctgtccgcccggaatacaaaaagcgcgaatgtttgttgaatcaacatcaacagagcactatttattccttgttgtataacaaattaaaaacaaacactatgtcacaatggattagcatagaagcggcagccgagaaataccgactcgaaaaagagtatatctggctctgggtggaaatgaaaaaaatcacagtgtcttatgagaacgatacagtttccatagatgatgatagtattcagcaattcataaaacggactaagctgggaattacgtctgaatatatcgatgagttagagcaactttgcatggaaaaaaacaaaaccagcagattgtatgcttcacttttgaatatgcgggatcaggaattaatggcaattagaggacaaagttcgcgactggacggtttatggaaaatggtggaggaacaatacgaaagactgcgctccttcgagaagaattctatgtcggacaacgctatttgtagcaactgctggatcagaaagatatgtaggagattgaaacgaattctataattctgccgtgaatttaatctattaaataacaggctgacaataaaagtacgatctttttattgtcagcctattgtcatagcttattgtcagggtgtaatgagttgctagtcaccgtattatccagcgaaaactcctgctgacaataagaactcttcaatttatatgtaaacctaaaacctatgaaacttttctgttattaattacacgcatggccgcagtatagtattcgcaaggaacagaaatgagaatactgtttaaaccactgtctttcgttgacacctgaatataagcttcattcaacaaactctttacgctggctacttcccaaggactaccagcaaaaacattgacttgagaaatctttctacttgtaatcataatctttatagtgtgtttttgtttatactgcaacaaagataagggagaaaagcaacatagaggtgcaatattgtttcatatatagtatacaaatgattcattgaatcaggatttgtattaattgaccagttttttgcgttaataagagttgttttccctcacatcattcatttcttattttgcgtatttgttattgtttctacaaggctattgatataaacctctatattatcataggcagtacttagatttcttccgtttgcatcatatttgtttgggttcaatccgttggcggtttcccattcgtcaggcatgccgtcattgtcagaatcagtaatttgtggcaatgattttaatgttggccatgcgctccagtcgctaccagctccggaaggctttaggtctttctgactatcgataagtccgcccttaggataattctgacttttccaatggatgatacctttgtcgcaatgttcacaaggaccgttcgggcagggggcatctcctaatccgttgtgttcgttctttccgatgaattgtgccgttcctgtgcgtgtctcttcaacgatacgagtatctatatcatctcgtttgagactgcaacccgcatatttcaacaccagttcgtaagctttttgtgccgtgtgggtagttaccgcatctacttctaccggagtatcccgtttcagttcatcaagagagtgaccggtgttgttacggataccagtccagttgtctttgttcacttttgcggctgctgcttctgtcagttggtttcctgcctcgaagtaattccggctgatatgatactgtcccaatacccctttgatcggtgcaaaatctccatcagaagagctgatgtcgatagccatcacacggttggccactttggcatccgtagcgggtccgggtttgtagtagttgtccacaatgttaatacccattgctgctccgccataacatccgttaccgctccagttataaataacattattacgcatatcagtacgttcctgaccttgatattttactccggaaccgaaacgtggtgtgcgactgtcatggtgtgccatcagattatgatgataagaagcgttgactcctccccaaataccgccatatccatgagggcctttggtatgtcccgataagcggagactttctgaaataatacaccattgcatagtaaagttagtattatcatagaatgaagcacattcgtcagtgctccaactgatggaacaatggtcaatcatgatattgtttttctggcgtcctcccagagcatctgcaccgtcggaagccgaagagcccagcaaatccgtatctcccatccggaaacgcaggtatcgtagaattacattatcggccgatacatttactggaaagtgagccaggcagataccgtctccgggagctgtctgtccggctatcgtgacatcaccgttccgaatgtccagtgtcgattttagataaatggtgccggatatacagaagacaattatacgaggctccttttgttcgatggcataccggagggtacccggtgctttggagtcttccagggatctgacaatatatacctttccgcctcttcctcctgtagtgttcattcctcctccttcagctccgggaaaggcatatgctgtttcttccactggtggagatacggagggagaatccggtggagtctcctgttctttattatcttcattgactgaagatgtggaacaggaggagaacgcttctacttgtgtggcaaacagtagtgccacgaaaatgaattttaccttgttgtttttcatatcttacctgattttttataaagtgtgatgatagtgatactgatacaaatgtaagcggatagaatttgatagacaactggttgcatagatagtgcaccagattgcacaaaaagtccgcaacttttgaatgatattaaaaaagtccacgcaaacaaacaaatagtgagaaagtattcatgttgttccgtatacttttgtaacgtgaaatagtaactgctcaaggcaggacgaccaaataataatggaataagaatctatcattaagaatataacaaataatttatgaaagcacatttattctcgaagatgtcccaaggactattgttgttatcagctttgctggcaacaagttgcaaggaaagtagcaataacttttttgttcccgaccatgaagccccttctttggtgtctgttactcctgcaaatggtgaaacggcagaagaaaacaatacgattctgcttacttttaacgagtatgtgaaagcgggagaagggaaagcgaattttaatggcgaggaagtggagttgactttcaaaggtaaaacagcgtcttacgcttatactgctttggactataatcaggcctgtcagttcagcctccccaaaggtgcagtcatagactttcagggaaatgtattcgaaggtgtcagtattcagtttacaatcagagaacgtcctcaaccggaagcacgcatatttgatgcggtggtcagtcctgacggaaagggaaattataccagtatacagaaagcagtagataatgtcccctcgaaaagaacggaaccctggctcattttcgtgatgaacggaacgtatgaagaacaaattatcattcctgaagacaaaccgtatattcatctcatcggacaggatgtggataagacaattgtcaagttacggattaacagctcaaccgaagccagtgcgactgatccggatgtgtggaagtactcttataagaacttaggaaaaacggaagccgctatggtatcagtgaaagctacggatttttacgcagagaatatatcttttgtaaacggatatggcaaagaattgcagaaaggtcctatggcattggcaatgtatacccagaatgaccgcaactcattcaataattgcaaattcctctcgtaccaagatacctggcagaccggacctaaatcggataacggcagactgtatgcacagaattgctggattgaaggagccgttgattacttctatggaaacgggaattgcttcctcgaacattgcaccttttataatatgagggatggcgcaattattgttgctccttctcataaagtaggaacacgctggggatatgtgatgaataattgcgtagtggatggaaatgaattggctgatacagaaagagtcaagttgggacgtccctggcataattctccgatagctgtatatctcaataccatctttaatataaaaatagctccggaaggatggacggatatgggagctattcctcaaatgtttgctgaatataacagtaaagataaagaagggaatacagtcgatttaagccagcgtaaaacgcaatatacttaccaggatgaacaagagaatccggtgacaggcatttgtcaggctgttctttcggcaggtgaggcggcgcggtatacatacgaaaacgttgttcgcgagggcgataattgggacccgaagaaatatatggaacaagtttccgcaccggaaaatctgaaaagagaaaacggagtattaagttgggatgcttcgaaatatgcgatttgttatttggtgattgcaaatgatgaaacagtacaaataaccaaagaaacgtcttgtaatattgagacaggaaagacgtatcaggtgaaggctgtcagcgagtacgggtctttgagtgaaccttcgcaggaatgatgacaattaaaaactttaaaatatgaaaacgataagcaaagtattcagttgtatattggctttttcttctctgttggggagtgtggaagggcaaaacaggtataaaatatggtatgataaacccgcttcttattgggaagaagcgcttccgattggtaatggacggattgcagcaatggtgttcggtgatccccaactggaacaaatacagttgaacgaagaaacagtgtcggcaggctctccctaccaaaactataatgaagaagcgaaagcggctttgccggaaatgcggcggttgatttttgaaggaaaatacgaagaagcgcagaacatggcggcaacgaagattctttcacaagtggggaatgaaatgccttatcagacggtaggtcgtctgaatatccgttatcaagaccacaaaaaggtaagtaattactaccgtgacctggatataagcaatgcaatgactgtgacccgctacaaagtagacggagtggaatttactgaagaaacatttgcatcatttaccgatcagctggttatcaggcatatcaaatcatctaaaccgggagcaatcaattgcgaactgttttttaatacaccgatgagagatccgaagcgtagtatctatggaaagaaggggttgcgtttggaaggtattacgcatggcagtcgttattttccgggaaaggtgcactattgcgctgacttggatgtgaaaaacaaaggcggagaagtgacaatggctaatgatacgctgcttagtgttcagggcgccagcgaacttacattgtacatctcgatggcaacaaacttcgtcaattataaagatatatcgggtgatccgtatcagcggaataaaacctatctgaaaaatgcggagaaggagtatgataaggcgaaagctgcccatatagctgcttatcaggagcaattcaaccgtgtgactttggatttgggtgaaacttcccaggttaataaaccgatggatgtacgtatcaaggagttttcttcatcctatgatccggcattgatagcgttgtatttccagtatggacgttacttattaattgcatcttcacagcccggatgccagcccgccaacttgcagggcaaatggaatcataacccgggacctccctggagctgcaattatacaacgaatattaatgctgaaatgaattactggccggcggaaatcaccaacttggccgaacttcataaaccattcatccagatggtacgtgaattaagcgagaatgggcgtgaagctgcgagccggatgtatggttgtcgtggctgggtattgcatcataatacggatttgtggcgtatgacgggtgcggtggaccgtccttattgtggaacgtggcctgtggctaacgcatggctttgccagcatttatgggaccgttatttgttttccggtgataagaaatatttggaggaagcatatccgatgatgaaaagcgcttcggagttctttgtcgactttttggtacgcgacccgaatacaggttatttggttgttactccttccaattcacccgaaaattctccgcgctggataaagaaaaaaagtaatctttttgcaggaattacgatggataatcagttggtttttgatttattttcaaatacatgcgaagctgccaaagtgctgaacgcagataccgatttttgtgatacattgaagaatatgcgccggcagttgcctccgatgcaggtagggcagtacggacaattgcaggaatggtttgaagactgggatcatcctaatgatcgtcaccggcacatctctcatctttgggggctatatcccggttatcagatttctccttatcgctctccggtactctttgaagctgcaaaaaatacattgatacaacggggggatccttctaccggttggtcaatgggatggaaagtttgtttttggtctcgtatgcttgacggggatcatgcttatcagttgataaagaatcagttgacttatgtcagtcctgaaatacagaaaggacagggaggcggaacgtatcctaatttgttcgacgcgcatccacctttccaaatagatgggaactttggttgcacggctggtattgccgaaatgttggtgcaaagtcatgacggtgcgattcatctgttgccttcgttgccttcggaatggaagagcgggacagtgaaagggttgcgtgcccgaggaggttttttgattgatgaattgacctggaaggacggtaagctggtaaaagctgtgttacgttcggaaattggaggcaatctgcgtctgcgctcttactggaaattggctgctgaaggagcatcgttgaaacagaagaaggaagaagaagcgaatccgaacgcattatttaaagtacagcaaatctcacgtccgatgattagtgagaaagcgcctttaaaaggagtggcattacgtgatacttatttgtatgatgtggatacacgcgaaggagaagtgataattattacagtaaaataaggcattctatataaaaagtccacgcttttgcataaataatgagtggaaaacagctgtaaaagtgtgacttttgtaacatcaaaaatgaaacaaattaatcaagataatactatggatgtacaaagacatttatttttgcgaagatgcttcgcgtatatatgttgcttgctcttgtgctttataacggcgacaacagtatatgcacagaaggtatctgtgaaaggaacagtggtggataccaacggcgatgctattattggtgctagtgtgaaggtgttgaaaaagtcctccgtcggtacaattaccgacttggatggaaatttcactttgtctgttcccgaagatgcaacaaagttggaaattagttttgtaggaatgaaatcagttgttgcgactgtgaaaccgggcaaacatctgaaagttgtgttggaagaagacaatcagactttggacgaagtggtagtggtagggtacggaacctcacgccgcggagatttgaccggtgcgatttcttcagtgagtgagaaggttttgaaggatattccgataacttctgcggctgcggctattacaggaaaactggcaggtgtgaatgtagtggctactgatggatcgcccgatgcaacaatccagattacagtacgtggtggtggttctattacccaggacaattcaccgttatatattgttgacggttttcaggtgagtaatatcaatgatattcctcccggtgatattcaaagcattgatgttttgaaagatgcttcttctaccgccatctatggagctaaaggtgcgaacggcgttattcttgttactacaaaaagcggtaaggcgggaaaaacagaaatctcattcaatgctcactggggtgtcagtaatgtgtataatctgacgggggtactttcaccttacgaatactactgttatcagaaagaacttgatccgggcacctctctgaccagtagcattaattcgatgtatggacgttgggacgaccgcaatatttatcgttcggtagaaggcacgaactggcaggataaagtatatggaaacaccggattcaaacaaagctataacgttggtataacaggaggaacggatgccacattgcgttataatttgagttatacgcgggatgatgagaagtacattatgctcaactccaattatgtgagggataacttgagtgtgaagatggataaaaagttgagtaacaaattgaagtttgagttttccagccgtttgactagaatggtgattgacggtgcgggtaccaatggaggtaaattgagagatgccgttcttttctcgccaatcaacagccttgcaagtatagatgcgggagatgctttggggggtgaaattgattactcggatgatgcattgttatcatcattgaatgatcctgtatataatacggtgaatgagtataagaagcaaaaccagttttctatgacttataatgccggctttaactgggaaattgttaaaggattgacttatcagctgaaaggtagttacgcatacacttataattataccgataatgtctggttaaagaaaaccggagagtcgagctccaatgccggtcagcccgtagccaaacgtacggatgagaaaggtgcacgatggaacttgcagaacatattgagttaccggttctctctgaaaaagaatcaccgtcttgatctgatggccggacatgaaatggtgagtaattacagaaatcagatgattgcctcatccaaatattatcctatggattttacggcgagcgaagtgttggctatgtggaactatggagaatcccaaccaacgtataccactcttggtgaaccttctcgtacggcatcttacttcggtcgtttaaactatgctttcaaagaccggtacatgttcacttttacagcccgtgccgacggaacgaatgtgttcgctcctgaaaaccgttggggatttttcccgggtatggcattggcatggcgcatttcccaggaaaaatttatgaagcagacggaagactggctggataatctgaaacttcgtgtgagttacgggtcagttggtaatgcgcgtgtcaattcatactggagacaggattataaaatggaatcttctgccaataggcaatattatctaaatgaaacagtacagagtgccctgaaattgcagaacaccttgcggaacgagaatctgacttgggaaacgaagttatcctctaatgtgggaatagatgccagcctctttaatagccgtttgaatgtgacggttgacttctataatgatataacgaaagatttaatcttacgcatggatcttccttcaaattcgggatatgaatatcagtatcagaatgtaggccgcagtacgaacaggggagttgaacttacgcttagcggaacgattatcaatagtaaagatttctatctgggcgctaacttcaatatatcattcaataaaaatatagtgaataaactggatggaacggcaaccgtattgagtgcgcaatccaactggcgaccggatatcggctctgatgattttcgtgctattgtaggtcaggcggtaggacagatttatggattcgaagtagagggcttttattctgtagacgactttacgtttgatgagaatacgaaaaaatggatactgaatgaaggggtagtagacgacagggctttgttctctaatgacctgcctaactttggtcctggctttatcaaactgaaggatcagaataatgacggtgtgatcgatgcggataatgaccgtaaagtgatcggtagtgtacagccaaagcatattggcggattcgggctgaatgctgcatggagagggtttgacttggcggcaatgttcaactggtcatatggcaataaagtatataatgccaataagattatggcatccactcatacgaatcgtaaatataataatatcagagattttatgagtttggaaaaccgttggtcgattattgatccggaaacgggtgccaatgtaatgtatggtaatgacgccaatccggaacgctttgttgaaatcaattccaaagcctctatctggatgcctatgatggggcgtacgcttgtgacggactgggcgattgaagatggttcttttttgcgttgtagtaacctgacgttagggtatacgcttccggttactgtgactcgtaagctaggagtcaagaacctgcgcgtgtatgctacggccaataacctgttttgctggacagcttattccggacaggatcctgaagtgagcacacaacgttctacccctttgactccgggtgtggattattctgcatatccgaaagcacattcttatgtattcggtcttaatgttactttttaatacttgaaaaatgaaaatacagaaactatttttagcggttttatcctcctctgtgttatgcacttcgtgtatggataattttttggataccgaaagtccttctattccaagtgatgagaatctgtttaaatcgactgctctgacggaagcagccctgatgggtgtatatgcgacaatgacggacacctatatatatggtcagaaactgtgtgtcaactggcagggagcttctgacgtggaggttggctcgggtgcgttttctacggaaaactataattcgacacttcgtgatgaaggtgctggcaatttttatgacgataattataaccggaataccagatgggacaaactttattatctggcagaatccgccactactatcgtagatggtatacgtcggtcaccgttgatgcaatctacttcggacaaggctgccatgcgtagatatttaggagaggcattagcactaaaagcgttaggctattttgaattgatccgttattggggagatgtgccatataaagagcatgcgtctgaaagcggattgggaaatgtctatataggaaaagtggatcgtgatattgtttataattatatcatagaggatttgaaagaggcaattgaatatctgccttggatgggagaagaatcatatacggtagaacgcatgaataaaggttttgccaaaggactgctggcaaaggtagcgctatttgctggaggatggtctgtacgggatggaaatcagtttccggacttggatgtggaacatcatccgaccattccggaaatgaacggatatttcgtcggtcgccctaagaattggaaagattattatgagctggctgccaaacagtgtgcggagattttgggagcgactgataatcctcatgagcttgatcccagttatgagaatatttggtctactgtcaatcatctggaatacaacaagtataatgaaaacctgtttgaagttgcttttggtgaaggacagaatggagatgtgggggccacgatgggatacaacctgaacagaggggtttttaataccacccaaggtatgggaggggcaggatatgcggctactactgcttactatttttattcatttgatccggcagacacccgtcgggatgttacttgtgttttccaggaatatatcaatgagaatggaaaaaataaggaagttattcgctgtaatccattaggagtggcttgtggtaaatggcgttggtattggatgactgataattatatgaaagtccgtttcccgaaagctaattcacgtattgctactggtatcaactggattttgatgcggtattcagatatttacctgatgtttgcggaggctcaaaatgtattgacagggccggatgcagttagtccgattgccggtatgtctccccgacaggctttggaaaaggttcgtgaaagagcatttggtactggtgctcccgaaatcacgcagtatgacgcggatttcttcacggctattgtcaatgaacgggcatgggagtttggttgtgaatctattcgtcgtcaggatttgacacgttggggattgttggcggagaaaatagaagagatgaaaataggtctttgtatgttgtatgactacaagccggtgactattttcgggaagacttatcaagtggatgaaataccgagaaaaatctattataaatatgaagactctgataatccggaatacattgatatgtcgtctgttaacttcaatgaggatatgggaaccggtactgcttctacatcaaaaggacagtatgagtgcaactggatcagtatgcaggtgacattgaataaggatggtgatataaatgcaaccctgaatactaattatgtgaaaacaatggctagaatattggtttgcggtacagggctgaatgcgtcttacgactattcgaatttgtttggcaggctgaactggggcggtgaagccgaagcggagttccgtaaatattctgttggtaatggagtgtgtaattatcgccatgtattcgctatttattatgaggatgtcaataagacgcaagggtatgtttctaattcgtatggttataaataattaatggtaggaaaagatgaaaagactagttaatagattatccggagcatgcctgtatgtactattggctttgatagtgggtatgtcttcctgtgaggacgatgccaatgactggacagttaataagaactatgatgctttgttccgtccgttgacgttcgataagtcggctaccgatgcgacttcggttacattaagatattcgcagattgtgaatgcaaaagtctatatttttgagttttatacggacagcttggagtttaatgcggaaaattatgtaaggacagatacgattctgaaagatacattgactgtattttcagagagtaatacgcctatgagggtggaatatcgtactttgtttcaggagttcaacggttctacgcaatattctgttcgtatgaaaggagaagatgcgcagggaaaggcaagcacttatgtcagtgtagcatttaaaactccggatgagcaattatttaccggagtggaagttacagctaattccgcaaccttgacatgggaagaaacgaacagggtaactcatctgacgttggctcaaatggtggatacgaaatatggtgaggaaaaacagattgatttgacttcggaagatatagcggcttgttcaaaaacactctccgaattggagaatggagcgacctatcgtgttcggatttataataatgatgcattacgtggttcgtatgtattcaagacactgggattgggtggtagcgaaatcctttttgtggaggctacggaaaccggagtcattgatttaagtacattgttatctaattttgtgaaagagaaagaatgtagcaatgtaactgtccaacttactccgggggcggtgtataaggtaagtgaactaaagattccgggattggataatattttgtttaccagtacggaagctaatgaaaataatcgtccacagcttattgtgactaataaaatatcattggcttctccgatacagtctctgtcattcgagtttgtttgcctgaatggaaatggcgaggccagttatatgacggattggaaaaatagttcttatgcccagtctatttcattcacaggctgtgctatacagaacataaaacgtacgcttgtacgtattagcgatggaagtggtgtgttcatgacggatattacgatcgataactgtgtcatatccgaagttggtacggacggatatggaatgattaatttcggaaaaaatatcgatcagttggaaagggtttctataacgaatagtacattgattaatattggtgaccagttgatggacgtgaaagggggaatcggtgatgtgatattggaaaattgtactttctataattctatggatgctaagaaggaattgcctaaagttttccgtttcgataatgcggcaagtactccgccttctccgaaatctgcgacaatgcggaatttgattttctccggtccgaacaaaggaaagaaaatgaatagtggaaatggtgcttatgacattttgaacttctctgataattgttatatcacctccgacctgcaggaaggcaataacaggtttgaagaaataacgagaataaaacaaagctcggatgacttgttcgttgatccattaaacggtgatttccatattaaaccgggagccgggttcgccggaacgggtaatgctggtgatccacgttggtattaattgatcctataattgttaggtataaagaatatcatgaagaatattgtattatcaattttattgatgagtgcctgtgcaatgatttatgcacaggcggactcatcgccttatcaggctattgtagctgttgatggtagtggagattataaaacggttcaggaagcaatcaatgctgtacctgacggacagacgaaaccttggttgattctgataaagaatggcttgtataatgagcaggtgattatccctaagaataagccatacgtacatttaataggccaggataaggataagaccattattcatttaaacttgaatgttggtagtaaactgaccggtaaagaaataggtggaaaaacagcttattgggaacactcggttcataatccttcctctccagtttataaatacgagggatcggtagtggtggtaaaaggagaccacttttatacggaaaacatttcgtatgtgaatgactggggagttttatcagataatggtccgcaggctttggctatgaatagtcaggcagattgtgcttccttttataattgtaagttccgttcttttcaagatacttggatgactgccaataatgatgtcagtcggcactatgtgaaagattgctggatagaaggcgcggtagactatttttatggtggtggtgatgtgttgctggaaaactgtacgctttataatgtacggagtggagcagtaatagtggctccttcccataaagatgccaaatatggttatgcttttcgtaattgcattatagatggaaacagtgaagcggctgacggacgtttgaagttggggcgtccatggcataataattcgaagacggtgtatatcaataccatcatgcttatccctgtcgctgatgaaggatggacgaatatgggaacggttcccggaatttttgccgaatacaatagtcgtgatgcacagggtaatgtgttggatttaagtaaacgcaaaacggaatatcaatataaagaccgccaaaccggtaaggaagtatcgggtacctgtcaggcaactataacgaaagaggaggcggacaaatatacgtacgaaaatatgattccgggtaatgatggctggaatccgcgtattatgatggagaaattaggaagtccgcgcagtctggtttatcagcaaggcactcttaaatggaatcctgtgaaaaatgcgatcggatatattgtatatgatggagaacagattctcgggacgactactgatacctcttttccggtgtcggaaatgaattatgctttgaaggtatctgccgtgaatcaatatggaacgcaaggtaaaaaaggtgtattgtaattgaatatagaaaactggtaaggaaaggggaggtgcttatgaggcatctccctttctttctttatattctgtaggagtgactcccatgatttttttgaagcgcctgctaaagtacttcgggtcattgaaaccggtcatataagcaatttgggagaaactgtattcacttttttcaattagctgggcggctcgtttgatgcgcatttcacatacgaaatctaccggagtcagcccaacaatagattttaattttcggtagaataccgtacggcttaacattagtttgttggcgaagtcgtcgatggtgatatctgtattgtccatttgttcctccataaacgccattacttgttgcatgaattgttcatcgtatggagtcacttgaggttgtgaaggctcccacccatttatatgatcttcttcttgagtatgctctgacagtttcgataaatatagctcttgtaactgtttacgttgacggagcagcgacaaaattctggtttttaagtacgtagagctgaatggtttggtgatgtagtcatcgatgccttgttccagtcctgctatccgatcatctaaagaagattttgctgatagtaatataataggaatatggcaggtgttatgatcggctttgattgctttcaccatgtctaatccatccatgaccggcatcatgacatcactgattatcagatccggaatgtactgctgtgcatattttaatccttcttttccatttgctgcttcgagaacagtgtaagtctctgacaggatattccataggaaatgacgtaattcattgttgtcttcgacaataagaatggaagttttttcatcctctgtgtcggttttattttcattctctgcgtatgctgccttgaaggatgtattatccgaatcttcttcagtagcttgtatcgtcggtgaattattgtcactgtcggataaaataaattcggcttgttgatcgtctgcaaatgctttttcttccttaggaagtgtgacaatgaattcacttccacttcccggctcgcttttcacttggatatttccgtgatgtaattctattaattcgcgtaccagtgaaagcccaatgccggatgagggctgcaagatattgtattgtgccagtgtttcaaatcgataaaatagggattgttgcttttcgggagcaatgccaatgccttcatcggatacggagatggtgacttgctccgaacctgttatcatatttaccgttactttcttcccgttcggtgtatatttgaaggcatttgaaagtagattgaagaatatcttttcaaatttgtcacggtctacccatgcgtatattttgtctgtattagtttgaagttggaaatcaattctcttttcttttgctataaggtggaagctttccattatcttctgtaattgggaaacgagttctgtcttttctaccaacactttcatcttcttattttggattttgcggaaatccagtagttgattaaccagacgaagcatacgttctgtgtttttatgtaccaaatttagatgttcccgaactgtcggagagattgcttcatgcgctagaatttctgatacagggctggatattaaagttaaaggagtgcgtaattcatgtgaaatatcagtgaagaagcgtaatttgatattggataaatgttgttccaagtcaacctgatgccgcaaacggtagatatagaacagaatgtatacaatgatagtagtgaataacacgaacatgacaatatagaataaccatgcccagtatgtttcccaaaaagtgggtaaaacatgaatggggagagtgcgtatattatcggtccatactccgtcgctattgctggaacggatttgcagttgatattctccggcaggtaaatttatgtatgttgcagagcggttattaccggcttcgttccattcttcttccaggccttgcagacgataggcgtattcgatggcatcgggatttacataatcaatggctgcaaattgaaaggtgacattacgttccgaaggatttagttccagttcttttatgtcatcaagcgctacatgaagttgacttccttgtattttgagtccggtaaatacaataggaggtacataagaactttttttcatttgttctgtgttgatttcaagtatcccttgattggttccgagaacgattttcttttgactggttagtgtgggaactgcttcagtgaggttcagttctctctgaaagtaattacttccataattctcaaatgttccttgttgtggattgaatttggatatggagttttcggagattacccataattgtttttgagtatcttcgagcattgaaagtaccaaatcggaagctaatccgtctttgattgtataacttttgaattgtatatcttccgtgagcagatttttagagataacctggctgattcctccggtgaatgttattacataagtgttttttcgactgtcagtaaatatttgcatgacatcattactgctaaggctggaatctacgttagggatacggttgctatgatagaacttaatttcttctggctgatcgaacttattggagaatgtaagtaaaccattggttgtgccaatcaataacactccgttgggggcttctgcgatatgtcttattttgagtgaagtagaaacaggatagtttttcagccggttgccgctatgaataaagttggtagaaccatcaggtacgtgtgataataggttgagaccacctccataacatgcgatccatatattgtcatggctatcctgaataatactatagacactattgttacttaaactgtatgtatcttgtggctgatggacgaattgttgtaaaagataagagtgttcgtttttcttctttagaaggatgaggccgtcttttttggttcccatccatatatttccttgtttatcttccataaaacagtacacactttttccgaaagtaacctcttgaggggtgattataccctgtggagaaaggtagccttctaatgtcccatccggacggtaaattctgacgtttccctttttggaagcaacccagagacgtttctgtttgtcggcaagaaaagcacgtatttccaatccattgtctatggggcgtattttgtatttattgggatagaaagatattttgtctacgccccggtcattggtaatccatacattctgttgccggtcggtataataataacgaatagagggggcaaatagggaagcgggattgttttcatctgcaaagtatagtttcagttgattactgtcgcgatcataatagcacaaatgccctttttgaggactcatccatagtgtaccttcatggtcttcaaagatcatgtatcggttgtcgcgttcatattggatcaggttttgtataggagctgtgaagtgctgtttatctcctgtttgcagatttagctttatcacaccggaggtattggcaaagatccagacttctccggttttgtcctgataaaaaaaatgagcttcattggatggctgggtggctgtctgtatattaaaatgctggaattttttcttttctgtatcgtatgttataaatccgttgtcagttcctaagccgatcctgtcattagaaggggaaatggaagatatggaatagatatctgtgacagaacatggtagttcctggaattttatatttccgttcttgggatcatatattgcgatttttccggaagttgagataagatatattctcttattatattctttgaccattttgaacggataatcgctgttgattcgtttttttccgatgatggttactcccttatctgtcatgatccattcgtccccgtcggaatcttcgtaaatgtcgaatatcttgtttccttttaaattttggttgaaactgctgtataaaatgatatcttttccttctttgcaggtttgctcattgattctgaaagcataaccttgttcacaggtgatccacgtaattcctttatttaaggtatagatattgctgactatgttggtttgttgcagggatgattcaataggaaggagtatgtcaataaacttctctgtctgaatatcaaatagatatgcacggttatcataagatttgcaccatatatctccgtctttgctttctgtaatataagagaaacggttagtcgttaaagtacagccgtctcccggaaatgctttgtaatttttaaatgtgtatccgtcgaatttgtttagtccattccaggtggcgaaccaaagaaatccttttttgtcttgcattatattcactactactccttgcgaaagaccattattgacagagaagtgtttaatctggcaaagaggttgagctgctatagtcagactggtgtataagcataaaaggaaaacatagagtgtcttcatgatattataaattatgtgtagagcaaaaataaataaaactggattaaaaaggaaatttaaaatagtgattgaacataaaatgcacgcttttgcatatttaatccacctgtctatcctctatcaagcacaattattaccctataaagagagaagatacctcgtacttttgttttgacaattagaactagtaaaattttaaatgagaactataaatgaaacgtctatttatttgtgtagtgggacttgttatagccgtaaccgcatgggctcgtacctttaatatgaaggagcttggagctgatccccgaggtattgaatcttgtacggagttaataaaccaaacgattgaaaaagcatcttctgaaggtggaggaactatttatttcccggcaggtgtttatttgacagccactatctacatgaaaagtaatataactttgtatgtggagtccggagctgttcttcgtttttcagatcgttttgaagattatcttccttttgtgaagattcgttgggaaggtacagtgatgaatactttgtctcccctgatttatgcgcatgatgcggagaatttgactataaccgggcgtggaacgttggacggtaatggattcaaatggtggagctgggagaaagaaacacgggagctgattaaaaagaacggaggaaaattgcctgctttgaataaactacaacgaatgtgggaagaggctaatgaagaactggaaatttcggattattataaaccttctttagagcgtcgtatgtttcggcctccttttattcagttttatgaatgtaacaatgtgttgatagagaatgtgaaaattgtcaattctcctttttggaccataaatccggctttttgtgataatgtaacagtgcatggagtgacgatatataacccttcaaaagacccaaaaggtcccaatacggatggaataaacccttcttcttgccggaatgtgcgtatttctgattgttttattagtgtaggggatgattgtattacaattaaatcggggcgtgatgctgatggacggaaatatggaaaggcatgtgaaaatataacgataactaattgtgttatgctttccggtcatggaggggtagttattggtagtgaaatgtcaggcggtgtaaggagagtgacaatttctaattgtgttttcgatggtacggattccggtattcgcttgaaatcttctcgtgggagaggaggagttgttgaagagcttcgggtagataatatcgtcatgaagaatattcagcggaatgccttcatctttgatttgttctatgataaagaatcaaaagtggaacctgtcagtgaacggactcctgttttccggaacattcatttgagtaatatcacaggttctgatatcaagcaaattggttatattaaagggattgaagaaatgcctgtacaaggtttgtccttttcaaatattaatatgaaggcagaggttggatttatagttgatattgctgaagatattcgttttgataatgtggatttctcttcgcagactggttcaccgtggcaattcagtaagtgtaagcagattgttctgaataatgttagatcgaagtatcctgtaaaccaacacccgattgttacttttgaagatgtcgataatactattattaataattgttttcagatgactcctgtgaaggatttttataaagctaataacagtcatattattgaaggacataattattggaaaaaagagagttttaaataaacaggaactatcatattatttctgttgaattttattgttgggtagatatgagaagaacgatattacatcatctgtaatatcgttcttctattgattagagttgtttataatttacttcttatcgttttcgcgaatctccacccggcggatcttaccgctgattgttttaggtagctcttctacgaactcgatgacacgcggatatttataaggagcagtcactttcttcacgtggttctgtaattccttaatcagttcctctccggcacgtgctttatagtctttggatagaacaatcgtagcttttactacctggccgcgaatctcgtcgggtactccggtaatagcacattccacaacagccggatgagtcatcaacgcactttccacttcgaatgggccgatgcggtaaccggaactcttgattacgtcgtctgcacgaccgacaaaccaaaggtagccatcctcgtctttccaggcaacatcgccggtgtaataaataccatcgtgccaagcttcgtgagtgcgttccgcatcccggtagtattctttgaaaagtccgagaggtttacctttgctggtgcggattacaatttgtccttgctcacccgcttcaacagagcggccttcatggtcgatcaagtctacatcatattgaggattcggaagccccatgcttcccggtttcggttccatccaaggcatggtggcgatggtaagggttgtttctgtttgtccgaaaccttccatcagtttgatacccgtcagcttcttgaaagtttcaaatacagcggggttcaatgcttctccggcaatggtgcagtattttagtgaagataaatcaaactttgtcaggtcttcgtgaatcaagaaccggaagatggtaggaggcgcacagagagaagtgacatgatattcctggattttttccagaatagctgccggggtaaacttctcgtggtcgtagacgaagatattggctccggcaatccactgtccgtagagttttccccatactgcttttccccagccggtatcggcaatggtgaggtgaagactgttctcgtccagattgtgccaaaaactaccggtaacgatatgacctaacggataagtaaagtcatgtgccaccatcttaggttcgccggtagtgccggaagtaaaatacatcagagagatgtcgtcgttagtgttcgcatggcgcggacgcacaaacggagcagcattttcgataccctgatggaaatcttcgaagccttccgggatttccggaccgacactgactaacttttcaaccgtgggacattcgggaagagcctctttgatatgttgcaggatgattccttcaccggcagctacgatcattttgatgtcggcagcgttgcagcgatagataatatccttcttggtcagcaggtgagtagccggaatgacagttgctcctagtttgtgaagagcgatggtactataccagaactcataacggcgtttcagaatcagcatcaccatgtcgccacggccgatacccaggctctggaagtaagaagcggtcatgtccgtagatcgtttcatgtcggcaaatgagaattggcgactttcgcctttgtcatttgtccaaagtaaagcgttcttgtcaggttgttcggcagcccaggcgtctactacgtcatagccgaagttgaagttctccgggacgtttattttcaagtttttgataaaatcctcttgtgaactgaaagaggtctgtgataaaaatctttctaccatgatgttatggattatgtgaatgaagaatgaagaatgaaaaatgaagaatttttccatgcgtattatttatacagtgcaacataattcttcattcttcatttttcattcttcatttttttattattacataattactgccagaaaacgtactgttttgccatcgagcgctttcatgccatgtggaagtttagagttaaaatagatactgtcgccttggttgaggatgatttctttgccttcgatgttgataagcatacgtccttcgatgacaaggttgaattcttgtccgttatgttggttataatggattggttcgtcgtttgctttcggttcaacggtgacgatgaacggatcggcggtacggttcatgaatcctgaagccagtgattggtatttataagctttggtacgttcgatgctgactcctttgccggcacgggtcacgaagtaactgctcattttaggctcttcgccaaacatcagggcgtcgagagctatattatacgtgcgggctatcttttgtaacatgctgacagagatatcgtagtctccggtttctgcaagtcggtattcttcggcagagatgtcgctgtcgcgggcgatatcctctgcggtcagttccagtacatcacgtaatccgcggaggcgttctgcgatctgtttaatttgttcattcatacaagtggttcgtatttttatgattaataattctatggtattatttggaggctttcatggctttgatgatagcggaggtgaatccgttgtgttccagttcattgatccccttgattgtgattccgcccggagtggtgaccttgtcgatttctacgctggggtgggtgtcattgttctgaatcagtgcggctgctccttttaaggattgtgctatcatctgcatggcatctttgggacgaagtcccatttcgattccggcttgcatggctgcctgaacgtatttcaatacgtaagcgataccgcaggaggtcaatgcggtggctgccgctattttatcttcgggaataagcatcacggttcccatctcgctgaacaaccggaggatgaatttgtcttgttcatcgttcgtattgcgggcggcaacaagcgtcatactttccagttcgctgatagcggtgttcggaatcaggcggaacatggccatttccggtgctacgacataatgagccagttcttcaaaactgatgccggcagctacggagatgagtatctgtttgcttttcagtttcaattcgcgcatcaccggttccataaaccacggtttgacagcaaggatgacaatatctgcacctgtggcagcttccacattgctgttggtgatagagatacccggaaattcctttttcagtttctctagttttccggcactcggattggacacaatgatgtccgaatcgtctatcagacttccttttgccaggccacgggctattgaaccgcccatgtttcctgcaccgataatggctattttcatatacgcttatttttaatgagttgttaaaggcaaaggtaacagttaattacgaaaaaacaaaaagcagccggaataagaaataaatttctaataaaggctgcttttatcgttggctgtttattaatcaaatgagcgattagagtactttcttgaaccgggcaaggaagtcttctgcttcctccatactaagacagagaggaggtaacaggcgaagtacattcgtaccgcttgctccggtaaatacatgctcgtcatagatgaggcggctgcgtagttctttgatgggttcttcgaattcgagtccgatcatgagtccgcgtccgcgtacctcttttatttgcgggaatttcttcagttcttccagtaagtagttacctactacctttgcgttttctatcagattttcttgctcaatgacgtccatcacagcgagtgctgccgagcatgccagatggtttccgccaaaggtagttcccaattgaccatataccggtttaaacatcgggctgatcaggacacctgccatcgggaaaccgttgccgatacctttggctacagtgatgaggtccggcttgatgtcattatattgatgggcgaagaatttaccgctacgcccgtatccgctttgaatttcatcgagaatcaggatcgttcctgtttcgctgcaagctttgcggagttcctgcataaattcggtggtcggtaccttgataccgcctaccccttgtattccttcaatgataacagcgcatgtgtctcctttagataattcctgcttcatcgcttccatatcgttgagcgggagataggtgacatgaccgttattgttgataggggcgataatggaaggattgtgagtcgcttctaccgccagagacgtccgtccgtgaaatgccttattgaaagatacgattttggtacgtccgttatagaaggaagccagcttcaaagcgttttcgttcgcttcggctccactgttaatcaggaacaggctgtagtcttcgtaaccggaaatcttgcccagtcgttcggctacctcttgttggagcttgttgatgacggagtttgagtagaaaccaagtttagccacctggttacttatcattgctgtatagtgagggtgtgcatgtccgatagagataacggcatgacctccgtagagatccagatattccgttccgttctcatcccataccttgcaaccgtcgcccttgacaatgttgatgttatataaaggatatacgtcgaataatttcataataattaaatgaagaattaagaatgaagaatgaagaattaggttacttcatggttcatttgattatttttggcagttttgattgaagaaacaagcagagctatgagttctccacaatcaatctccatactattaaaagcattagaatcgatataatctgaatcttttaaaagattcaaccaatagtcggtttcattagcttcctttaatgatatacttagtttattaatgaagtcagcattgctttgggcaaattcggattctcgaattgaagctccaatagaagtgccggaacgaagaatttgtttgctgaggatgaactcttgtttcatttctcgaagatatttagtcatttgtacaattcgaagtgcaaatgaatagctttttgtattcaataatgaatttgttctattgtggcaattcttcattcttcgttcttcattcttcattaaaacgctgaaggcttcagacgtagtcctacggtttcttccagattgaacatcaggttcatgttatgaaccgcttgtccgctggcgcctttcagcaaattgtcgatacaagagataatcaatagtttgtcaccgtgtttctccagatgtatcaggcacttattagtattaacgacttgtttcaagtcaatattcttgtctacgatgtgtacaaaggagtcttttgcataatattcctcgtacatacgaacgatttcttccagcgctactttggttttgactaccatcgttgcaaagataccacgggcgaaatctccacggtatggaatgaagtcgatctccgcatcgaaactgttttgcagctgtttcagtgattgcttgatttccggaacatgctggtgctcgaatgctttgtacacactcatattgttgtttctccaactgaaatgactggtagcacccggtttcactccggctcccgtacttcctgtaatggcatttaccattacatcatccgtcagcatcagattcttggcaagcggaagcaaaccgagctggatgcaggttgcaaaacagccgggattggctacgtgctttgccgtacaagtagcgcggcggttcagttccggcaggccgtagataaagtcgtggtcgtcgctcataatgcggtagtccatcgagaggtcgataatcttcaggtcttccggtatgttgtgactttccatgaatttctttgtgtcgccgtgggcagtgcagaaaaagagaacgtcgatttcgtccagaggtaactggtcggtgaatcttagatctgtttctccatacaagccttcgtgtacgtcggtaattctgtttccggcattactgctgctgttgataaatacgatttcagtttccggatggttgagcagcagacggattaattcgcctgctgtatatcctgcgccaccaatgattcctgctttaatcatatctcttcgtctttgtggttattatagtaaacacgtagcggagtagaagtgactttgataaagcctttggcgtcttcggctgtccagcctttctgcatttcaccgtattctccgaatttagtcttcaccagatcatcttccgattctacacctacggtagagaaggagagaggacgaagctcgaggatagccgtaccgtttacgttacgctggctttcctgcaacatcgcttcgatgtcacgcatcaccggttcgaggtattggctttcgtggaggaacataccgtaccagttggctacttggtctttccagtattgctgccatttgctcaatgtatatttctcgaggaagcgatgggcgccgataatcaacatcggggcggctgcttcgaatcctacacggcctttgataccgataattgtatcacccacgtgcatatcacggccgataccgtatgctgcaccaatctcttccactttctggatggctttgatcgggtcgtcaaacttctcgtcgttgacagctttcagttcccctttttcgaaagtcaggcggagctgttcgctgccttctttttcaacatgtttgaggtaggctgtttccgggagtccttgcgcagagtcgaggatttcgccaccacagatagaagtaccccacaaacctacattgtaagagtatttcagtttggtgaagtccgcgctgaaaccatgtttgttcagataatcaatttcttcctgacggctcaatgccatgtcacgggtcaatgtgatgatttctacattgggagccagtacgaggaaagtcatgtcgaaacggatttggtcattgcctgctccggtagaaccgtgtgcgatggcatccgcaccgatttcgttggcataacgtgcgatggccaatgcctggaaaatacgttcggaactaacagaaataggataagtaccgttacgcagcacatttccgaaaaccatgtatttcaggctcttttcgtagtattcctgggtaacgtccagcgtcacgtatttcactgctcccagtttataagcgttttcttcgtttgttttcagttgttcttcgctgaaaccacccgtattggcacaagctgcatatacttcgtaacctttttctttggcgaggtacatgacggtgaacgatgtgtccagtccgccgctgaatgccaccactacttttttcttcttttcttccatagtgctgtatcttttaaatgttatttctttcttgttcttttttaatgttccgcggctctgtcggatcgtacagcatggctgtgcagatgcagaacttgcggtttttcgctaccagaatatcatggttgatacatccttcgcatcctttccagaaagcttcgtcgtctgtcagttcgttgaaggtgacaggcacataacccagttcggtgttcatcttcatgacagctgctccggaggtcagactgaatatttttgctttcggccatcggagacgtgccagttggaaagaagcttgtttaatacgttttgccagtcctaatccacggaaatcgggatgaacgatcagaccggaagtagccacgtattgcttgtttccccatgattcgatgtaggtgaatccggcaaaagtatcgccacaaagagcaataatcgccttaccttctttcatctttgtcgctacgtattcgtgtgtacgttccgcaattcctgttcctcgtacggcggcagcatttctgatagtttccaaaatagtgtcaacgtaaacctcatgtgaggcgtcggctaccataacatctatttgttgagtgtccatttctttattatataataataggtataattattcgatattgggaatgatgagtgacagaagctgacgtattttgctgatggcaactccttcacgcaacaccaacatgattgtatcgtcaccggcaatggttcccagtatttcactgaattcattgttgtcgatgtcatacgccatgctactcgcataaccgggacgggtgcggataacggcaatgttaccggaaaactgcaaagagataaatccgttgttacgtaacatttcaccggcactctggtcggtagaacgtttatacataatgttgttcggcagtacatatacgtacttcccgttcatactggcagccttggctactttcaattgtttcaagtcgcgggagagggtggcctgtgtcagttcgaagccttcgcggttcagctcttgcagcagttcttcctgcgaaccgacttccttgcttgagataatcattttgatggcgtctaaccgatttgctttcttcttcattgtataattattctaagaatggcgcaaaagtatgcattattttggagaaaagatgcataaaaccaaagtttttttgcataaaagtgaaaaatatgctaaacggtgagagcctgcttttttgttttgtgtcaaaatgtataccctttcaatcaaaatacataaggaaagggaggagggaatcgcctatctttgccatgtaggtaaatggataccttaaatatatagacagaataccatgaaacaaaacttttttgcagtcgacctgggcgcaacgagcggccgtacaatcttaggaactttcatcgaaggcggattaaatctggaagagattaatcgttttcctaaccacctgattgaagtgggtggacatttctattgggatatttatgcattatatcgtcatattattgacggattgaagttggtggctcatcgtggcgaatccattgcttctattggtattgatacctggggagtggattttgtatgcgtcggaaaagacggtaacctgcttcgtcagccatacgcgtaccgtgatcctcatacggtaggagcaccggaagctcttttctcccgtatttcgcgtagtgaagtctatggcaaaacgggtattcagattatgaattttaattcactttttcaattagatactttacgtcgcaatcacgacagcgcattggaggcggcagataaaattctgtttatgccggatgcattaagttatatgctgaccggagagatggtgacggaatatacgattgcttcgacagcgcagctggtaaatgctcaaacacgccgtttggaaccggagctgttgaaagcggtaggattgagtgaaaagaatttcggacgttttgtattccccggcgaaaaggtgggagtattgacggaagaagtgcaaaagattaccggactgggggcaattcctgtaattgcggtagccggtcatgataccggttctgctgttgctgccgttccggcattgggtcgcaactttgcttatttgagtagcggaacctggtcactgatgggggttgaaacggatgctccggtgattaatgccgaaacagaagcgttgaactttaccaatgaaggtggggtggaaggaaccatccgtctgttgaagaatatctgtggaatgtggttgttggaacgttgtcgtttgaattggggagatacaagctatcctgaattaatcaatgaggcggatgcttgcgaaccgttccgtagtctgattaatccggatgatgactgtttcgcgaatccggcggatatggaaaaagccattgctgaatattgccgggttaccggacaagcagttcccgagaagcgtggacaagtggtgcgttgtatttttgaaagtctggctttgcgttatcgtcagatattggagaatttacgttcgctttctccccgcccgattgatacattgcacgtaattggcggcggtagccggaatgatttgttgaaccagtttacagctaatgcgataggaattcctgtggtagccggtccgtctgaagcaacggctatcggtaatgtaatgattcaggcaatggcagcaggtgaagcaacggatgttgccggtatgcgccagttaatcaaccgctctatcccgttgaaaacttatcagccgcaagatacggaagcttgggacgcggcttatatccattttaagaattgcgttcgataatacattgaacaaccgacagaataatcatttatttaaactaatagaatatcatgaaaaaagaagaactgattcagaaagcgtatgagattgctgtggaa

SEQ ID NO: 8083 - DNA, 27268 bp, Unknown
  gut microbiota DNA sequence
gcaagtaacgcacccaaagtcaatcgtttcaattttctcataaccacctactcatgtaaattacaactattgatttaatttttattcaaattccaattctgacctaatacgcctctttatccccacggattacgttatacacagtcttatacatgatatacagatccaaaagaaacgtccaatgctcgatataccagatgtcacgttgcacacgtccttccatctgccaaagctctttcgtttctccacggaaacctgtcacctgtgcccagcctgtaatacccggtttaacaaaatgacgaaccatatatttatttatcaaatgagaatattcttctgtgtgcttcaacatgtgcggacggggacccactaaagacatatcccctttcagtacattaataaattgaggaagttcatccacattcgtcttgcgaatcagatcgcctattcgggttttacgaggatcatgttctgtagcctgaagtgtatcacttagagcattcacccgcatcgaacggaacttatagcaccagaattcacgaccatcttcaccgcttcgtttctgtttgaaaaggacaggtccgggagaacttatctttattgccagccccacaatgatatatataatcgggaaaagggtacaaaggaacagtagcgagcaaataatatcaaagccacgtttcacaatacgattttccaataactcaagtggctcacgacggatagaaagtaccggaacattacccagcatttcaaaatacattctccgtttcaaatagttccggacattgggaacactgaaaaaacgaatcagatggttctcacaatagttgataatcggcataatttcagtactacgggcggaaggaagactgcaataaagctgatctacctttcccgcattacgggtcaaataatcaacagcttcgcacggctgtcccaaataagctatattcataggatagcggtctgatggaaaatcttcaaaatatcctagtacacgatatccggatgtcggatcatccgtcatggaatgataaagttcctgcatattttcatggctacccaccagtactacctttcggacattttccccacttttacgataaagctccagaatataacgaaacgtcaggcgataagaaataataacgataatgagaactacataaaatgcccccagctgacgcaggttaacacattcaaaatggaatatgtacgaaaggcccagcaccatcaatacaaaaggaatcatgttccgtgccacccgaagcattatttgctccggacgaaccaccggacgatgaagaatcactccagaacgaatgttgcaaaccagataacataaagtcatcaaagccatattctggaaaagaggcatggaaaactcaaaaggagaacggtttccccaaagagaaccaaacacccacaacagtaagttcagtaagatgatgtcccctgaaaggacaaaagattttaggactttattaaaacgttggacttcctgcattactttattcttgatttagattttcatccatatcctcatttttctccctatactcaatataaagttctccccattctaccattttggctcgaaactcttcttttgtgagattgtcatagtaataggaaaaaagacgggtaaaatcacttagacgtaaatctccccagatgtcatcttgtaataagtgggttttcccatgtggatttctttacgcatagcctctattgacaagtgagcacgttcaaactgctctgcgataaaatggcccagtacgggatgattaaattttttcatgtttataattttattagttgttaaatacattgtattatatgttaattttatgcatatctgttcagacatgtctgaacgatatatttaaaagctatttctaccttcgcaccgcgttttgaaaattcaagacgataatcaaaaaatataaatgttatgacaaacgatttcagaatgtcttatttcatgcctcccattgctcccatcaaaaatgaactggggcggattgttactcctgcaacacttattccctcctgcgaagtctccgtagaacaagtttttcaaatgataacctgcaacgagaatctcaaaattctgaccgaacaagtacgcaattccggagatatacggacggcaaaagcatcactattgccatacgtgactccctgtggtacgttctcgcgtcgcaacagcaaatgtttcgtagcttcttcacatctggtggtggtagatatcgaccatctcgactcctatcaggaggcagtggaaatgcgcagtacattgtttaatgaccaccttctgcatcctgtactcacgtttatcagtcccagcggacggggtgtaaaagcattcgtaccctacgatcatttacccatggctaacgacacaaacagtatcatcgaaaatatgaagctggcaatgatgttcactgtgttgctctatggtactgaaacacctcctccattcggagaaaaacgcaaaggggtagacttttccggtaaggacattgtaaggtcttgttttcttagtcatgatccgggagcgttgtttagaaacaacaaataattagatattaaaaactataaattaaaattatggacgaaattgaatcgttatgccgcctctgtgaggcggttgaaactgcaggagcggatattgcccctacgtatgctgaatatgtacaactggcgttcgccatcgcaacggattgcggagaagcgggacgcgagtttttccatcggttgtgccgggtgtctgccaagtacgaacgggaacatgccgaacggatattctccaatgcacttactacccggcatggagatgtccatctgggcactgcattccatcttgctgaaagggcgggtgtaactctctgcaaagagggagtgatgaaccaccggaaaaatgcaaaaaatgcaggaaatgcaccgtcccaaaatctcacacacacgcatgtatataataaggtggacaatgaagaaccggacgaatccgaagaactgcaggacgggagtgacccgaaccagccattgccctctttcaccgaagcggactggccgaaaatcctgttgctcatcatgagttatgccaccagccccacacaacgcgatgtcatgctgctcggagcattgaccgccataggtgccagcatggagcgatatgtgagatgtccatacgccggcaaactccagtctccttgcctgcaaagttttattgtagccccttccgcctcgggtaagggaattctttcgttcatccggctgcttgtagagcctattcatgacgagatccgccaaaaagtagcggaagaggtcaaggcctacaaaaaagagaaagccgcctatgatactatgggaaaggagcgctgcaaagtggaagctcctcaaatgcccaagaataaaatgtttctcatctcgggcaataacaccggaacaggtattctgcaaaatatcatggatgccaacggcacaggacttatctgcgaaaccgaagcggataccatctccgctgctatcggttctgaatacggacactggagcgatacactccgcaaagcattcgaccacgaccgcctgtcgtacaaccggcgcaccgaccaggaataccgggaagtaaagaaaagctatctctccctcctgctttccggcacgcccgcacaagtaaaaccactcattccctcgacagagaacggtcttttctcgcgccagctgttttattatatgcacggtatatggacatggatcaaccagtttgaaagtggcgaaaccgatctggaagccatcttcacaggcataggcctggaatggaaaaagcaactggacctgatgaaagcacacgggcttcatacgctccggctcactgatgagcaaaagcaagagttcaatgccctctttgccgatctgtttttccgctcgggacttgccaacgataacgaaatgagcagttccatagcccgactggctgtcaatacatgccgtatcatggcagaaatagctatgattcgtgcattggaatgcgaccagccttatcagttcaagggttcttccacccctctgctgactcctgacaaggagattgccgccgataatatcaaagacggcattatcacccgttgggatgtgacaatcaccgctgaagatttccatgcggtgctggaacttgtaactccgctctatcgtcatgccacacatatcttatcttttcttccttccacagaggtcaaacatagagccaatgccgaccgggatgcactttttgaaataatgggcaaccagttcacccgcgcacagttgttggagcaggctgaaaagatgaaaatcaaacctaacactgctcttagctggctgaaccgtctgataaaaaaaggattgcttatcaatacagacgataaaggcgtttatacgcgtacgcatgtgtgcgtgtgttagggaaccctcggaaaaagtgcattttttgcatttatataacaacaggacgtttcatgaatcctaaagcggcgctttagaagtggtaaagcatagctttacgattgctaaagcggtgctttacttttccgctcttctaaggttctcccaaggcatctacaatcactctcacctccaacggggtgaatgagcggcgctttgattcgtaacctaagtcgtacaggcgttgcagaagtccgggacataaagagatccatttcttcatctttcgatatgcagcaatgtcagttagttccggagaataaagttgagccagttccatgcgaccgtaggcgcgtattttgaattcgttcatgatgaataagtttctgatttacaattacaaaaataacaaaacatattcacatatcctacgtttttccattgaataaccgaccgttactgcgcataattgacaacaatcgcgtgcaactgtagactattgatttctgcgggtttcagggttgtatctttgtatcgtcgaaagggaaaagaatcccccggacacaatgtttaaccctttaatttattgttttatgattcgttacaaaatttatcaaaaccaacagcaaaaaggcctgaatgcaggcaagtggttcgcccgtgcggtaagcgacgagacgtttgatttggctaagcttgccgaacacatgtcaaaacacaattcaccgtattccggtggtgtcatcaaaggtgtgctttccgacatggtagactgcatcaaggaactgctgctcgacggcaaatgtgtgaaaatcgacgaccttgccatctttggtgtgggcatccgcagtaaggcagctgatacgctggaagatttctcattggagaaaaacatcactggtatgcgtctgaaagcccgtgctaccggtaatttgtcaaccaccaacctgaaactcgacagccagttgaaacagcaggccgaatatcagaaaccaacaactgccggaggaggttctgattcgggtgatacccctgatccgaaaccggatggtggcggtgaagcgcctgatccggctgcttaatcctaaatcctttatttttaatctttaaaaaagtaacatcatgagtaattcatcttctccccgctccgtatggagcttcatcatcaaagtgattatcaccgttgccaccgctatcggaggtctgatcggagtacagagctgtatgtagccttatgcgtaccatcactctgattatcattcattgcagtgccacgccggaaggaaagtccctttcggcggaggcttgccgtcaagatcatatccttcaccggagattccgtgacatcggctatcatttctacatcacccgggatggagaaatctaccaaggccgtcctctggaaaaggtcggggcacactgccgtgaccataacacccattcgataggtatttgttacgaaggagggctggatatggcgggacgtcccaaagacacgcgtacattggcacaacgggcttctttgctcggtctgctccgcgaattgaggaaaatatttcctaagacgttgattgtaggccatcatgatttgaatccgatgaaggagtgtccgtgttttaattgtacggaggagtaccgagaattagatggtattatctaagtatattgaccagcaaactggcaatagataccagaatggaaaatcccgaaacccacatcgtcgtacttgttccgatgtctgcgctctgcgctttggttttattaggagtgacatacaggatgtcattctgttgcaactgatagtaaggagataataacaaatccgcgtcgttcagattgagtgtaacaaactgtttatgcccattcctgtcttcgcggattagttttacattatcacgaacaccataaatagtcaaatctcctgccatggcaagggcctcgagcacattgatctgctcattcactaccggataaacaccgggagaggccacttcgcccaaaacggaaactttaaaaccggacatacggactactaccgtaggtctttctttcacgtaagatttcagtctatccgttatcaggttttcagcttcacgacttgttaaaccgttcaaaggaagtttacctaaaaccggataattgatatttccctgatcgtccaatagaaacgtactgccttgcgcattgaaaggctgcgaaacaaccggatcggaagtggaaacaagaatggaaacttcatcacccggtatcagtcttgcgtcctgaacaggcgcaacttgcgtattcgcctgtttcaaaatctccgcatcctgcaagtaaggcactttcttataggactggcaagccgagagaaagaagaaaaagaatatcagtgcaaaagcaccggataatttcgtattcatgtaaatggtggataaatgatgacgggattagtttttctcgcagatagcctcgacataaccaataggcatattaacgcaagcgcatcccagcatattcagccggacggcaatcttgcttttgccatcgacattgaccagttcaccaaccagcccggtcagaggtcctttcacaacacggaccttctcaccacgtgccaaaggagagctgttcatacaaatagcttcctcggaatagtcgagcatgaaacggaaacgagccatctgctcatctggaatcaccgccggagagctctcaccacgcatcaccatataacggctcactgtagaaaaacccagaacttctttgcgttctttcggatttacgtgcacaaacaccatcattggaagaaggacagactcaactaccttgcgccggtcactccactgatgaatttcttgttggacagggacgaaattctcgatccccattttgtctaaacgttcggctaccttcttctcgtggtgcatacgaaccagagcaacataccagcgtttagagtgtgctacgccttcccctgtcccatcgctaggcccagcactaagtgattttggttttgttaaaatcatgtttttttaccccatgttattccgttacttcttaggtaacggacaatacacacacaaggcgcgcgtctctataaaaatggaaatcacatataggaatagggcacaagaaaggaactgcctaatactcaacaggaaaaatccagagattaggcaataaaaagtttagaacatgaaaataaagttatttcatgttcggatagtttttttcctatatttcagataaaacgaaaaaaagtggaagaatatttgcttactatttatgtttttgtctatctttgcgtcaaatttaagttccgttacctaagaagtaacacacatactttagttctgaatactaatactttgcacttttcaccctgcctacacaacagtttttaatgtaagataaattccctttatttacctctgtacgttctttaagtccaaagcctttcaaatagatttgtgtggtttttatagatttatggcccaatgattcactaatcatttcaataggtactccccgatacttcgctgtcgttgcccaagaatggcgaagtgtataggaagtgactggagattgcaaatgcaaggctcttgccaagtccttcaaacaattattgaattggcgaagagcggactgatattcccggtaccctctttcatccagacgtttttgatcgccgctaaggatgtcaaacagataatccggacaatcgggttgtgcatcttccctattgcgaagctggttaatcatttctctggctgtatcaagtacttccacactcatcggggttttagttttgatacggttgtatcgcaacacattctgttctaaagctgatttctccaggtgagccagatcagcgaacgacattccacaaaactggaacatcagggcagcaatagcctgtgtacgacgcaaacgctccgacttggggtcctcatacagaagcttatgcaattcgacagcaggcagggccttcttctggcgaacatcgacaccggtataaacatcatgaaacagtcgcggcacataaggcgcaatgcccgcttctactccccggttataaatactacgaagcatacgcatatacgtagagatcgtgttgggtttcaagccacactcgtaaagatactgcccgtagcgtcgtaaactttcccgggtgacttgtctgaacgacacattgagcgtgccgcaaaacttgctgaaagagaagagggcattcttgtagacatgcgccgtagaatagcgtccctcctttcgcaaacggccgatgtagaactctgcacatcggctaaatccatttttgttcctcattacatcactagttattttatatattatgccatttggcaagcggcaaaagaacgaatctttttgtgtgttccagataaactttttaataaatatagttaaagagttttttgccgtttttattctattagtaataaaaaaagtcatccggctttgcccatcatgaggatgaaacaaagtcggatgaccttcattttgtacgctattatcttatacgtatgtttccagcaatttcacacttcctccttcgggagtgatagtgacatcttgcgtggtagcaggcaacaggatagattctcctgcactaacagtcagttcattaccttcattgtctctcattgtacatgatccttccatacagataaagatcacgaatgaatcgagttcggaatagtcacaactgatttcttcagtcatgtcatacagagaagtcgtgaagtaagtgcaggcaaccagttctaccggttcgtccttcaacggttcgtatttagtacgatagtcatccaatacttcgtagttgatggcttcacgggctaaatcggtgtgaagttcgcgggttttaccattcgcatctttacggttgaaatcgtagatacgataagttatatcagaagtttgctgaatctcggcgatgaaagaacctgccccgatgctgtgcacacgtccggcaggaaggaagaatacatcacccggatgaatttcatattcctgcaatacgtcggtaatcgtattgttcaacacgcgttctttatattctttcggggtaatctgttcagagaatcctgaacgcaatttagctcctttgtcggcatctaccacataccacatctcggtttttcccatcgaattgtggcgtttcttcgccaactcatctgttgggtgtacctggattgacaaatcctgtttggcgtcgatgaacttaatgagcagtgggaatttattgccgaaacgggcataattcgcttcaccaaccagttcctcacgatactttcttaccatatcggccaaggttaaacctttatccgggccattagccactacggattcattgttctcaacaccggaaatctcccagctttctcctactcctttcaagtctgaattcaaatgcttgaacggaataattttgtcgcccccccaaagcgtctgcttcagaataggttcgaattttaatggatacatttttgtttttcttgttataaacttagattaaattcgctcggattgttacaatccgggaacaaacatacaaaaaatagttcagtttttaagaaaaggaggatgaaaattcatttaagaaatcatcttttgtccttgcatccaaagaagatgaagtaataaagctaaactttcctaaagcacctgtcatatttagtcggaataatttgtgagtaagaaagaatttccctttatttgcaggaaatttttaataataccagacatgaataacacattcccaacagaagggaatctatcagggctcagccggaaagatttccaaaaggatataaatgataagaaaactgatttatttatcctcaaaaacacaaagggaatggaagtagctgtaaccaattacggatgcgccattctttctatcatggtaccggacaaaaacggtaagtatgctaatgtaatcctcggacacgacagcatcgaccacgtcatcaacagcccggaacctttcctaagcactactatcggacgctacggcaaccgtatcgcgaaaggaaaattcaccttgttcggcgaagaacatgaactcacgattaacaacggacctaactctctgcatggtggacctaccggtttccacgcccgtgtttgggatgctgtccagattgatgagagcacagtgcaattcaactatgtttctgctgacggtgaagagggattccccggcaatctggaagtggaaatgacttaccgcctggaaaatgaagtaaatgcactgactatcgaataccgcgctaccaccgacaaagctacagtcgttaacttgactaaccacggtttcttcaacctcgccggtatttccaaccctactcctaccgttaacaaccacatcgttacgatcaacgctgatttctatacgcctatcgacgaagtttccatccctaccggtgaaattgccaaagtagagggtactccgatggatttccgtgctccacacactgtaggcgaacgtatcgacgacaaattccagcaactgattttcggtgcaggatatgaccactgttatgtactgaacaagatggaaagcggttcgctcgacctggctgccacttgcaaggatccggaaagcggacgtatcatggaagtatataccaccgaagcgggtgtacaactctatacgggcaactggctcaacggatttgaaggtgcacacggagctacattccctgccagaagcgctatctgctttgaagcacagtgtttcccggatactccgaacaaaccgcatttcccatcggccactttgctgccgggtgatgaataccaacagatcactgtctacaaatttacggtagaagaataagacttgaaaaataactaacctaattttataaactaacattttttttgaaccatgacacaagaaaaaaagaacggtaatctcgtcgcaattatcacgatgttcttcatctttgcgatgatctctttcgtaacaaacctcgctgctccattcggaacaatctggagaaatgaatatgcgggttcgaacactttaggtatgatgggaaatatgatgaacttcctggcttacctgtttatgggaattcctgccggtaacatgctcgttaagatcggttacaagaagactgctttgattgcaatggcagtaggtttcctcggtttgttcacacagtatctttccagcttattcggagcaggtgctgaagtattcgcattcggtgagtatgttatcaaattaaactttgtaatctatctgcttggtgcatttatctgcggtttctgcgtttgtatgcttaacacagtggtaaacccgatgttgaaccttctcggtggcggtggtaacaaaggtaaccagttgattcagactggtggagctcttaattctttgtctggtacattgactccgcttttcgtaggtgctttgatcggtactgttacttcaagtactgctatgtctgacgttgctcctctgctcttcgttgctatgggtgtattcgttgctgcatttatcgttatctcatttgttgctattcctgaaccacaccttcagaaaggtggagtgaagaaagaaaaattctctcacagtccatggagcttccgtcacactttactgggtgtaatcggtatctttatttatgtaggtattgaaattggtatcccgggtacactgaacttctatcttgccgattcaagcgataaaggtgccggtatcatgatgaacggtgctgctatcggtggtgctatcgctgctatctattggttgctgatgcttgtgggacgtactgcaagtagtgctatcagtggtaaggtttccagccgtgcacagttgatcgctgtttctgctactgctatcattttcgtattgatcgctatcttcactccgaaagatgtaacggtttcaatgccgggttatactgtaggtgaaggctttatgatggcacaggttcctgtaagtgccttgttccttgtactttgcggtctttgtacttctgtaatgtggggtggtatcttcaaccttgcagtagaaggcttaggaaaatatacagcacaggcttccggtatctttatgatgatggttgttggtggtggtgtattgccgttgatccaacaaagtatctctgactctgtaggttatatggctagctactggttgattatcgctgctctggcttacctgttgttctacggtttggtaggttgcaagaatgtaaataaggatattcctgtggaataatcacatagaatagaatagaattcaatttattcacctttaaaatataaatatcatggatacagaatacgtaagaagtcgattcattaaacactttgacggaactactggatttttatatgcttctccgggccgtatcaacctgatcggtgaacacactgactacaacggtggattcgtttttccgggagcggtagacaaagggatgattgctgaaatcaaacctaacggtactgacaaagtaaaggcttactctatcgacttgaaggattatgtagaatttggtttgaatgaagaagatgctccacgcgccagctgggcaagatatattttcggtgtatgccgtgaaatgattaaacgtggcgttgatgtgaagggattcaatactgctttcgcaggtgatgtgcctctgggtgcaggtatgtcttcttctgctgctttggaaagtacgtatgctttcgcactgaacgaactgtttggtgaaaacaagatagataagttcgaattggctaaagttggccaggctacagaacataactattgtggtgtgaactgcggtattatggaccagtttgcttccgtattcggtaaagcaggtagtttgatccgtctggattgccgttcactggagtatcagtatttcccattccatccggaaggttatcgtctggttctgatggattcagtggttaagcacgaattggcttcttctgcttataacaagcgtcgccaaagctgtgaagctgctgttgccgctatccagaaaaaacatccgcacgtagaattcctgcgcgactgtacaatggctatgctagaagaagcgaaagctgatatcagcgctgaagactatatgcgtgcagaatatgtaatcgaagaaatccaacgtgtactcgatgtttgcgaggcattggaaaaggatgattacgaaactgtaggtaagaagatgtacgaaactcatcacggcatgagcaagttgtacgaagtaagctgcgaagaactcgacttcctgaatgactgcgctaaagagtacggtgtaaccggttcacgcgttatgggtggcggcttcggtggttgtactatcaaccttgttaaggatgagttgtacgataacttcgttgaaaaaacaaaagctgctttcaaagctaaattcggcagaagcccgaaagtgtatgacgtagtaatcggtgacggttctcgtagactggaataagaatttattcgttattaaataattaagaagggcggcttccgtgatgggagccgcccttactttttacaattaacaaaaatctaaaatctattaatctaataacatctaattagttctacttatttcttcgtaaatttatatactgcaaacgtagtgggttccaattcggtagtaaacacattgccttcaatagataccggagtttcctgcggaacgatggcaaaaggttgttcaagtgtattatccttatccaaatcaagcgaacgaagtttgatacaacgaccattagacagtacatcttgtttcttcaatccttcaaaattcaaggaaatcggttgagctgtggcggaggtattggcaacctttacaatcagttcattcttatccttatcgtaaacagcactggcaaagagtccgttctgtccttcggctcccgttacatttttcttgttcatggtaaggggaagtacatttgttcctttgttttgcgcatacagttgttgtacataatagctagtggtacgcacagagttcaggttatcgaaccaaatcatatcaggacgccattgccatccttccacatgagcgaaaagcggagcataggtagccatgtgaacgatgtcagcattacgttccaatccggtcatgaaagcagcttcgagcaaagcagcatgataatggttccatttctttccttttccatggcaggcatattcgccggcaaagactttcggacctttacgatcgtagttgtcatagcgggcaccttgtgccaggaaccaactttcgggacgatagaaatgttcgtccaccaaatcggctttcagacgtttcatttcaggccacaagtaatcaaattcttttccttcggaattcggaccggagctacctactattttaatctccgggtgagctttacgaatggctttgataaacggttcgagacgttcgggatattcttttccccattgttcgttaccgataccgataaacttcaggttaaacggagcaggatgtcccatatcggcacgtacctttccccatttggtattcacgtctccattagcaaactcaatcaggtcgagtgcatcctgaatatagttatccaaatcacaaacggctacgtgagctttcggatcattattctgatattggcaggaaagtccgcaattcagaatcggcagaggtgccgcacccatttcttcagacagcaggaaatattcgtagaatcccaatccatagctttgataataatcagggaagaatcggtgagtaaaagtatactgccaacgattttcatttaagggacggttctctaccgggccaactgattttttccagtcgtaacgagtctccaggtcggtaccttctacaatgcaaccaccgggaaagcggaagactccaggatgaatatccgccaatgcttgtgccaaatctttacgaagaccattttcgtgtcccttccaagtatcaaccgggaaaagagagatatgctccagatctactgttcctttggaagtaagaaaaatacgaagtacggatttcggatgagtactgccgggcttcaagattatctggtattttttccagtccttagaatcaatcgtaagattccctgcaacaagtgcctggcgttcgcccattgattgggtatctacaagttcgatcctcaatgtttctttcgtacttccttgcggcaaacgcgcccaaacggagaagcgatattcctcccccttcttgacaccgataccgaagaaaccttcgttatccaatccggtatgcttatgtgcatgtccggggttagaaagacgtacgtaatgtggattgcgttcaaaagggccatcattcattaaggatacttttccgtacgttttccatcccatcaggtgttgtggaaattcaaaggaacgattcttcaccagttcggcataaagtccgccgtcggcagcatagttgatgtcctcaaaaaagagtccgtacatagtaggttggatttctgcacccagcttcttcgtctgtatcaccaactcattagtttgcgcatgaagcgcaaggttagtagacaaggctaatactgccaataaatttgcgtatcttctcatggttctcaataaaaaattatatatagttaaaatgcaaagataatcagattctctattttccccgtacccgattttatcattaacaggtgtatatcggtcaaaaaggatcaaattccattcatttgcacaattttccatccgtatctgatatttataatacgaaaccagatcaaaaaacacctattaacccgctctattatatgaaaaataaacggatggaaagcgtacatttatatatttaataaggtgtatgggaaatcataaaatataccgtttatgctgcataacatacaagagtgtatttgacacaccaaacaaaagtgttacttttacacccaaaataagataaatatctcatttacattaaaaataaaaccatgaaaaaacattttctacttgcaggatttgccgcgctgatgctggctgcgtgcaataacaagccggcttccgagctgaccttgtccggtctcgacccggtaaaatttcaaacagaagtgaacaatgcccaaacagctctttataccttaaagaacaaggcaggtatggaagtatgcatcactaacttcggaggacgtatcgtgtctgtcatggtacccgataagaacggtaagatgcaggatgtagttttaggttttgacagcattgctgactatattaatgtacccagcgacttcggtgcttctatcggacgctatgcaaaccgtatcaaccaaggacgtttcgcattggacggtgacacgatccaactgccgcaaaacaatttcggccactgcctgcacggaggtccgaaaggttggcaatacaaagtttatgaagctaatctgattgatccgacaacgctggaactgacacttgtctcaccggacggagacgaaaacttctcgggtaatgtgacagctaaagtgacttacaaactgactgaagacaacgctatcgacatcaaatatagcgcaactaccgataaaaagacgatcatcaatatgaccaaccactcttacttcaacctggctggcgatccgtcaaaagcttcaaccgacaatatattgtatgtgaacgcagactactataccccggtagacagcacctttatgactacaggcgaaatcgctccggtgaaagacactccgatggacttcaccactccgaaagctataggcaaagagatcgacaactacgatttcgttcaactgaagaacggaaaaggatatgaccacaactgggtactcaacacaaagggagatctttcgcaagttgccgcaaaactcacctcacctgaaagcggtattactctggaagtatataccaacgaaccgggtgtacaggtttacacaggaaacttcctcgacggaaccgtaaccggaaagaaaggcatcgtttacaaccaacgtgcttctgtgtgtctggagacacaacattatcctgacagccctaacaaggcagactggccttctgttgtactggaaccgggacaaacttataatagtgaatgtattttcaaattctctgtagagaaataatattaactcataaatcatatttattgtggaagcattagattggctagtaatcggagtcttttttctggctctgatcggtattattgtttgggtagtcagacaaaaacaaaatgactcggcagattatttcttgggcggacgcgacgcaacatggcttgcgatcggtgcctctattttcgcatccaacatcggttcggaacacttgatcggactggcaggagccggtgcatccagtggtatggctatggcacactgggaaattcagggatggatgatcttgattctgggatgggtgtttgtacccttctacacacgaagcatggtatatacaatgccggaatttttggaacgccgctataatcctcaatcacgtaccatcctgtcggtcatctctttggtaagttatgtgttaaccaaagtagctgtgactgtatatgctggtggtcttgtattccaacaagtattcggtatcaaagagctttggggaattgatttcttctggattgcagctatcggtctggtagtgttaactgcactttatacgatcttcggtggtatgaaatcagttctttacacttctgttcttcaaacccctatcctactgctaggatcattaataattctggtactcggcttcaaagaattaggcggatgggacgaaatgatgagagtctgtggggctgtaaccgtaaatgattatggtgattcaatgaccaacctgattcgtagcaatgatgatgcaaacttcccttggttgggcgctttgatcggttcggctattatcggtttctggtattggtgtaccgaccagttcatcgttcaacgtgtactttcaggtaaaaatgaaatggaagctcgtcgtggtactattttcggtgcttatctgaaactgttgcctgtattccttttcttgattcctggtatgatcgcatttgcattacatcaaaaatatatcggcgccggtggcgaaggtttcttgccgatgctggctaacggaacagcaaatgccgatgccgctttcccgacattagtagccaaattacttcctgccggtgtgaaaggtctggtagtatgtggtattcttgctgccttgatgagttctcttgcatctctgtttaactcatcggccatgctgtttactatcgacttctacaaacgtttcagaccggaaactccggagaagaaactggtaggtatcggtcaggttgcaacggttgtaatcgttattttaggtattctctggattccaatcatgcgtagtgtaggcgatgtactttatacttacttacaggacgttcaatccgtactggctccaggtattgctgccgctttcttactgggtatttgttggaaacgtacttccgcccagggtggtatgtggggattgatcgccggtatggtaatcggtttaactcgcctcggtgcaaaagtatattatagcaatgcaggtgaagtagcagattctacattcaaatatttgttctatgatatgaactggttattcttctgtggatggatgttcttgttctgcattattgtagtaatcgtagtcagcctggcaaccaaagctccgactgcagaaaagattcagggactggtattcggtacagctaccaaagaacaaaaagctgctacacgtgcaagctggaatcactgggatattattcatactgtaattattctggctattacaggtgctttctactggtatttctggtaaaaaataagcccttccttcaaccttctctttgggaaaggttgaaggaacctaaaaatagtcttgccaacggaaagactggtttattataactaaaatcacaatctaatggataaagataattcacaagagtcaatgataagctcaaactccccctcctttggaaagagccggggggaggcttattatagctcgaatcccaccttttatgtcggcatcgactgtatcatctttggtttcaacgaaggggaaatcagcttgctattgttaaagagaaacttcgagccggcaatgggtgaatggtcactgatgggaggatttgtgcaaaacaatgaaagtgtggatgatgccgccaaacgtgtattgcatgagcttaccggactggaaaacgtatacatggaacaggtaggaactttcggagctatcgaccgtgatccgggtgaacgggttatctccgtggcatactatgcattgattaacatcaatgagtatgaccggaaactggttcagaagcacaatgcttactgggtgaatatgaacgaacttcccccgcttatcttcgaccatcctgaaatggtagaaaaagcacgggaactgatgaaacagaaagcatccgtagaacctatcggattcaatctgcttccgaaactctttacattatcccaattacaaagtttatatgaggccatttacggtgaaacaatggataaacggaacttccgtaaaagagtggctgaaatggattatatagaaaagactgataaaattgataaactgggttccaaacggggagctgccttgtataagttcaacggcaaggcttaccgcaaagacccgaaatttaaaatataatcattatgctggaagaactaaaagaaaaagtatttcatgccaatcttgaattggtaaagcatggattagtcatctttacctggggcaatgtctctgctatcgaccgtgaaagcggattggtagtaatcaaacccagtggtgtaagttatgatgatatgaaggccgaagatatggtagtagtggatctggatggcaaggtcgttgaaggacgactgaagccatcctcggatactcctactcacgtagtactttacaaagcatttccggagattggcggagtggtacacacccactctacttatgcgactgcctgggcacaggcgggatgcgacattccgaacatcggaacgactcacgcggattatttccatgatgccattccctgcacggcagatatgacggaagcggaagtgaaaggtgcttacgagctggaaaccggtaatgtgatagtgaaacgttttgaaggcttgaaccctgtacatacaccgggagtattggtgaaaaatcatggtcctttctcttggggaaaagacgcgtatgatgccgtacacaatgctgtggttatggaacaggtagctaaaatggcaagtatcgcttatgcggtaaacccgaatttaacaatgaacccgctgctggtagaaaaacatttcagccgcaagcatggtccgaatgcttattatggacagtaacaataaaaaaaacaaatattaaaaattaaagcaataacattatgaataacgtatttgatcaatatgaagtatggttcgtaacaggagcacagcttctgtacggaggtgacgcagtaatcgcagtagacgcacactctaatgaaatggtaaacggactgaatgaatccggtaaacttcctgttaaggtggtatacaaaggtactgccaactcttctaaagaagtggaaactgtattcaaagctgccaataacgatgaaaaatgcatcggtgtaattacttggatgcatactttctctcctgctaagatgtggattcatggtctgcaacagttgaagaaaccgttgctgcacctgcacacacagttcaacaaggaaattccttgggatacaatggacatggacttcatgaacctgaaccaatcagctcacggtgaccgcgaattcggacatatctgtacccgtatgcgtatccgccgtaaagtagtggtaggttactggaaagaggaagacactttgcacaagatcgctgtctggatgcgtgtttgtgccggttgggcagattcacaggatatgctgattatccgtttcggcgaccagatgaacaatgtagctgtaaccgacggtgataaagtggaagctgaacaacgtatgggttaccacgtagattattgtccggtaagcgaattgatggaataccacaaagaaatcaagaatgaagatgtagatgcattggtagctacttatttcaaagaatacgatcacgatgcttctttggaagacaaatcgactgaagcttatcagaaagtatggaatgccgctaaagcagaacttgccatgcgtgctatcctgaaagctaaaggcgctaaaggatttacgaccaacttcgacgatttgggcgacatcgaatacaatggtttcgatcagatcccgggtcttgcttcacaacgtctgatggcggaaggttacggattcggtgctgaaggtgactggaaatcggctgctctttaccgtacagtatgggtaatgaatcagggacttcccagaggttgttcattcctggaagactacacactgaacttcgacggtgccaacagctctatcctgcagtcacacatgttggaaatctgcccgcttatcgcagccaacaaaccgcgcctggaagtacacttcctcggtataggtatccgcaagagccagacagcaagattggtatttacttcaaagacaggcgcaggatgcactgctacagtagtagatatgggtaaccgcttccgtctgattgtgaacgatgtggaatgtatcgaaccgaaaccgctgcctaagttgccggttgcttctgctctctggattccgatgcctaacctcgaagtgggtgcaggtgcatggatcctggctggtggaactcaccattcttgcttctcttacgacctgacagcagaatattgggaagattacgctgaaatcgcaggtatcgaaatggtacatatcaacaaggatactacgatcagctgcttcaaaaaagaactgcgcatgaacgaagtgtattacatgttgaataaagcgctttgctaaaaagccgatctctcaagtttcgcaagagcttaatccaattattaagcacctgcgaaacttgattttttctatcattatcgttataccttaaaatattgatttcaacatgaaattagatgcaaaatcaaccatcgaagcaggcaaagccattcttggtatagaactggggtcaacacgaattaaagcagttttgattgaccaagaaaacaagcctattgctcaaggtagccacacttgggaaaaccagttagttgacggactttggacttataatattgaagctatctggtcgggactgcaagattgctatgctgaccttcgcgctaacgtaaagaacttatacggcgtagagattgagacgctggctgctatcggtgtcagcgccatgatgcatggttatatgccgttcaataaaaaagaagaaatcctcgtgcctttccgcacctggagaaatacgaatacaggtcgggcagcagcagccttatcagaactgtttgtctacaacattccgctgcgatggagcatttctcatttgtaccaggctatcctggacaatgaagcgcatgtgaatgacattgatttcctgactactctggcaggttatgtgcattggcagataactggcgaaaaggtattgggtatcggtgacgcatcgggtatgctccctatcgatccgacaacccacaactattcagctgaaatggtggctaagttcgataaactgattgctccgaaagaatatagctggaaactggaagatattctgcctaaagtattgtcggcaggtgaaaatgctggtgtcctcactccggaaggaagtaaaaagctcgatgtatcgggtcatttgaaggcaggaataccggtttgtccgccggaaggagacgcaggtaccggaatggtggcaaccaatgcagtcaaacaacgcaccggaaatgtatcggcaggtacttcttcattctctatgatcgtattggagaaagatttgtcgaagccatacgaaatgattgacatggtgaccactcctgacggaagtctggtagccatggtgcattgcaacaactgtacttctgatctcaacgcatgggtcaacctgttcaaggaatatcaggagcttctgggcatacctgtaaatatggatgaaatctatagcaaactttacaatattgcactcaccggtgataccgattgcggaggtttgctttcatacaattatatttcaggcgaacctgtaactggatttgctgacggaagaccgttgtttgtacgttcggcaaatgacaaattcaacctggcaaactttatgcggactcacctatatgcttcagtaggagtactcaagattggcaacgatatcctgttcaacgaagaaaaaatcaaagtggacagaattactggtcacggaggattattcagaaccaaaggagtaggtcaaagaatacttgctgcagctatcaactcgcctatttctgtgatggaaacagccggcgaaggtggtgcctggggtattgccctgttaggttcttacctcgtgaacaatgaaaagaaacaatctcttgccgattttctggatgaaagcgtatttgtcggtgacgcgggtatcgaggtatcacctacacccgaagatgtagccggcttcaatacatacatcgaaaactataaggcaggattgcctatcgaagaggcagcagtcaaatttaaataattgacagtcggcaatccattgttgttcatcagagattgccgataaatcgctgtttatcaagagtcaattctaactaagtacaaacattaattatctccacccctctcctcttttggagagggagatggggagactattatcatgaaaaccacctcgttcatacttgcacttgtgctgtccatctcactgggcaaagctcaaaacgccccacaagtgtcttacttccctttacagaatgtgaaactattggatagtccgtttctgcaagctcaacagactgatttacattacatacttgcattagaccccgaccgtctgctcgctccttttctccgcgaagcagggttacagcctaaagcccccagctacaccaattgggaaaataccggattggacggacatatcggcggacattatttatccgcactttccatgatgtatgccgccaccggagataccgcagtctataatcgcctcaactacatgctgaatgagttgaaccgggcacaacaaactgtcggcacaggattcatcggaggaactccgggaagccttcaactttggaaagatataaaagcaggaaagatccgtgccggaggtttcgaccttaacggcaaatgggtgcctctatacaacatacataagacttacgccggattgcgggatgcatatctctatgcaggaagcgaccttgcacgccaaatgcttatcgcttttacagattggatgatcgatatcacttccggcttgagcgacgaacaaatgcaggatatgcttcgtagcgaacatggcggattaaacgaaacgttcgctgacgtggccgaaatcacaggcgacaagaagtatctggaactggcacgccgtttctctcacaagcttatcttagacccgcttatcaaagaggaagacaaattgacgggaatgcacgccaacacacagattccaaaagtgatcggctacaagcgaatagccgaagtgtcacaagacgacaagacttggaatcatgctgcagaatgggatcatgccgcccgttttttctggaacacggtagtcaatcaccgttctgtctgcatcggaggaaatagcgtccgcgaacatttccatccgtcggataacttcacgtccatgctaaacgacgttcaaggaccggagacctgtaatacttacaacatgctccgtcttactaaaatgctttatcagaattctcacaatccgaatcaaacaaacgaacctgatcccaactacgtaaactattacgaacgtgcgctttacaatcatattctagcgtcacaaaagccggataaaggtggatttgtctacttcactcctatgcgtccgggacattatcgcgtgtactcacaaccggaaacatcaatgtggtgttgtgtaggttcaggcttggagaatcataccaaatacggtgaatttatctatgcgtatcggaaagacactctttatgtcaatctcttcattccttcacaactgacctggaaagagcaaggcattattttgacacaggaaacccgtttccccgatgacagcaaggtaactttgcgaatagatgaagcgcctaagaaaaaacgtactttaatgatacgtattccggaatgggcgaaccaatccaaaggatatagcgtcagcatcaatggaaaaagaaaaatgttcgttatggcaaaaggtaaccagtatcttcctctctcccgcaaatggaaaaaaggagatgtcattactttccacttgcctatgaaagtcagcgtggaacaaattcccgacaagaaagattattatgctttcttatatggtccaatcgttcttgcagcttccacaggtactgaacatcttgatggtttatatgccgatgacagccgtggcggacatatcgctcatggcaaacaaattcctttgcaagaagtcccgatgctgataggaaatccagattcaatctgcaagtctcttcagaaagaacagagtagccggattactttcagctataacggagaggtttatcctgcacaaggcaaagcattggaactcgttccattcttccgcctgcacaattcccgttatgccgtttatttccgacaggcaagcgaagagcagtttaaagctattcaggaagagatggcaacggctgaacgaaaagcaacggaattagctaatcaaaccattgaccttatcttccccggtgaacagcaaccggagtctgaccatggcatccagtatgagcaggcagaaacagggacgaataaagaccggcatttccgacgtgccaaaggttggttcggctatcaattgaaggtaaaagaggcagcaagccgcctcctgattacggtacggaaagatgaccgcaataaagtggctattcttttgaataacgaaaagttggctgttcatccgactatcagtgaagcggataaagacggtttcattactctttcatacgttctgcctcaaaaactgaatacgggtagttgtccgatacgttttatccctgacgggacggaatggacctctgccgtttatgaagttcgtttactaaaatagaagtcaccacagattacacggattaacacagattatttatgggttataacatgatagtagtcagaataaaatcaatctgtgataatctgcgtaatctgtggtaaaaaataatcattaaacaaataccatttatgaaagcaaaactattagtcagcacggcttttctggcagcatctgtatctctttctgcacaaaagagtgctaccataaccgtacatgccaatcaaggcaaagaaatcataccgaaggaaatttacggccagtttgccgaacacctgggttcatgtatctacggcggtctttgggtaggcgaaaactcggatattcctaatatcaagggatatcgcacagacgtattcaatgcactgaaagacttgtctgttcccgttcttcgctggccgggcggatgctttgccgatgaataccactggatggacggcattggtccgaaagagaaccgtccgaagatggtgaacaacaactggggcggtactattgaagataacagtttcggaacgcacgagtttttgaatctttgcgaaatgctgggttgcgaaccatacgtgagtggaaatgtaggtagcggcacagtggaagagcttgccaaatgggtggaatatatgacttctgacggagactcgcctatggccaaccttcgccgtaagaatggtcgcgacaaagcatggaaattgaaatatctcgg

SEQ ID NO: 8084 - DNA, 17274 bp, Unknown
  gut microbiota DNA sequence
gtatgtattattgattactccttttttagtgatagcgcgataatcataagttgcgaagtctgggcaatctttttctgtacaatttgtaaatgcaaaactatctgaatagaaaccgtatgttgaagatacacagtcaaattcaaagataccactagcgtcagttaatagattatatttgtagttagttgtcccccagtcgctactaacagaccatgaatcatccggattttcttgatcgcccatatcaagtgtatgagtttcgtaattgggcaggctaagcacgtatgtttttgtatcgtcatcatcgctacagccacaaaatacaaatactgataacagtaataataaagataatttcttcatgttcttttctgattttagttattaattaattattgattatttcttgaaatgtaagttctcaatggtggtaacttcggttgatatttcacccatttgtcctgcatcctgattgactgcggtcataatcttcacgaagtcgatttgatccaagtctaccggactgccattactatccacagcccaatctatcttgaaattacttccttccttgctgttaggatggttgtctgcatatccccacggatagcaatatcctacccataatccattctccaaaacggcattatcttttagacgtgttccctggaatgtgatttcatcactttctatccaaagtggataatatgattcctggttatggaagctgttgcggaagatatatccttcgttgccttgattgtctttccaaaaaacttttaggttggctggattcgggcggtgataggttatctcatatccgcgtgtttctgtgtctttcccgtattcgcttcctttcaattcataccactcatcgtcaggctttccattgccatttacatctttagatacaaatacgattcccggttctgcacttccgcccaatgctcctgttccggttttggagttgtagtaggcattgccttttatcttgaagtcatactctcctgttacattcggaatggattgtgggaatcctaaaacaatgtaaccgccgaatcctcccaatgtaaggagtgatttctgctggattctgcgggttgcttcttctagtatctcatcataagtaaagccctccttatatgctgaagtggtagtgttgataaactgtccgggcgcagggcgatattcccatactttattggcgaaagccagaggattttccttatcatcatcgttgtcatcaatatcgctttgtgaggctttgtcactgaatgcaattgtattcggattaagtccgatgttgttcagacggaacatgagttgtccttgttggttgaaacaaagtaagtctccataggtggtgtaatcacgggcttcggtgatatatacattgttgctgtaaggattgatgttgatgccgtatggcgtttttatcactgttccgtcagttatgaaattctcacggattgtctcttctgttttcagattgaacatcttgatagaagaggtctgtgtgttataattgtaattgtataaataagcaatctctccatcgatggcaaagttttgtactttctcgttagattgagtgactttgtttgtccggcagtctatcttgacgaagttataatcgccggcttctacatcttcgccacgggtggctacataaacggtttcgtccggccctgctactattttaccgggattcgggcctactgttagtttgctactttctttaaatgtggcaatatcgacaacagataccgtgttgtctacccccagtcctgatgaatagtccaacccgccggaattggaaatatataacttttcgttttgtacacaaataccgtcggggttgcgtcccactgatgtgatagcttctatggatagggaggttgtgtctatacgtgcaacggttccatcgtatgaacatacgtatgccttttctttgtgaaaagcgatgtagcgtggttgacgggaatttccgttttctgccaacatctgaatctgtttcaatgagcttcccgtacgaaagtctatcacttctaccgtactggagatattgactatcacatatatcttgcttccgtagatggccatgtcattggctgtgtctcctaatccccggcggttgactgctttgaaatagtcacgaactatttgctggttgccgaaagaaaaacgtgccagcgagctattgttctgattgaacagtccttcgcataatacatataattcggcggtacccgtttctgtcggatcgcctataatgcctgatgtgaagggtttgtcctccatatcatcacatgccacgaataagattaggaatgacagccagcacgagaatatatatattagtttccttttcacgtcaatatcttactttataatagttaatatcttatttttattgtcgcccttacggatcgtccgggcattgggaaatatttcacaatctcgtaattcttatccatcaggttcaatacttctacgctgaaagaggtagtgatttttctgatctgaaagtcacggtttgcagaaatgctgtggtcgctataactatccaatcggttttcggcaatgttttgtcctaacgcatagcgttttccggaaaaaaggaatgaataagacagattgatccacggtgtttcgacgcctgcctgtcccgaagcggagacgcggggagtgtaggctatttgatgtttgtatgtcgattcatacgtgttcggatcgggcggggtgacatctaaagctcgttggtatgtgtagttacccgagaggttgatgcgtattttatcccaaggttggagggacaggcttcctgtggcatcaatgcctttgatgtcaacttcacccaggttcttcatgctccatacggcaaggttcttggtagggtaggcgatgattttatctgttaccttgttataataagcgtcaacggttactgacagatagggtaggaacgggcatgcatttttattgtatgtcagtccgatgttgtattgttttgccttttccggctttagttgggtgttgcctacttcttcgtaatataagtcgttgaaacttgccagacggaaaatgtctttatagaagaagcggatgcggaattcttcatgctggaaaggtttgaaagcggcacttacataaggggttagcttacggtgattgccggcactaccgcctttcttcacatcttcattgataacggttgccaatgcggatgcggagattgttaaccagtcatttacgtattttccggcgaatgctgttagccatgagtaacgtgtggggtgtacaaagttggctagatcggcgttcatggtgttgatgcttccatctgtggaaagtgagaaagagaggttgctcaacagtctgtatagtacagaagcggaaagataatattcctgctggtaatagctgttttccgttttctttaaagagttcttggtatcggggtccagataacgttgatagctccaattccacttggcagaggtttggaacacccattgccggctgaattctttcttgtattgactttgtatgaatgtgtttttatcccacaagtgttgtgtggaatggtcgttatagaaggttgtagctttgggtagtccccgggaggactgaaagtagtaggctttcaaccgccattgttctttatcggagaagttgccgtaaagtccggcttcggcacggaatgtctgtacgtctgtattctttcgtttttcacgtgaggacaggtcttctgccgcatttccataatgtagtgtgtacggataatgtccgtcggaggacatccattcgccattggctgacatgctccatgtcttattgaattgttgttccagtagcagggagggattgattaatccccaggagccggttttgaaagctccggctatattggtctttttgcctttggtgaatagcggcgtgagtgtctgtatattcaatatgcctgctgacgcgaagaagcgggcaggttggaagatgttatcgctttgcccgttgtttagagaaaggcggtctacgttgtcgagcgagaaacgcccgatatctatttgtccggtttggcagtcggtcagggtgattccgtcataaccgacagcggtatgttgggctcccaggcttcgtatggatactgttttcagtccgccgatacctccgtaatcttttacggtcactccggcaaagtgtttcaccgcgtcggagacttgcagggcgtgcaggtttttcagggcgtctttggagaagacttgcaggggagcggttgagcgtatttcgcgggtctggtagatatctgatactgttatttcgggaatagaatatgtatgtgtcgtatctaccttttgctgttgtgcaaaaagtggtatggataagaattggcagctgaatgctgcaaagatcactttattaaatgttcttttcttcatttattcctttttcagtctgttgttgtttaaaagtgtccgggcgaaatcccttcgaccggacacgcataaataaacttggcagagtttatccgttttaacacactttctctgaatcagagtgatgaatgaaatgatagacgatttgtccggttcattagactcaacgctttttcctcgaaagcagtgaaacttatttgcatggtaggtcttctgacttattcctgttacaaacgccttcccggattggtctccagtggcaatgagtgaattgcttgtaacttgtatggaacttacagcagcgggactgttcaggacttgcacctgattcccttttaattgcttcccccgcataggagtcgcaaaccaatgcgcgacaaagatagggagtttatttgttttttccaaagggatgttctttttctttcgtcttgatacgaaagagaaagaaccaaaaagaaaggatcaaggctgcgttttttcagctactccggtgcttccttcggctaaagggcagaaactcgctacgctcaaacagtctgccctttttgacgccgaagaaaacacctgcgcttgacgctgaaaaaacgaggccgggagaccatgcggcgtgggcggtgtggcatgggcacgtgtgtgggcggcgtgggggcttattgttcgcctttcattagcaggtattcttcgatggtttgcgcgggagcatctttcagaagtactgtcttatccttgtttagaaggtagagggtagggatggctttcaagtcatacagttgttgttccttgatagcgaaggtcttatcatatccgttaacccattcttttgggaattcatttaggtgttttcgccattcgtccaactcttcgtcgggataaatggagaggactgttagtctcttttgttccagaagttgattgatgataggggcgttttttaatgcttcgattgtctccgtgcaggcatggcatcccgggttattgataaataataaggtatagtccgatttttgttgataaagagaaccctgtgcgccggaagctaatgtatagttaaaattcagtgctttggttccgatacggtttttctgagccagttcgcgacgggctttgggacgtaccttttctatttcttccagtacgggagaagccaacatggcatccagtacagggatataaaactcttcgttacgcatcggggagttagggtcgtacagatatttgtctgccaagtcggtgatgtaagtgaatactttcttattcacatttgtccgttcgattgttttctgcatagcttgctgtgcagtttccaatggaacatggttcagtatatcacaatagtccgcccaagcttgttcggtcacttcgggatgatggacataattggtatcggcaaagtttacgttatcccaatagtgctttactaggaaatctgcccgtagctcgggtgctgtcagcattggcgggatggcaggtagcgtaaaggaggtgatggtatctttgggagcttctttggagttttggctggatgcattcccgcttttgcaagcgcaaagcagtagaatacagaagactgggataagatttatatttgttctcataacttgctgaattgttttcaatttactattggtgagcaaagataaaaaaactatgtgtgaaaatgcactgttttaatgaaaatgctatatttgtgtcggcaaacaaacatacaatgcatatctatgattaaatccacctacatattcttcgttttttttatgctgacggctgtgtggagttgcaaccgaccttctgacatgcagcgggaacatcctgccgtttctcccacattctatgccgacagtcttcgtacattggggcgtggtatccgcttgattaaggaggagaaggaaagtctggctttcccgccgcttgattccgtgttccggcttccggtggacgatgtgctcactaccgaagaattgcgccgtttatcttccgaatctctccgccggttaatgatatacttcaatctgatgatgaactttgagtccggctatcagtattttgattcgttggagcgggcgaaacaccccgttgtctcccgatattgccgcagggaactgtgggtggtaaaggcgcagatgcttatggcgctcgaccgccatgcggaggcggtggactatctcaaccgggcgatggcactgaaagatgagaacaacgacccgttgagcgagatattttgtacagctacggcaggcatcacttatatgggtgtcgacactatcagcactcgtgccgagtccgctttccgtagagcctgccgagtggcagaacgctcggccctaagcaactattggctttatccgcaagctatcgggcggcttgccgatatataccttcagcaggggaagtatgaagaaagtatctccctctgtcgtgaagctatccgtctatgtgagaagtcgggcagctatcacggcaagctggtggcggcggagattctgacggaagcctaccgcctgctcgggctctatgatgaagcgtttcgctattgtgccgtaggaacgggcgagccggcacgtgccgaagttgacaataacttgataggtcgtttcttcattgcgaaggcggagatacacaacaatctgaatcgccccgactccgcactcctggttcttgcgcaggccgacagttgctttgaccggacgaagaacgactactatcatttgatggtgcagatagatcggatgtattatcttgccgcctttcccgactctgtgaatgtggctttgagaggctttgccgcacttgaaggtaaagttccccgtcatcgcctgccatattatgactattattacggtgccacccttgtccgcgtcggtaaatggttggaggcaatccccctgcttcggaaatctattggcgagttgaaagatatatccgagcttcaccctgcttcggaagcggcggaattgttaatggaaggctatcgccacacggggcgggcggtggatatgcttactgtctttcccgaatatcggatgatgagagattcggtgacccgcaaagacaagatacgccagttggcatcggcaaatatccgtttcgaaacacagaagaaagaacaggagaatcgtctgctgactgccgaagtccgtcttcaggataccctgttgcatgtgtatttcatagccggagtgtgtacattgctactcgtcttttttatagccggctggatggtgatgcgccaccgcaatctgcggctccggtggcagctcgaggcgcaggaacatgagcgggctgacgaacggttgcgtgatcaggaaagcaggcttcacgaactgatagccgcccgtcaggacttgtacgaacgcaaccgttcctttatccgccagctttctgatatccaggcgcgccaccgcaacacgtgcgaacttgacagcgtgatggaaagcctgcaatcccacttgctcacccgtaaggaagaagaggatttccgtaacgcctttttgtccgtctacccgtcggcgctgctgcatcttcgtgaagcctgtccggcggtgacacgtagcgaggaactgttttgtatgttggttctgctcaagcaatccaacgaagaactggcgcggacgctcggcatcagcgtggcaagtgtgtccaaaacccgataccgcatccgtgtgaagcttggtctgcccgaaggttcggacactgatgcggaaatccgtcacattatggcaggggaagatttatagaatcggttcttccagtcattcagcaatattaatccggaactttcatcattaaacaaaaaatgtctatctttgttgtcaatatacacaaccaatacattaataatgggaagatttattaatccctttaccgactatggctttaagtttttattcggcagagaggtagaaaaggagttattaatcgacttcttgaacgatttgctctctggagagcacgtgattaccgacatccagttccttaacaacgaacagcagccggaagtaaaaacagaacgggggattatctacgatatctactgtatgactgacacaggtgaacggataatcgtagaaatgcagaatcgtgagcaaccttactttaaagatcgtgctctcttctacctctctcgtgcgattacgcaacaagctaaaagcggtccttgggacttccggttggatgctgtatacggagtgttttttatgaactttgtgattgacaaggacatgcctgcgaagataaggactgatgtaatcctttccgaccgggatacaggacagcttttcaataacaagtttcggcagatttttatcgaactgcctaactttgacaaagaagaggatgagtgtagtaacgattttgaacgatggatttatgtattaaagcatatggatacacttgatagaatgcctttcaaggcacgtaaagccgtttttgaacgacttgagaagatggcctccaaagcgaatatgactccggaggaaagagctcaatatgagaaggaatggaaagtttataacgattatttcaatacgttggactttgccgaacagaaaggtatgttgagaggaaaagaatcgtccgcccgtatgatgaaatccaaaggtttggctatcgatttaatttcagaatgtacgggactcactgctgaagaaattgaggcattgtgaaaaaatagataacaaacagtaagggcggctcgttaaaaaacgggtcgcccttactgtttgtatgcgccaagccttttcctgacagcctcttctctattttgtccatgaatctgtccattcccattttgtccttcgtcgggctgaaataattatttttgccccggcgaataaaagtttagcctatattgtttgctgtttttcggcttttctttatctttgtcactgcccttgtgagagagggcgtgatttttagataacggaaagcgtttgaagaatatcatcttcgtcaatcaaacttcgcacctttgacttgtcaccgtgaagatgaatgcaacaaatgctcacgttccattgtttatatggatgcctgtttgcgcccccgcttccccctccgtccggagaggggagggggacgatacacaagctttatatacgccaatggcgtgagtgttctgttgcttatctacggtatgggcagtgcgaaggccccgattgacggataagcatacggacacttacgcctttcttgtatataaatttttgtaatcttatgttacaggtatgagaatgaaaaacaaacaaaacgtagcgtggagtacattccgttacttcgtactggcatttttgctatgtctatcggttgttcccttgcgcggtcagccggatgctgccgtcctttcctcaccttcggcagacagcctgattattttcagctatccttcacgtatccggatgttcaagacggaatatgcggacaaccgactgtcgttgcggaagttgaagaaacggctgcgcacctttcgtaaacgtcaggacaccctctacgtgcagagctattccggcagttgggacgatgaaaagtcgaatctgcgcgccgcctactggcgtgccaacaatctgaaaggctatcttatcgaccactacggactgcgcgagcggcatttccggacactcaaccacccgttggctcatcccttgtggggagaagtcgtcgtggtaggttgccgaggtttccaagattgccaaagcgagattccgcaaaaccggcaagagcctgcaagtgcggcgaggcgacaggaacaacaggaagcccttccggttgccttgcagggagacaaagagcctgttgactcttccgccgtggctgccacggctgttgtgccggatgcagctactgcacctgttgcacccgatgcagctactgctctttctacttcggttgcttcttctgcttcagttactccttcttcttccaccgcttccacctctacagctacctcgccttcacttcccgccaacggtcgttactttggcgtgaaaaccaaccttgccgcttgggcgggtacgattatgaacgtggcggcggaagtgcaggtcggcaagcatctttccgtagagttgccgatattgtggtgtccgtggcacatcagcaacaaacacaccgtgaagaccttcaccctgcaacccgaagcccgttactggctctcgaagcccggctcgggacatttcttcggtcttcatgcccacgtaggctggttcaatgtgaagtggaatcgcgaccgttatcaagacgccgaccgtccgttgctgggcgcgggcgtcagctatggttatctgttgccgctcggcggacattgggcgggagaatttaccctcggtgcaggctatgccaacatgaagtacgacacctattataatatagacaacggcgcacggatagacacacggacgaagaactactggggcatcacccgcatggggctttctatcgtctatcgcttcaaccttaaaaagtaacggcttatgaaacagaaatatgctataggatttatcaccttcatgttggcaaccgtccttgccgcttgtgtacacgactatcccgcgatgacaccggacggtgaggaaggcatcgaccccacgcttgtagaggtcagtaccgaagtgaccctcgacctcgaactcctaccactggaaatcatcaccaacaaggcacactgcggaatcacaaaagcccgtgccggagaacaaacggattaccgccgccgcttcatcatcgaagcatggcgcgacggcaaaccggcagcccggcaagtgaccgtcatggacaatgccgacgaagccggcaacgggaaaatcacgctccctgtccatttgaagctgtacgccgtagaatacaccctcgccgtatggacggactacgttgtggcaggcacgaccaccgacctctattataatacggagaacttgcagcaagtaacttgcaccacgccctacaccggaagcactggctaccgcgattgcctctacggcagcaccacccttgacctgcgcccctaccgggacgaatggaacgtccgcgtacaagccaaagtcgacatggtgcgcccgttggcaaaataccgtattatcgccaccgacgtgcaggagtttctggcaaaaacacagcggcaacgcgatgccgaaggcggcaacaacacctacaccgtcaccttttcctacgggttctatttcccgttaggattcaacaccgccacgggcaagccgatgaactccgtgcagggcgtgacgttctccacccctctcaccatccccgacgacggcacggagaaatgtccgctaggttcggactttatcttcgtgaacggcacggaatcctttgtgcccctgaatattgaattggcggacgccaacggaaaggtagtgtcgcgtacccggggactggaagtgccctaccggcggggacacctcaccaccctgcgaggcaacttcctcaccaacgaaatgcagggaggcatcaacatcgacaccggatatgacgacgagatagacatcgacctcgattctttctgaaatgacaggtcaatataataaaacaaatttaatcacagtaaacgatgaacagaagtatgaaaaagaaccttttcttcgggttaatggctctggcagggctattcacctcgtgcagtcaggacgacaccgacgcttccccgactgcggacagcaaccaagtaagcatgagcatcggaatgcctgccgattttgtaaaaacacgggcttccgcccccgctacgtttcccgccggctatacgctgcgctgcatcctcgaagtgtggacgaaagatggctctacacgaagagtacgccaggagcagttggtaacggctggtgccgctaacattacatttagttttgaattggcagaccaaggtgactacaaagccgtgctttgggcggattacatcgtttcgggtgcaacggcgtcaggcgaccactatcccgataagtattacaagactgataatgccgatggcttgaagaaagtgactatcatcaccgctgcttatacatacgccgaccaactacgtgaggcatttgcggcagtagtaccgttcaccaaaggcgctacggctaagaacgaccttaccgccacgcttgtccgtccgcttacgaaagtgacgattgcggaaaagaacaccgagatgataggcaaatgtaaagacatgacggctaaatacaccgttccgtcagaattcaatgctttcagcgaggaggtaagcccatcagctacccacaatatcaactacaccgcaacctcaatggacggcacggatattactatcaatggaaacaactgcaaaatcctcttctccgattatgtctttaccactgccgacgccacgttgggcggaataaaacttacgtttaccgggacaggtagcataacgatgaacgatagagacattcctgccaacatccccctgaaacgcaacaactgggtacgggctgccggaaacctgattacagtcggaaacgatccggcggtaactttgtctgtagatatgaccactgactgggtaagtcaggatgcaacggatatttcggatatcgttaaggtgggtgacttctattatgcagacggcacatggtctaccgccctcgatgcgaacaagacctgcatcggcatcgttttccagaccgacccctcgcgcatcggcgacaaagaaaaacaggtgttggcagcaaaaggcgttgccacgccgcatggtctggtcatgtcattgaagaccgtaaccaaaagccttatgagttggggggaagatcacgatttctccgagctgacgaaatgcacggataaagttgcctgcaacgcagacatcaacggactacttaattacaccacggtaatcgactatgcggccgcaaacaacaaagaactcgaaaatttttatcccgctttcaaggccgtgaaggattatgttgtacaggctcccgaaaagacgacggggtggtacttgccctccataggtcaatggtatgactttaccgccaatctgggcggtctcccaagctgggatgacgccataaacgaaggcaacgacctaacccccaacctgtatagatggagtaatcagacagaactcgtaagtaagataaatgcctatttcgaaccgttgggcactgggaactatgacgcaatcccgaatgggagctatcagaaattcttctcttcctcgacgtactccgattcgggtatatggacgtggtttgtgggtaagcaggcgaacgttgtgcaatgctggcataatgtcaggtacaactccgattccgccgtgcgccccatcctcgctttttaagaatgacacacggggacggggtatccaggtcactccatcccgtccccctacatcatatacgtcccaagccgctgggggatgcagtcggcggcaatatcatgaaccttgtcctttttcccttgtcgccgacttgagaagcgaacatcacttctctttataggataccttcctcgataggagcaattgccggaagcgacgcaactgatcaaggtaacaaccataaaaaacatcacacttatgaaaaagatactcgtcatcatcaacaaaaactgggaaacggaacccgtgctcaacgccctgaccaaccccaaactgcgtcccgccgccttaccattccctgaagtgataaacactccgtgcgacggagacaaccgcatgagccaaccccgtgctgtcttctcccttccccgagaaggagaagaaccgttgcaagtcgtagtccgctgcatcgaagaccttatggcaacgggagtcaacacttcgagttccctcgaaaaatacaaagtgctcccgcaagccattgctgccgatgccgccgacctcatcatcagcgtcagcaccgccaactatcccgacccggcagtgacccataacggaaccgttgtcctcggcggcaacttctttatccacgacggaaaccccgacagccatgccgatccggaacacaaccttatcgacgaccgcgtaggcaccttcatcgcttccaacgtagcccctgccgtgttcagtctggccgaaaccgtcaacgcccgcctgcactgttaccccggcggcgcatgcaaacttgtcccgccgcccaacttccccgcaccgcaactcgtgtgtgaaggagcgtccaccttcacggcagtaggctccgtcaacgtcaccgactacggttcatacgacacgatagacgcccaagcccttaaagaatttgccgctgcagcccccgaagggtatacggcaaactccatcgaaaccacccacggcgtggtaaaaatcagcacctcaggcgaacctatcctctttctttcccccatcaccgaccgtctcaaccatttcaacgaggacgtgaccgacacgcagaactacgtgtcagccttcaacggcggccttgcactgggcgaactgctttgcgcgctggcggaatacggaggggaacggcaaatatgataattgagataattcgcaacatttattaatcacgcttccttcttgcagcacctcatcaggaaatgcttgcagacacggacagacaaaggtcgtcactgaggtaggctaagtccgacaccgaggtaggcaaaggtcgtcaccgagataagcaaagtccgtcaccgagtattagtcctatcgggatgcggcagggaagaggtaaaaaacatcaacttatgggattcttcaagaaagtaaaacagaaaatcaatggaatgtggtatccgcaatccatcaccgttggcaaacctgtcacgacggacgaagtggcaaaacgtcttgccattgaatccaccgtaagccctgccgacacctttgccgtgctcaagtcccttggcagcgtattaggtagctacatggcagacggccgcaccgtcaaactcgacggcgtgggcacattctactacacagccgttgcttcgggcaatggagtggactcccccgacaaagtgactgccaagcaaatcaccggcgtccgtgtccgcttcatccctgaaacgagccgttcatccaacaaccaggttaccacccgttccctcgtcgattccaatatcttctgggaagaatggggcggaaaatccactactcccagcgaaggtggcggtggtggtgaagggggaggagaggctcccgatccggcagcataaagccggatgcttttccggtgctataaaaaggacgggttcctgcaccgcaaaaggacttttctgtattgccaaaggctccttccggcattgccgcacgaccctttaagatgaaagattcgttttcactcgccgctgctgtagcctgctgccggatgagagaaacgaatctttctttgtgtgccgggggaaataatcggttcttgacagaacaatctgcaccggaattgttatctttgcccgtagcattgattataataaatggaaaatttatgaaacgaaacaaataagagagattatacgtcgcgtggctcctacggcaaaaactattttatatggttcgcaagcaaggaacgaagcgcgtagcgacagtgatattgacctgcttatcctgctcgacggcgagaaaatgacattgaaggacgaagaatctatcacactgccactttacgaactggaactgaaaaccggagtctctatcagcccgatagtcacgctcaaaaaactttgggagagccgcccatttaccccccccccttttatattaacgtcaccaatgaaggtgtcgtgttatgagagaaatcttggatgaaggaagccgaagtaatgattcgggaaatgttttaaaatgtagctacccctctatttctcctttgccagcgtaaatacaaactcaagtccgcctccttgattgttcttggcggagatgttgccgccgtggataataacggcgttcttcacaatagccagtcccaatcctgttccgcctagtttgcgtgagcggcctttgtctacccggtagaagcgttcgaagagacggttcagatgttcgggtgatacacctataccagtgtcggcgaagctgaaatagtagaaattctcatcttcacggaaacagttgatatttatctgaatattgcttccggcgtatgcgatggcattgtccatcaggttgcggaagatggaatatagcaatgaataattacctttgacttgtatgctctttttcagagagttgattactgtgatatgcttttcgtcgagttccagagatacttcattgataatatttccgaccagtacactaatatccactcgttccatatcaatcatgctggcggcttcgtccatgcgggtgagtacggagatgtcgcgtagcaaccggctcaaacgattgctttgtgcataacaacgttcgaggaatacgtttattttctcacgtggaatattctcgttactgacaatggtttccagatatccttggatactgctgacaggagttttcaattcatgggcgatattttgggtcagttggcgtttgagtcttacttgttcttcttcctgggtgacgtcgttgatggaaatttcaaagctggcatcctggaagatgatacattcaacgataaatgtccgcccgttcttgttgatggtaactgacattcgtttttcgccttttcctctcgagcgttcctgctgattcttattgataaaatgaataatctcttttagttcgttgatggcaaagacttcttccgttgtttccaggttggaatcagaaatcaggttactgtattgagtgaaaagattgttgactagaatttctttcttgtcttttgtgaatatacccagtccttcgtgtgaaatctggaggtgggtaatcagcttttcacgttcgatgtagagggcctctttcgtttcgtgc

SEQ ID NO: 8085 - DNA, 8084 bp, Unknown
  gut microbiota DNA sequence
ttctgaaacagcaatgagctgtttcagcctattctaacaagggtatattctcactgcaatgagaaaaagttctcattataatgagtatttcttctcatacctatgagtattttttctcatagggataagtatacttgagaatgtttacggaagtttttttgaattataattgtatgagtttacctcatttctataccgaaatgaattttcaactaatcagaaaaagagatacgaaattagaactatatgtctctacaatctatataccatcacaaaagcaacatttatttctgttttcaacaagttttattcacatcattcactatatttgcatagtttatctttccatttaatgcaaaaaaggagcaaatgactacaaatttaaacgagacctttgctgccgtacaggtggcaagtcgggaattagccttgctgaatgatgacatcatcaatcagattttaaatgcagtagctgacgcagcaattgcagaaacacctttcattcttgcagagaatgaaaaagacctcgcacggatggacaaaaatgatccgaagtacgaccggttgaaattgacggaagaacgtttaaaaggcattgctgccgacacacgcaatgtagcgacactcccctctcctttaggtaaagtgctgaaagaaagcgttcgtcccaatgggatgagattgacaaaagtcagtgttcctttcggagtgataggaatcatttatgaagcccgtccgaatgtcagttttgatgttttctccctttgtttaaagagtggaaatgcctgcatattgaaaggaggaagtgatgccgattgttccaaccgggctatcatctgtgtgattcatgaagtattgaagaaattcaatatcaatccgcacattgtagaactacttccggctgatagagaagctacggcagcattgctgaatgcagtgggttacgtagacctgattatccccagaggcagcagcagcctgatccatttcgtacgcgagaatgcaaaaattcccgttattgaaacaggggcaggtatctgtcatacttactttgatgaatttggagatgtaaacaaaggggcagctattattcacaatgcgaagacacgcagggttagcgtatgtaatgcgctggactgcaccattatacatgagaagagactgaccgatctccctatgctttgcgagaagctaaaagacagccatgtcactatttatgctgacgcacaggcttatcaagcattagaaggccgctatccagccgaactcctggaacacgccaaagcagaaagtttcggcacagagtttctggattataaaatggctgtcaagaccgtaaaaagcttcgaagatgccttaggacatattcaggaaaacagctccaaacatagtgagtgtattgttaccgaaagcaaggaacgtgcagccttattcacaaagattgtggatgcagcttgcgtatataccaatgtatctactgccttcactgacggagcgcaattcggattaggagcagaaatcggaatcagtacgcaaaaactacatgcgcgcggtccgatgggactggaagagatcacctcttacaaatgggtcatcgaaggagacgggcaaacgagaagaaattgagacgatacctttatcgttaaaaatcaaacaaggtattgaacgaaactaattgaaaattaagaattaaaagataaatgatatgaagaaatttacttgcgtacaggacatcggcgatttaaaatcagcccttgcagaagcattcgaaattaaaaaagatcgtttcaaatatgtagaactgggacgaaacaagactttgatgatgatcttcttcaactccagtctgcgcacccgccttagcacacagaaagctgcaatcaacttgggaatgaatgtaatggtactagatatcaatcaaggtgcatggaaactggaaaccgaacgtggcgtaattatggatggcgataaaccggaacatatcttagaagccattccggtgatgggctgttattgtgatctcatcggagtacgctctttcgcccgtttcgaaaaccgcgactttgactatcaggaaacgattatcaatcaatttatccaatactccggacgtcccgtcttttcgatggaagcggcaacacgccacccattgcagagctttgccgacttgattaccattgaagaatacaagaaaacagtacgtcctaaagtggtcatgacctgggctccacatccacgtccattgccacaagctgttcccaattcttttgccgaatggatgaacgcaacggattacgaatttgtcatcacccaccccgaaggttatgaactcgccccgcaatttgtaggcaacgcaaaagtagaatacgaccagatgaaggctttcgaaggagccgactttatatatgccaagaactgggcagcttattctggcgacaattacggacagatattaagtaaagatcgtgattggacagtcagcgaccgtcaaatggcagttaccaacaacgcttatttcatgcattgtcttccggttcgcagaaatatgattgtgacagacgatgtgatcgaaagcccgcaatcaatcgttattccggaagctgctaatcgtgaaatctcggcaactgtcgttctgaagagactattggaaggactaaaataaccgaaaaataaagaggccgaaaagccttttccatcaacgcataagaacaaaagaacatctccttaaaatcctacttataaatataaaaacaggatttgaaaattgagatgttcttttgttcttattgtattttaaataaaagcaggctattgcttaccccgctctttaccttatttctctatttctttgccagcctcctgccaggaattaaatcctttatcaagttcaaagaccttatagcccttctcactcaaaattgccgcagccttcttgctccgattaccactacgacaatacacagccaccggtttatccttctgtaataatgaatcagccattgaagcaaaagaatcatccatcacattgatgttgattgtcttcgtgatgtgcccctccgaatattccgcaagtgtacggacatccagacgttgtatatcctcattctgaataagagaatcaaactcctctacattcatagattgaaaatctcctttctgctgacaagagaaaagggaagagagaaataaaaatatccccacgattaattgattcaatttaaacatatatactctattattcaattctgcccaggaatatagttaaacccgggatcacaatacttttcagatactaccgcagagccatccttatcgtacgtacaatatttaaacttaatatttatggtccggccaggatgctcctcatcaatatattgcgccaaaggaacagagatataagcacgccgattatagtattcttcatcactgttcgcatcatggtataataacatattcacaataccatttgttttaagttcagacacatcttccactatgccgaaggtatgtcctttgcctgtactgacttttagattcagaatcatattcagataatcccgccccagccagatactgaccacctctaccggatcttgctttataccgtctttatacaccggatcatcttccggcttaggcaccggcacaatgagcgattgcaaagaatatatagtagccgcacttccatccggaagcacttcatagttactcattacacgtctggaggtatttgcggcaatagtagaacccgtacggtcttccgccacaggcaaagcctctcccttatcaggaataagcgtttgtatacgaccgtcttccccggcctctacagtcacaaattccagtttcaccgaaggataataataatcatcatctccacaggcagtcatcaggaaaagcaatccccacaaccaaataacatgtaattttcttcttttcatcggcaagctgctaaataattaactaacggattggaatacattaataacaacttctcacgcaaaaagtcctcatccttattcggaatcttgatctttgccaattgttgttcaatatagttcataaactgttgtttctcttcttccgtgtaattggacccgaattccgtcgtgccattcagccaatcgtacgccacataatttcccggatatatccggtaattacgatgaatgcggcggtcaatacaagcagagatacgggcaaacaaatccggtttcggcaacgaacggtccaactctttcagatcatcattcagacaaggggcaacctgaaaatgtaccctgcctttatatccgaaaagaccggtttgcatattaatcaaatcgtcctgcgtcgtcttcttatacccttcgatgtctctcttcaactgaaactcctgcgctttcagaaaatcacacgggtcatattcgtatgaaatagcaagcggagcaatattcatttccatcaaacggtctatcaaatcaccttcaccacccattgccagcattttcaacacactgtcttgcgtacggtcattcgaatcttttgcacgtccttcacgctgcgcaatccaaatagactgttttttctccgaaatggtgtaatgcatataacgggacatacgtgccgaagattccaacatttgccgcatggtcaatgcccgctgcacaatgaatgatttattgacacgtaccagtttcttaatccagggataaatcagcaaattatctccaatcgctatttctaccgtatccattccctggtcaatcaacaaaatagagagaaagcccgaatcaagaataatgtctctatgattcgatatatacgtataagctttacttttatccggtatggcggtatgatccagtgtcagcccggcggtatgatctgccgctatcttccacaaaatgccatagcaaaatgcctcctgaaaatcaagtttagtcttacaggcacgcattttctgcgccagaagttcaaatggaacgttcggtatagccccggtagcagctttctgaaaagccggatcggcaatcagttcctcaaagatttgaggaagttcctcatcattgtaaggacgaatttcattaaactctgtcagatccatcacgtgattaaaatttgttttcaataatatcggtcatcacatcctttatatccagtccggctgcacgcacctgctggggaataaagctggtagtagtcattcccggagtagtgtttacttcgagaagattcagtttttcaccggcagtcacaatataatctacacggataatgccggagcaacctaatatatcatagatagccgaagtcaacatctgcacacgcttggtcagttcgtccgagatacgcgcaggagtgatttcatctacctgtccattatatttagcatcataatcaaagaactcattgtgcgtcaccacttccgtaggcgggaagataactgtcttctctttggtcttatagcagccgcaagtcagttccgttccatccataaacgcttctacaagcacttcttgcgcctctccgaaagctttaacaatggccggctgtatttgttcttttgtctttactttcgtaactccgaagctcgaacctcccagactaggcttgataaaacaaggcagaccgatcttttccactacttcctcgtcagaaatcgattgtccctggcgcagcaacaatgattcggcaatgcgcactccaaaagctttcagatattgattgcaggtaaacttgtcgtatgtaatggcagctgccaatactccacaacaggaatacggtatacgcatcatatcaaaatagccttgcaggcgaccatcctcaccaggcgtaccgtggatggtaatataagcaaagtcgaacacaaccttttccgttccgttcgtaaaactaaagtcatttctatctaccggcactttatttccgtccggcaattgtacttcccagcgacggccttccatctccacgatatacaaattatacttttccttatcaataaaggaataaatgccctgtgcactacgcagggaaactacgatttcagaggtatcccctcctgctacgatagcgatgttgcgtttcattctaattctctattacttatatagcctctccacttctcgataagccgggtcatgtcatccggaagttcggaagtaaagtacatctcctcacctgtgacgggatgcacaaaccccaacgtcatagcatgcaaagcctgtcggggacaagtgtcaaagcaattatttacaaactgtttgtatttactaaaatgagttcctttcagtatctcatgcccgccatagcgttcgtcattgaacaatacatgaccgatatgcttcatgtggacacggatctgatgggtacgtcctgtttcaagtatacattccacaagggttacgtatcccagtctttccaatacacggtagtgcgtaacggcatgcttgcccaccgtcgggtcggacatcaccgccatctgcatccggtctttcggattgcgggcgatattaccgacaatcgttccttcatcctgttccacaacgccccacaccagagcacgatatctgcgtttggtagtcttattaaaaaattggagtcccagatttgttttggcatccggtgtcttggcaatcaccagcaagcccgaagtatctttgtcgatgcgatgaacaagtcccacgtgcgggtcattggcatcgtaatccggtatatccttcatgtgccaagccagcgcattgaccagcgtgccgtgatagtttccgtgtcccggatgcactaccaaccctgccggtttattcaccaccattacgtatggatcttcataaacaatagtaaggggaatatcttcaggaataatttcgttttcataacgggggcgatccatcatcaccgttatgacatccagcggtttcactttgtagctactcttcaccggcttgccattggccataacgaatccgccttcggcagccttctgaatacggttgcgcgaagcattgacaatacgttcgaacagatatttgtcgactctgaccatcgcctgtcccttatctacaaccacgcggaagtgttcgtaaagctggaattcgtcaccgacaggttctatatcgtccaaatcattctccagttcatccggaagttcttcctctatcatgcgagtccgtttctgttatttatctattaaaaccaactatcatcttgagcagatgatgattccgacgtaatcggctggtccgtatctacggaaacatcggctgaatcttcttccgacgtatcaccggagccgtttccgaccatcaatgttaacgaagatcccacaggtattttctcacccgcagccaactggcgtccctggtacttcacgccgtatacccagtctttctcaccatttaccaattgaacctgattcagtttgaaaccggcatttagcaatttagcctgcgcctggcggagcgagctgttgtccgccacatcaggaatagcacgcaaagggacatccaacgtattgacagtcagatataccgtacgtccttctttcactttctcaccgactcccggcttcagttcgagaatgatacctgctgctttatcctttacatatttggtatcggaaatcacatataccaaaccgtgattccggaacattttcgcagcttcgtccaccgtcatccctttcacatcgggaacggcaacagtttcaccatgatgagtatgtatatcaagccatttcaatacaccgaatatcatcactaccaccactacaatcatggcgataatgttcacccagaaaaatttatttgttttaaaagaaaagaattctttaatagtcatacgcattgctgttaatatgcgccaaagatacgacaaaatagttgaacttttaaaaagtaggcgatgaaaaatgtccccatctactatgcaaggacgcttatcatcgccagaattgctgcaactataatccccactcctatagatttcaacaaccttattatatttatgcgggttttcaggtcccggatctgctcttccattgcgtatgtttgtttatgagttttattctataccacaaagaaaaataaaaagtcacaaacaagcacaaa

SEQ ID NO: 8086 - DNA, 19574 bp, Unknown
  gut microbiota DNA sequence
acaaagcagcattccgaaaaagaaagccattaaacctctatggatggaaaatgtagttttgcttttcatacagtatatctttaatactgcgtaaaaataccacttatttcaagatcgcaaaaaaagattcgtcaaaacaatacagaatgtgtatgatattacaaacttttgtacgaatgatggctttatgatttatgcatccagatagaaagtacctttctctttactgccagtatgttgattactgatacgactatgaatagaagaatgcctatactgatagccgcccacagtgatccggtttccaattgtggaaacaacaatcggatgctatctatgtaataactgcgtagccaggaaactaatccgatggataatacaagtacgataacattcagtcctaccgtgagtaactgataaggcaaggctaccttgttgggactgtacccgattaataacaaactctccaacttagtcgtatttttctgcaagagcaagaaaatgctcaacatcaggatatagaatgaaagaatactgataaataaacctacccccaatacaatgcctacgataagacggaggaaataagtcgtttttccggcatccagtttgccgtcttctgtttcatatcctttcttttgaaaatagctggcaatagcggaatccgccggattgctcacttcgataatcaaccgcgccggttgtgcttctgcattcggtgcgaaattctcattcgcccatttcataaaagactggggaacaagaatcgtattcagacgattggagaagccgacaatgtttcctttgtactgttccacccgtccgtttccacgcatcataatatccatttgaatcagccccatcaatccttccgagagcttgggaagactacggctctgtgcaaaaccgaagttataaaggttcagatagttgcggggaatgataatggggatggtatgcgtgctttcgtcgaagtgccacttgtcgagtttgatgtcgacaaactcatcaggaacagactcaaagaacatatccgtggaaagatgaataccagcttcctgcatgcccaatcctgccgatactttgaattgagaaggagtgaaagcccctattgttttggtaaacggttgtttcttcaaatccgcaatatcttcggcagagaacgtattactctttcctgcaaaagaaccgagtgtgctgattttctttgtagctatgatgaaatcctttttcataaagctgtctccctcggtgaataccggaatgacatctttataaaactgcacgctaagcaatacaatcatcatgccgaatagattggctaaaaagaaaccggccagttgaccgatactgatatgttggcggaggagcttccagacaagggttggcattttatttataattttacgatttacgatttgaaatgttgcagtggagggagacggctgattttctcacttactattttccactcattttttgttatttattactcgttacagttgaagtatatggttgtaaggcaactcgatatgcttaccgatggaggttgcgattacaccggctccttgtgtctttgcctcggcaatgataagttcacccatgatgcggctgttatcatcatccagatggctgatcggttcatccagaaataaaaagtcgaacggctggcagagtgcccggataaaggcaacacgttgctgctgtccgaaagatagtttgccggctttcacatttattttatctgcgatacccagttgctcgaagaatgataagatttcttttttctttttgcatccggtaaggttattcttcaattgcacattttcaagagcggtcagttcggtgaagatgcgtaaatcttgaaaaagcatacttagtgaatgctttcttaggtcgacccattgcttcacggagtatgctttgatattgatttcatcgaaattaataatcccctggtagtcgttgcgataaccatagatatagctgcacaacgaagatttgccggtgccggaagctgcttcaatcagatacatttcttctttccggaagatcagatcctggtgccatacatccgaagtcaccgaattacggtcagcaaacacttggggaagtgtttgctgcaggtgaatactattcataccgtttgtttacaaattaattacatgccggcaaattgcttggcaaagtctacgatttgtttgagagcgttgacgtctttgtctttcaggcaaaggtcgatctcgctgatttctccttctgaactcattgacagataagaaaccttattggctaactcaatatatgttttaacttcctgtcctccgaaacctgctaccattttaacaacaggcaagtccagtattgcttcagcgttgattgcaacaaagatggttttacccttcatatccgatgcgtaaggagcatcttttatcgatttgtcggcagctttgcccacgttcttgtagagtaactcatcattggtagcatacatttgtttatccttgataccgaagaatatattcatgccttttgttttgtagacatattcgtccttgctaagttgcatgatatcttcccctcttttcagtcccaatgattgcttgttcttataaattgtttcgagggcattaccattcttaacatccgcatacatcatgaaagtaggagcactgttcatcgttacgttgattaatccggcagaaatatcaccattgaacgagccgaacaactcttttacttcgtctgctttagcaatagatactgtattgcggaattccttattttcgctcaataagttgtaaagcccttctcctttcacacctacattgaagaacatcagtgtggaagacgggaagtatttgacgaaagtgttgtttgcttttccaaatgactccatttgtttttttataagcgctttcacggcttcgttttcagtatagttttctgttttgagggcaatcttgcctttctcaaaattcagtcctcctacaagagtgatgtcctctgctttcacctccgttggtaaccccatgcttatctggttgcgataggttgcagggatagcttccatagaagcgaggaagttgatatcgcttttctgcttttccattttttggaaagctcctgattttacaatgctgttatcggtcgtctgtttcaacagattagtgatggcttctttggctttttcagtttgagtggttccgcttacattgactatcaatacagtagaattgttgaaagcgagcaggccgccattcattgttgtaaaactgtagccgtcagcttcgcttatcggctggcagatttgttctttagccatcacgtcgagtgaagcatgaagattgtcctcgttgttcactttacctacaacagtagggtaagggaaagaagaggatgagaatacatagaatggagattcgacatcgattcccgattcacccggattcttcatgaccttttccagttgttggaaggtagcggcattcattccgcttttcagtgcttccagtactttttgtttcgcagcttcattctctttatcatccaatcccgctttacttgcaagggatttgaggttgatagaggcaactaccgaggcgtcagccggtatcacattggtatactccgatgttttggaacatgctgccagaaaaacaatcagtactgccagtaccgagagtcgtgaaatcgttttctttgccatacttatgttatttaaaagttgtataatcattgattcagaattattgattttgtagattcagcgtatggcaggccaccagtgccgctgtttccgtacggagtcgtgatttgcccaaactgatcggaacaaatccctgttcgatggctttcttgacttcttcttcactgaaatctccttcgggacctatcaggacaagggcgtcttctccgggtttcaggacattctttaataaaggtttttcaccttcataacagtgggcgataaacttctgtcctttgaactcctgtctgatgaacggatcgaattcgatcatctcattcaatttaggcaaccgtgccttgagagattgtttgattgctgatacaagaatcttttcaatccgttcggtcttgatgactttacgttccgagaaacggcagttgaggaaagtcagttcgtcaaatccgatttcggtagctttctctgcaaaccattcgttacggtccatgttcttcgtcggtgccatggcaatgtgtaaatggcacggccataacggttcctgaaaaatcgtttctttgatcgttacaaaacaacgtttgttggtcgcaacagtaatttcagctttgtagaagttccccttaccatccgtaagagtgatttcatctccgatacctaatcgcagaacgcgggtacagtgttgtgcttcctcttcgggaagttcgttgcttttctgtatatcgggagtataaaatacgtgcataatgttacttactggtttttatttcttgaattgatttggtcacgtatccgggcggctaattcataattctcatctttgatagcctgttccagtgcttcctcaagcgttctggaagtagcacccggcaaatcatgttcttcttcagcctcttcgtcgttatctgtttcttcagaacgggttctttcttccgacgacatgtgaagacattcctgttcaagaatagattcataaataaggatcgggcagtcagcacgcactgccaaggcaatggcgtctgaggtccgtgcgtcgatgcgtataatctcttcgtctttcttaaggtaaatataggagtagaaaataccatcctttgctttgtaaattaacacacgtatcagactggttcccagtatggtgagacttgttataaacagatcgtgtgtcaacggacggggcgtttttactcccttcagatataaagcggtagcctgggcttccgcgggaccgatgatgataggcagttgccgttcaccgtccacttcgcctaatagcatagcaaacgcgcctacttgcgcctggctgttcgtgatatttataacttgtaattctacctttttgtccatcgttctcttttacttaatttgttttactctcctgctggtgtttgtacttgaatactaaagcaaacaagatgccgatcaccagcgcgtatgctgcgaatatcagccagatatccatccattcgcgactcaccagtctgccgtcagcatacacagagaatgcatctactaccgcaccgctggcatatccgccaatgatggctcccagtccgttggtcatcataaagaacaacccctgtgcactggcacggatggaagaattggcttcttgttcaacaaacaatgaaccggaaatgttgaagaaatcaaaggccataccataaacgatcatggaaaggatcagcatccatagtcccgatcccggatctccaaagccgaacagcccaaaccggaacacccaggcaaacatactgattagcatgacttgcttgattccgaaatgacgcaggaagaaaggtatggcaagaataaacagtgtttccgacatctgcgagatggacagcaggattaccgaatgtttcactccgaatgactctgtatattcggggatgctggcaaagctacttaagaaaagatcaccgtaagtatttgtaatctgcaatgccgcacctaaaagcatggagaaaaggaagaaaatagccatcttctttttcttgaataacaccagcgcatccagaccgaaagcggagagccatgatttgttttctgatttagccggtcggcaagcgggaagggtgaaagaataaagcccgagcagtaacgcggaagcaccacctacataaagttgtgcacttgaattcttaaacccggtaaggtcgaccgcccacatggcacagataaaaccgatcgttccccatacacggatgggagggaagtctttaatcaggtcacatttatattgttccagtgcattgtacgatacagtgttagcgagggatagcgtgggcatgtataccaacaagttgagtaacatggcccaatacatctggtcgtatcctgttgcggtagaagcgtagaagaggcatccggctcctgcgatatggcaaagcccgtataaacgttctgcattaaaccatttatcggcaatgataccaataatacccggcattaccaaagaggcaatccccatagtagcgaaaatggctccgatctgtcctccttcgaaatgaagttctcttcccatatagccacctagtgatattaaccaggacccccatacaaagaattgcaggaagttcataataatcaaacgaacttttatactcatgacttttttaatttgtgtttctcttcacgttcataaaccttgcaaatataatattttcattgaataggtagactagtaatttgataaaaaggggataaaaatggcataaatgcgaagaaaagaagagatttggtcgtgaaaaaacaaatgaagggggtataaaaaaaagaaggctatctatcccagacagccaatctttgttaaccttaaatctaataccatgaaaaacacagtgcaaagatagatggtttatgttatacaacataatgttttctcgaaaatcttctgtttgttaactctaattaactttgaatcctccatttttctgttactgcccttctgtttcaccacagattacacggattaacacggatttttattaaccaatcatcatatccggattctctgttctcaccttagaaaaggaaaaggacttcgtgaagccctgtgccaccctgtggaactcctgcatgactttgtgataaaaatctgtgttaatccgtgtaatccgtggtgaatccggttattctacataaagtaccaggcctttcaggtattctccttcaggatggtagatgtttaccggatggtcggcgggttgagtcagttgatgcaggatgcgtacactacgtcctgatatggctgctgcggtaaacaccgcagtacggaaattgtccttgcttactacttgcgaacaagagaaagtaaacaggatgccgcccggtttgattttctcgaatgctttggcattcagtttgcgataaccttgtaaagcattccgcagggcgtctttatgtttggcaaatgcgggcgggtcgagaatgattaaatcatactggtcgcccatgcggtcgagatatttgaaagcgtcctcggcaaaagcctcgtggcgggaatcaccggggaagttcagttctacatttttattagtcagatcaattgctttggcagagctgtcgacagagtggacgagctttgcacctccgcgcatggcatagaatgagaatccgccggtatagcagaacatattcagtaccgaacggtctttggcataacgttccagtaaagaacgattttcgcgctggtctacaaaaaatccggtcttttgacctttcagccagtctacatggaactgcaaaccatattcttgcgcgatattatcactgcttcctcctttcagaaaaccgttttcggggaaaagatctgctttaaaaggaagagttgtttctgatttataatagatattctcgatcttgtcacccattacttcggataaagcttcggcaattgtcatgcggtctacgtgcattcctgcagagtgtgcctgcatgactgcagttttggcataaacgtcaataaccagtccggggagattgtctccttcaccatggacgagccggtaagtgttgttggtcggattggtagcgatgccgatactgcgacgcatatcgtatgctatttccagtttgcgtttccaaaaatcgtgatcgataggttcctgatggaaagacagtacgcgcacagcaatacttccgatctggaaatgtccttcggcaataaattcttttttggaggtgtatacttctacaacttcaccttcatcgggctctccgtcaaaacgggcgatagcaccggaaaaaatccaggggtggaatctcttaagagaatcttctttaccgggttttagatatactttatgcataatatagcctttccctaaccttctcccagggagaggaggattgagatagttttgttattggttattaattacttattttattatttatcacttatcacttatcatttatcgtctatgactgctgattgcttatagggccgatagtgacttcttccctttctttgggagcaggtgggagagcagctatttcccaatctcctgtctgtttcagttcttgcaacagattatagatgttgaggcaagcccatgcatccgtggcggcatattgtttctgtccgtcgctcaatacatcagcttcccaattggacaagcgctgtgatttggatattttttctttgaataagatggcataaatcttttgcagacttttgtcctgtataccgaattggcgcacatagtcctgcaactcaatacagctttgttgagtgaaaggtgcgcgtttgtgcagcatcataaagtcatctttcagtgaaaggcccactttgattacagccgggttctctaataagtcaaccaatggctgggtcaatcccgtcatgttgagccggaataggaaacaacattcttcagaagaaatctggaggagtgctactttgtgcgattgtcctttggtaaaggaaggacgcgtttcactgtcaatgcctatcacagatctggattggaggtaagctactgctctttccgtttcagcttccgactggataacgtaaattcgtcccggaaaaacagttctcgggagttcttttagttcatctttatctatggttcttcttacaatcatttctatatttattcatcatcgtggcaatggcaactgtcttcgtgacagtggcaatcattgtcgtggcaatgacagccttcttcttcacaacaatcgttgtcgtcgcttggttcgtaaaatccttcttcattaccgttctcttcctcctcctgttcttggttgtatttcacgtcatgaagggcgcgtagcgtgtttaccagtttctgtccccacagtgtaccgaagttttcctggcagatagccaatgaatcattcattgtttcgttcagtcccagttggaagacaaatatgaaatctttaatatcctgataaatgtcagccagatcttccgatattgatttcttgataggctggtcgctataaaccatatcttgcacgaatacgtccagataatcatccttgtcacccatcaatcctgaaagattaatacgcagaatttcgtaaatctcttctgtgacatacgtttcgggtgcctcgtccccaatcgtctcacatttgggtagcatagatgctttgagatagagcagggggagtatttttaatgatgtgtcaacgaaagtactacgcttcatgcgttcggcacgttcgagaaatgcacaaaattcggcggctactgtaacgaactcaattacgttcttatcaaatatcgtttggctttctttttccatgatctatattgatttgaaacgcaaaggtaagaaaaaggattgaatgagcgtagtgctcgttatttttttattatttttgcggcttagaatctcattccagttttataaaaatagaataaaagactcatggcaaagaagaaattagataaggaggcagaacgcactccctcttcccccagtaaaattgtggctgtatgtaagaatgaaactgttcattttgtgattggattgatgctggtcatcttttccgtttacctgttgttggctttttcttccttcttctttacgggggctgccgatcaaagtattatcgatagcggtagttcggcggatttggcggctgttaataatcaggtgaagaattatgccggttcacgtggagcgcagttggcaagctatctgataaacgactgtttcggcatttcctctttctttatacttgtttttctggcagtggcaggattgaagttgatgcgtgtacgtgtggtccgcttgtggaagtggtttattggttgcacacttttattagtctggttctccatattcttcggatttgcttttatggatcattatcaggattctttcatttatctgggcggtatgcatggatacaatgtcagtcgttggttaatctcacaagtaggagtacctggtgtatggatgatcctgttgataactgctatctgtttctttatatatataagtgcgcgtactgttatttggttgcgtaaactttttgcgttgagcttcctaaaacgcgaaaagaaagagaaagaagaagtcatcccggaaggggaaggcgatcaggaattcacgacttcccaaccgcaggaagtggagttcaatttgaaacggacgtataaacagacacctcctccggcacctgtaatggatatacaggctgaagaacctgaagatgaattccctgtcaaccaaccggagccggaagagtctcctttgtctgatgaaagtgaaggagtgacgatggtgtttgaaccgactgtttccaaccctgttcccgctgtacaggacgaacctttggaagaggcggaacccgggtttgaagtagaacctgcgacttctgaagaagaatatgagggaccggaacttgaaccttataatcctactaaggatttggaaaactaccgcttcccgactatcgacctgatgaaacatttcgaaaatgatgatccgacgattgacatggacgaacaaaatgcaaacaaagatcgtatcatcaatacattgcgcagtttcggaatcgaaatcagtacgattaaagcaacggtaggacctacggtaactctatacgaaatcactccggagcaaggagtacgtatttctaaaatccgtggtttggaggatgatattgcattaagcctttctgctgacggtatccgtatcatcgctccgataccgggtaaaggaacaatcggtattgaagtgccgaacaagaatccgaagatcgtttccggacaaagtgtgatcggaagtaagaaattccaggaatccaaatatgatctgcctattgtattgggtaagaccatcacgaatgaagtctttatgttcgacctttgcaagatgccgcacgtattggtggcgggtgcaactggtcagggtaagtcagtaggtttgaatgctattattacttccttattatataagaaacatccggcagaattgaaatttgtactggttgacccgaagaaagtagaattcagcatctattcggtgattgaaaatcatttcctggccaaacttcctgatggaggcgaacctattattacagacgtaacaaaggttgtacaaaccctgaactctgtttgtgtagagatggatacccgttatgacctgctgaagatggcgcatgtacgtaatgtcagagaatataatgagaagtttatcaaccgtcgtctgaatccggaaaaggggcataagtttatgccgtatatcgtagtggttattgatgagttcggagatttgattatgactgccggtaaggaagtggaacttccgattgcccgtattgcgcagttggcacgtgctgtcggtattcacatgattattgctacacagcgtccgactaccaatatcattacgggtacgattaaagccaacttcccggcacgtatcgctttccgtgtatctgccatgatggactctcgtactattcttgaccgtccgggtgctaaccgtctgattggtaagggggatatgctcttcttgcagggagctgatccggtacgtgtacagtgtgcctttatcgatacgccggaagtagaagagattacaaaattcattgcccgtcagcaaggttatcctactccgttcttcttgcccgaatatgtgagtgaagatagtaatagtgaagtaggggatattgatatgggacgtcttgatccgttgtttgaagatgcagcccggttggttgttattcatcagcaaggttccacttcattgattcagcgtaaatttgcgattggctataatcgtgccggccgtataatggatcaattggagaaagccggaattgttgggcctacgcaaggtagtaaggcgcgtgacgtattgtgtattgacgataatgatcttgaaatgcgattgaacaatttacagtaacagttcgtttattaatcaaatgagaaagtacatttttagtgttttaatagctttactgtctttgcctgtgattgctcaacaacagcagtcccaggctaaagtcattcttgacaaaacggcagaggcgtttcgtaaagctggtggcgtgaaggctgattttactgtaaaggctgtggcaaacggcttggtagaaggtgctgaaaacggaacaattcagttgaaaggagagaaattcgtactgaaaacatctgatatcatcacttggtttgacggaaaaacgcaatggagttatgtgacaaagaatgatgaagtgaatgtcagtaatccgacgcaggaagagttgcagcagataaatccgtatacctttctgtatatgtatcagaaaggattctcttataagttgggggcgactaagacgtttcgtggaaaagccgtttgggaagtcgttctgactgccagggatcagaaacaggagttggaacgtatcactctttttgtgacgaaggacacttatgaacctctatatattttgcttcagcagcgtggacagcagacacgtaatgagataaccgttacaagttatcagacggggcagaattatacggatcgtgtttttacttttgataaaaaacaatatcccaatgcagaggtgatagatttgagataacatgtttttataacaaaacaataaagataaattaaaatggcagaaatagaaaaagtgaaatgcctgattataggttcaggacctgccggatatacggcagcgatttacgcaggacgtgcaaatttatgtccggtactatatgaaggattgcagccgggcggccagttgactactacgacagatgtagaaaactttcccggttatccggaaggtatcagtggtccgcagttgatggaagatttgcgtgcacaggcgagccgtttcggaacagatattcgttttggtatcgctacggcagcagatttaagcaaagctccttataaaataacaattgacggtgataaagtgattgaaacggaatcattgattattgctaccggggcaactgctaaatatctgggactggaggatgaaaagaaatatgccggaatgggtgtaagcgcttgtgctacttgtgacggatttttctatcgtaagaaagtggttgctgtagttggtggaggtgatactgcttgtgaagaagcggtttatcttgccggtcttgcatccaaggtatatctgatcgttcgtaaacctttcctgcgtgcatcgaagattatgcaggaacgtgtcatgaaccacgagaagattgaagttctttttgaacacaatgcagttggtttgtttggtgacaatggcgtagagggtgtaaacctagtgaaacgttggggtgaaccagatgaagaacgttatagtttacctatcgacggtttcttcctggctatcggacatcaaccaaatactgaaatatttaaggagtatatcgatacggacgaagtaggttatattattacagacggtgatagccctcgtacgaaagtgcccggagtttttgcagcaggagatgtggccgatccgcattatcgtcaggctattacagctgcgggaagtggatgtaaggctgccttggaggcagaacgttacctttcttccaaagggcttgtgtgataaatatatcttcggtgtaaacgaatgaatgataattatgccttttggggtgtgattgattataaataaaacggtgaacattagtattaaactggcgttcaccgttctgttattcaggtccggaataaatgatgcggattccacgccctgttgagtcagcaccgtgaaatccgcatgaaatatagttagctttgtttaataagcttctatttcatcaatccataattcggcaggaataacttccgggccattgttcttttcaaagttaaccccattgcgcagtgtgccgccattcttaatcttaactttcaggaaggtagcctgtgttggctcaaattcaatggaatcagtgaatgcaattcgtcctgtttccggataatcgtgtttcaaggctttttcagctaccggagtgtattgtttgccatctgctgatacttctacggcaactcctcctgcaggaagaattctcatagccggattgaataaagagccgaaaattattttgctgatttgtgtcggcttatccaaattaacgataaattccaagtctttaccttcaacaatgccgaagctgcaccacggagtataagaagcgttattacctcgtttaccgttggtcagtccgaaggttgtcttgtcagctcctaatacatcgttttcatcaaatatatcgcctgtccatcccatcttataattaacagtatagggctttcctgttaataaattaccatacaatggtttgtgagctactttccctaacatctttccgtctttgaaagcaacagctttcaggtcgatatttccttccagagcgaaaggcttttcgtacagagtggatgctttgtttggttcactgccatccgtagtatatcgtatttctgcattcggatagaaactttccagcattaccattaaaggagcgttttcatccgcgtgcgtatttacgtttacgtcaaagaagttgagacaaggtttggtgttcattacttccaaacgttcaaattcagttaccattcgttcgcagaaattcttccagtctttgtttgcgttttgtgtccaggccgtttcggcaatagccattgcacgcgggaaggcctgatagtctgtacgttcggaagtctgcatatattctctccatatattgccttgtattccgatgatatgcttcttggcaagctcgtctgcatcatccgggacagggttgtaactatatgtttttttcagtgtgttgtatccgccgatagtagtcggggcaatttccggttcttcctggtagtagtccagatatacataagggttcggagtcataatcgcattatgtccggctttggcagcgttcattcctccttctacaccacgccatgacataacagtcgcatttggagccagaccaccttcgaggatttcatcccaaccaatgatgttcctgcctttgccattcagatatttctccatgcgggtaacaaaatagctctgcaacttatcttctttactatgctttattccgtccgtcttgctgggagtcgtatcatccttcagtcctaactggcggattagctgctggcagaaagcactgttcttccatgctgttttgggacattcgtcgccaccgatgtgaatgtattcgctagggaataattcaattacttcatccatcactccttcaaagaatttgaaagtcgtttcactcggacagaacacctgttcgaatacaccccatgtaggagatactttataagtctgtgtagaatcacatgacagttccggataggcagccagtgcagccaacgcatgtcccggcatttctatttcgggaacaacgttgatatatttacttgcagcataagctactacatctttgatttgttcctgtgtgtaataccctccgtgttcttttccgtcgaatacttgcggataatttacatagtaatagtctaccaatgtcttttcacgtttagaaccgacttctgtcaatttaggatatttcttgatttcgattctccatccctgatcgtctgtcaaatgccaatggaaaacattcatcttgttcattgccagcaagtcgataaacttgtaaatatagtcaatcggtacataatggcggcaaacatccagcatcagtccgcggtgaacaaaacggggcgaatcttctatttctacagcaggaaccgaccagtttgctttcttatccaactggtttccgtaaaccgccggagggagtaactgataaagtgtctgtacgccgtagaagaacccgttcggttgagaagcggtaagcgtgatgagactgggagtaacggataatttatatccttccttcggcataccttcctgcacaacaaagcagattgctgattttccatctgcactttctgcctctttcaacgagattcctgctgtcagttttagttgtccggccaggctgtcggcaatgctttttacttccggagcatccgaaggtactacgaggcagactttgctgtttagttcaaaacgtccttcctgtgggagaatttgattgggtttgggaacgatgttgtactcgttcaccacttcttttgtcttttggcaaccgggggcaatcataagcaaagacaaaagaagaagagaaatacttttcttcatggtcaaaatgtgtgttaagttataaatagatttgacagggcaaatgtacttgttttaatgataagttccaatgatatggaaataaaaaagccggaatgatgtccggcttttagctaaagtttcagattaatgtagttatataataaagagagagtttttatttcagtagttgctcttcgatgatttgcacatacttttccggcgtagcaccaacctcgattatcggtttgccgcctaccgggatgaagaataacgtaggtaatgcttgtacactgaagtggctgcataaatctttttctttatcagcatttaccttatagaatataacttttcctttatatttttcggccagcttttccatttccggaagtaaacgcatgcaaggtccgcaccaagttgcccagaaatcaatcacaaccggtttgtcgccattataaacgaaatcatttccttttcgatagtcgaaaatgtgttcgaggaagaactggcgggtaattggattcaatttaccatcttcaactttggtttccgtcactttagcttccgcttccggtataggaaccatgtcaaacggctgaaaataaattttctgatgaatatagtcgatggatataattccgtagtccagtatctttttgcctaatacggaacgtttcaagaatgggtttttcactgctatggcatcttcaatctttgtttttacaaacatcgtttcaggtaggatgaggctttcctcatcttgacttatttctttatatccattggagactttttggttactccctttggtatattgtgcgctccatgtattgaaatctgcttcagtaagattcactaatccttcactccatgtatccagaacaaaagatatcggctttccctgaatgtttatcgggcatactactcctaatcctgttatcaggttaaaattttcccgatagttaagtttcatataagaaggacggtagggttgtgtaatcgtaattttcttccgttgcatgtcaatggttaatacagaagtgcggaaaacagcaccacttaatacacccataacccctagcttgcgtagatagggttcgtcttctaatgtgaaagccggaagatcgtttgcaaatgtatttttaccaatagctactgttcccatttcatatacctttccaacaggcacctgtttaaatacaaaatcttggtaagaactaaaagttcctctcttttctgtattgatgtgtaactttttgagagcttcaggaagtagagcgttatgtcccgataaatcaaggacaaagtcagccacttcaccatttatagtggcttccacgataatttttccatcaatagttttgaatggaatgacctctgtcatactgttttgtgtttgtgcactgatgcctcctgtgatacaaaatgcaagcaaacagagatacattttagttattattcgtttcatatattctttctgtttaaagtttatttctctttcctgatttcaattcttttctcttgattatcttttttgatgataatatagccggtatcaccaggtatagcattcataatttcttctacggccatctggctcatggggcaatctttaagagaagttccgttgatattaatcacttcgtcgccgaaagcaactgtatctttcatgctatcccatatagttgtaatttcgaatctttcgttacgcggtaatatgcttacgttccaaagagcgggagcaccacccatgtcgattttcccttcttcaaatgggaggaagtaaaaacgtctccgcatataatcaataattactttaccatattgcagtagatccaccccgatgatagttccattcatgacagttgttgtactacctacgtttgtgaattcttttcccatgatattgatggaaggtacagatacttttttaatatccaccggcttgcccaaccctgttattccggcagctacgataccatatccatgattggtaacttgcgagatgtcagccagcctgttgtaatcttccgtagaataaagtagaaagcctcctgcacctgtgtcgaatagaacttttaaatcattgtttcctaagcgaacgttgacaatggaatgatgttcagtttcatctaacagcggaattccatctgtaacctttaacttttcgggacgataaggatagttgattaccattattttagaacgggaatcgaatgttactaccgactgtgcaaaggcatctcctccaagaattccgacaactcccagttctgtgaagaatggattcttaggtagtaccatcgttttcaactgtttgattttgtagttctttccgatggaaatattttgtacgtgggcttcctgatagttggagccttgtgcattcacatcggaaatgcgcatatatcctgcggcagtagctttcatttcagttgcggcgtcatacatagtcccggttcttcctcctgtatcgacgatgtattttacatttacaccattaacagtaacgggtataatgattttctcctgaatgaattcataaggaatggtatcgcaaactttattctggatttgcgctatcgtttcttgtccgcagtttagaaataatagcagccataagccggtcagtattcctattcttttcatgtcattcttttttatagataatattctttattccggaagcagtctcaatcgttagcttcgtctgctttttctctttcaattccggtattccgttcagaatactttcgcagaagtcatattttttagcaggtttgccattaatcttaatcactttgtctcctacttctatcttacctttcgtgctgctccagacggtggatacatataagtctccgtctttgaccgtcaaatcgaagttgttgcattgattgttgatttcattatccggttggaaagcttcaaaatagaatcttccacgtggatagtcgatagtcacttttccgtattgtaataactttacacctagtaatgtgtaagggtgtttgtctgtatgggtcgttaagttgcggaatttggtggctcctactgataataagggaatatgtactctatatgaagatgctttatctgcttgtccggctactccgatacttccttccccatatccttcagaaacgacttccatagatgcctccggtttaattctctcaaaatcactttcaataagagataacagactgggactgcctgtatcaaataatac

SEQ ID NO: 8087 - DNA, 5583 bp, Unknown
  gut microbiota DNA sequence
caatgaactggcttatcatagccagggtatcaccggacgctttgcttattattataatcagaagtatctgatggaatttaacttcggttacaatggttccgaaaacttcgctccgggcaaacgttacgggttcttcccagctggttcaatcggttgggtagtctctgaagaggaatttatgaaaaaggcttcctggattgacttcctgaaagtaagagcctcctatggtttggtaggtagtgacaatgtcagcagccgtttcccatatctggctttctacggtggtggcagtggttatgatttcggtaataactttggtacgaatgtaggcggtacttccgaaggtaatctggctaatgcgaatctgacttgggagaaagcccgtaaactgaatgtcggtattgactttactaccctgaaccaacgtttggcattgacgatagatgcattttatgaatatcgttttgacattattacagatatgaatagtgacggtatcatgggatatccggatattgtaggtaaagatgcagctttacagaatctgggtgaagtaagcaaccgcggtgtggatatcgaattgagctggaatgataagattggaaaggatttccgttactatattcgtccgaacctgactttctcccgcaaccgtttggaatataaagcggaagttgcccgcaagaactcctggcgtaaagaaaccggtaaacgtttatacgaaaacttcgtttatgtgttcgatcattttgtagccgatcaggaagaggctgaccgtttgaacaagatcggttatcagccgtggggacaattaattccgggagatgttgtttataaggatttggatcgtaacggagtgattgatgatgaagaccgtacagcaatgggaaatccgcgtagtccggaactgatgttcggtattcctttcggtttccagtataagaactttgattttagtgtattattgcaaggtgcgacaaaatcatctattctgttgaatggggctgctgtatttgacttcccgcaatttgaacaagataagatcggacgtgtgaagaaaatgcatctggaccgttggacaccggaaacggctgctactgccaaatatccggcattgcattatggaacacatgataacaacaagaatggaaacagtagtttgtttttgtatgatgcttcctacctgcgtcttaagaatgtggaaattggttacaatgtatcacccaaattattacgtaaattccatgtgcaacaggcacgtatctatgtacaaggtctgaatctgttgacttttgataaactgggtgatgtggatatagatccggaaacgaaatccggagacggagcttcctggtatcctattcaaaaggtattcaattttggtattgatataacattctaaataagatagaaatatgaaaaagttatatagattttcagcaattgctttattggtcctgccgttggtctttacttcatgtagcgattacctggatcgggacgatgatgataatattacggaagcggacgtttttgcccgttacgaaaaagtgaacggactggtttccgacgtatacgcggctgcaaagaaagcagaccgtccgctggtgttcttcgagcacttcagcaacagtgccattacggacgaatgtgaaggaaccaacgtagagggaaacattacgaataacttcaataacggtgcctggaacccgaattctttgcccggtagtgtagggcaatattgggaagctctttatgaaggaatccgtaaagcgaacctgattatagaaaatgtacagaagtataacacgcccgacaacccacagcaggatggtgatcttcgcaaccgtatcggtgagatgtatttcatgcgtggttatttccacatgctgttattgcgtatgtatggcgaagctccttatattgaccgtgtgattaatgccggagataatatggacttcaagaaagaatctgttcattcgatggttgaaaagattgtgacggatgcgcaaactgcttatggcatggttcctaataaatatgtgaaaacttccgagaattttgggcgtgtggataagggagcctgtctgggattgatttcttttgttcgctgggtagcggctactccgttgtggaacggtgcttctcaatatggatacaacttgcgtcgtgtgtttgaaaatgagtatgcttatgatgctactcgttggagaaaagccaaagaagcggctaaagccgttctggatttcgaagtcggcggaaccaagcgttattctctctatacgaaacatgatgcaaatgatttcaaggatccggctgacggtaatctgaatgacagccgtgtatatgctcgtttgtgggatatgttttatgatatggatgcctttgccaatgagtatgtgttctttatgacgaagagcaaggatcaggcatggcagggtgatatttatccgcccagccgtgagggaagttcgcgccagcaaccggtgcaggaacaagtggatgaatacgaatatatcgtaggtgattatggctatccggtatattcggcagaagcccgcaaaggtggctatgatgatactaatccgtatgtgaaaggtactcgtgacccgcgtttctatcgtgatgtaatttatcacggagctccttaccgtaataataagaacgagtcgaaaacgatcaatacggcgagtggttccgataagattggtgctaccaatgcaactactaccggttattatttacgtaaattccaacaggagtcatggaacaaatccggtaacttcagtatcaatgcgcccgccatctggcgtcttccggagtttatttatatttatgcagaggcttgtaatgaattgggcgaggatatcgatgaagcttataaattggtgaatacggttcgtgaacgttcttttatgaaaccgatgccgccggaagtaaagactaatcaacagttgatgcgtgaatacattcagcgcgaacgtcgcgtggaacttttttatgaaggaaaacgtccgtggacttgccgcttgtatctggaacccaccagtaaggaagagctagcaaaggaaagcctttggaaatcgagcgggagtgacaattcaaaacgtacacagaaatactgggctgccaataacggtgcattgccccgttgccagcgaatgattaacggaatgcgtccggtgcaggatgagaatggggccattacggttgacggtgtgaaatatagaatggagcgtttctgcgtggaagaacgtacgttctctattcagcattatctgttcccgattcgccagagtgagttgcagaagacaccgaccattgaacaaaatcccggatggtaaaccggtaggaatgtataactttaaaaagaaaatcagatgaaacgaatctatacatatatgtgtctgttgcttttgtcggtattatcgtttgccgttacaggttgtgatgacgatgatgacgacgatgtggctaaagacttgatagagttgattgtgaacaaaccggtaatacgtatcgggcagaatgaggaagccaaagtgaatgtagtggttggaaacggaaactataccgtgagaagtttcaacactgccattgcaacggctaccgtttccggcgaattgataactgtaaaaagtggctcacagaatggggccactaccgtcgaagtaatggatggagaaggagtagttgccaatatttctgtgaatgtaggtgtatttgaattggaagtgaatgaaccggaggtgatcttggaagttgccggtgaaaagcaactgattgttagcatgggaaacttttccagcaatgatgaattgtcttatgaggtggaggatgaaacggttgtcagcatggttaatacagatcagttccgtcctttctatactttgacaggtttgaagaacggacatacaacagtgacttttacagaccataaaggaaaacaggcagtggttcaggtgacggtaaatccgatttctatcgatgtctccaacctgacaccgagagtgggagtcaacaataagatcatgattacggtagaaaaagggaacggaggttatagtctgacagcagaggatgaagagattgtagctattcagcaggtggatgacactcgtttcaatttaataggtaaaaaagcgggtatcactaccgtgtttgtcagagacgaagcggaacaggaattaagtctgaccgttacggtggtacaggcagataaagtagcgaacctaggtagcggtaattactttaaagtaccgtttgaatataatggtacggcagatgaatcgctaaagaatttgagtacgatcacatttgaggctcgtttcaatattgagtcgttgaatggcaatgacaatggaaatgcccggattaatacggtgatgggtatagagaagaaattcctgctgcgtgtcgacgtgcataagggaggaagcaatgatgaagaacgtttccttcagcttgctgcagatgataaaggtagtattcgctatgagggctctactaagatagaaaccaataagtggtatgatgtggctgtggtattggataatagtaagagcggaagcgaacggattgcattgtatgtaaatggtgtcagagaaacgcttcaattatcaaacggtacgccggatgatttgaaagagatcaatcttacttctgatttctacatcggccagtctgatggtaaacgccggttgaacggagctatcagttatgcccgtatttggacaaaagccttgtcggatcaacagatctccgagcagagcggcaagttgttgagtgaggataaggatggaatggtagctaattggttattcaataatggaaatggtaataccaagacatttgtgtccttggcaggaaagagcttcgaagcagaggcggcaaatattgtttcaagttggaaaacagatccgatattggaaacaagtgctcctacagaatgattgtaagaagataggataataaaaaagccatccccggaatagacgaaagtagggatggctttttttgtagtgtgcttactattcttcggcagactatgtcctgcatgttgttggcaaggttattccttgacaggctcagccggtttgtcttttgatgtagtgtctgtgacaactgtatcattgacattggcggcgagtgcaaccagtgatgcctttgcaggcgcgtcttctttagttacagtatcttttactactgtatcattgacaactgttgcattgatttctgtcggggctgtcacagcttctgcagaactctgagcctttacaaggaatgaaccaccacaaacaaacataaacattgctactactaatactaattttttcataatcgtttgctttaatgattattagacatatgttttcaattctctacctttgtgttaaggaatcggttattgcttttcgctaacgcctaattaaagatcaaagcgcgtgccaaaattagataatgtatgataagtgattgataaataagggaatgaggaagatgatgccaattaggatagtggggaagtatgtgtggagtgtgtggaaactgtggcggggagtgtggaattattccacactcccc

SEQ ID NO: 8088 - DNA, 15544 bp, Unknown
  gut microbiota DNA sequence
attcattgactttttaaataaagaatagtactgatgtaaaatattgtttgttttgtttgtgttaaatgaagtgcggtttcgtgagaaagtgcactttgttaaaaggaggattaagtatttaatcctcctttttaatgaataacatcaaccttttatagaaaggatgcttggtaagggtggaagcatctcctaatataacaagtttcattcgtgcccgcgtaatcgctacattcattcttcgcaagtcatttagaaacccgatttgtccgtcctcgttggcacgtacgagactgatgaaaataacgtctcgctcctgtccctgaaagccgtctaccgtattcacggtgatgaggctgcggaaaggacgtaaaaagctgcttccttttatttttcctctcaaatattgcacttgtgccttgtatggcgaaatcagaccgaaatcaattctttcatccagtattcgctctttgccgatacgttcgatgtaagtttccagttcttgcagtaataggttggcttcctgcttattgatgcgtccgaagctttcgcctacaaaatcttcgtgaaagtccatctctgaagtatcgatccagttcatgggagtgtcgaaatcaagaatcccccgatagcgtacttccggagcagcttccagttctccgtgataaaaccagtcggagggaaactgcatgatggtttcatgcattctgtactgtacttttaatagagagaccgcggaaggtttttgctgaacgactttttccattaatgtatgatccaatcctccacgggaggcttctatacatttgatagttggcggaagttgacaatgatctcctgcaaggatgacccggtctgctttgcggatagcgatccagcaggcagcttcgagggcttgtgcagcttcgtcgatgaataaagtcggaaaacgacgtccgttgagcaggcggtggttgctgctgactagggtagaagcaatcacacgggcactgtcgaaaagatcggcattgatttgtatttccaactccgtggcacggtcgcggagacgactcatgcgattacgcattccttcccgttcagaataactaccccggcgcatccggctacccatttcgcggatagatttacggattccccaaagctccggataggcaggatgactttcaaaccggcgttcgtaggtggatgaaagcattttgtcgttgactcgggttggatttccaatacggagcacgggtactccccggtctaccagtttctcacaaatccagtcgacagccgtgttgctttgcgcacagacaagcacttgtggttcccggtgtaacgtttcgtaaatcgcttcgacaagagtcgttgtctttccggttcccggaggaccgtgaacaatagatacgtcacgcgtacagagcaccttgttaacagctgtttcctgtgtactgttcagccatggaaagcggacaggatataattcgcggaatcccggcttttgggtacccagcaaaatgtcacgcagttccgccaggcggttgtccttggcacgtatcgtgtcttccagtgcctcgaacatggcccggtaggatgtttcgtcaaaataaagttgtacccccagtataccgtcagtttgcagttccgctaaagctcccgctccggggagtacaacgaccattcgttcttcgtcggcaaagctgacggtagcgatgaaatccatatacttcacttttccttcgaatgactggtggaaaaagcaaacagggcggccgaactcaaaggaatgctctatttctttattttcggtccgtgtaatatctattacaagctgattcagcgaattgtagtaacttcggccaagagagacaggataccagcagagaccgcgcttcactttacgggcaacgcccattgtttcggtctgccacttaaattcttccttctcatattcatactccatccgcaggaggagttgctgttgctgaaggtctataatgggacttttcggattattactcataataggcgcaaaggtaacaaatcttcgttccgggtagaaaaaatatttcattttgttaaacattactcgaacgtcgttcgttattttaatagatagactaaaaaaacaaaaagcaatatggtatatgatgtgactatgttagaagctttctacgctgcttataaaggaaaggtagaacacgtacgggctatactaaaacgccctttgacgttggccgagaagattttgtatgctcatctgtatgatgtagccgatttgaaagattacaaacggggggaggattatgtgaatttccgtcccgatcgtgtggctatgcaggatgcaactgcgcagatggctttgcttcaatttatgaatgcaggtaaggatcaggtggctgtgccttcgacagtgcattgcgatcacttgatacaggcgtataaaggtgcaaaggcggatattgctacggcaagactgaccaatgaagaagtatacgatttcctccgtgatgtatcttcccgttatggcatcggcttctggaaaccgggagcaggaattatccatcaggtagtgctcgaaaactatgctttccccggcggtatgatggtgggaacagactctcatacgcctaatgcaggcggactgggcatggtggctatcggtgtcggtggagcggatgccgtggatgtgatgacaggaatggaatgggagctgaaaatgccgaagattatcggtgtccgtctgaccggaaaactaagcggttggacctctccgaaagatgtaatcctgaaattggccggcatccttaccgtaaaaggaggaacgaatgctattatcgaatattttggtcccggaaccgaatccctttctgctaccgggaaagctaccatttgcaatatgggtgccgaagttggagctactacctctttgttcccctttgacgggcgcatggctacttatttgagagctaccggaagagattgtgtagttgattgggctgaatctgttgatgcagatcttcgtgcagacgacattgtgaccgacgaaccatccaactattacgaccgtgtgattgaaatagatttgtcagaactcgaaccttatataaacgggccgtttacaccggatgccgctactcccatctctgaatttgcagaaaaagtgttattgaacggctacccccgtaaaatggaggtgggcttgataggttcatgtaccaattcttcttatcaggatttgagccgtgcagcttctctggcaaagcaagtgacagaaaagaatttgagcgtcgcttctccgctgattgtcaatccgggttcggagcaaatccgggctactgccgaaagagacggtatgattgaagcttttgaacggctgggagccacgattatggcaaatgcctgtggaccttgtatcggtcagtggaaacgtcagacggacgatccgacacgaaaaaactcaatcgtcacctctttcaatcgtaattttgccaaacgcgctgacggtaatcccaacacatacgcgtttgtagcttctccggaactaacgatggcgttaacaatagccggtgatctctgtttcaacccgttgaaagacagactggtgaatcataacggagaaaaagtgaaactctccgagcctgtaggagatgaactccccttgaaaggttttgaacagggaaatgaagggtatattgccccgcacggagcaaaaacggaaatcagggtaaaaccggattcccaacgtcttcagcttctgactcctttcccggcatgggacggacaggacttgctgaacatgcctttattgattaaagcacagggaaaatgtactaccgaccatatctctatggcaggtccgtggctccgcttccgggggcatttggagaatatttccgacaatatgctgatgggagctgtcaatgctttcaatggtgaaacgaactgtgtttggaatcgttcgacaaatacttatggaacagtttccggtacggcaaagatgtataaatccgaaggtattccgtctattgttgttgccgaggagaattatggagaaggttccagccgtgaacatgcagccatggaaccacgcttcctcaatgtacgtgtcattttggctaagagttttgcccgtatccacgaaacaaatctgaaaaaacaaggaatgcttgctcttacttttgtagataaagcagactatgacaagattcgggaacacgatcttctgtccgtatcaggcttagtccatttcgcaccggggcgcaatctgacgattattcttcatcacgaagacggaacgaaagaaagttttgaagtgcaacatacctataatgaacagcagatagcctggttccgtgccggttctgccttaaatgcaagataaaaaatgagcaaaataactatgcaaacagatggtacgctgttggtacccgatgtgcctaccgtaccttatattaccggcgatggagtaggagccgaagtaactcctgccatgcaagccgtagtggacgcagctatccggaaagcatacggcggcaaacgtcggatcgaatggaaagaagtgttggcgggagaacgtgccttcaacgcgactggttcctggttgccggatgaaacaatggaaacctttcaggaatacctggtaggaatcaaaggtccgttgacaactcctgtcggaggtggaatccgttcgttgaacgtagcactgcgtcagacacttgatttatacgtctgtcttcgtccggttcgttggtatcagggagtacagtcgcctgtcaaatcaccggagaaagtgaacatgtgtgtgttccgtgaaaatacggaagatatttatgcaggtatcgaatgggaagccggaactccggaagctgaaaagttctatcaattcctgaaagacgaaatgggcgtgacaaaagtccgtttcccggaaacctcttctttcggtgtgaaacctgtatcacgtgagggcacggagcgtcttgtacgtgctgcctgccagtatgcgctcgaccatcatttgccttccgtaacgttggtgcataaagggaatattatgaagtttaccgaaggtggtttcaaaaaatggggctacgaactggcgcaacgtgaatttggcgatgccttggcagatggcagactggtgataaaagattgcattgcggatgctttcttgcaaaatacactcctgattcccgaagaatattccgtaatagccaccttaaacctcaacggagactacgtatccgaccaactggcggccatggtaggcggtatcggtatcgctccgggagcaaatatcaactaccagacaggtcatgccatctttgaagcgactcacggaacagcccccaatattgcgggaaaagatgtggtgaacccttgttctattatcctttcggcagtaatgatgctcgaatattttgactggaaagaagcggctgctctgatagagaaagccttggaacaaagcttcttggacgctcgcgctacacacgatttagcccgttttatgccgaatggaacctccctctctacttccgctttcactcgtgagctcgtggaaagaattgaaaaacaaaagtaacgaataaaaaacgaagaaagatgaaaaaagagtacttgatttacaagctttccgaggaaatgaaggaagctacccggattgatacagaattgttctccaagtttgatgtgaagcgcggattgcgtaatgaagacggcacaggtgtattggtaggtttaaccagaatcggtaatgtagtaggatatgaacgtgttccgggtggtgggttgaaacccataccgggaaaactgttctatcgcggttatgatgtagaagatatttctcacgctataatcaaagagaaacgctttggcttcgaagaagtggcttacctattgctttccggacgtctgccggataaagaagaattgctttctttccgtgagttgattaacgacaatatgccgttggaacagaaaacgaaaatgaacatcatcgagttggaaggaaacaacatcatgaatattctttcacgcagtgtattggaaatgtatcgttttgacgcaaatgcggatgatacctcccgggataacctgatgcgtcagagtattgaactgatttcaaagttccctactatcatcgcttatgcttataatatgcttcgtcatgctactttcggacgttctctgcatatccgccatccgcaggaaaagctatctattgccgaaaatttcctgtatatgctgaaaaaagactataccgaactggatgcacgcaccctcgatttgttattgattcttcaggcagagcacggtggtggtaataactccactttcaccgttcgcgtaacttcttctaccggaacagatacttattcggccatcgccgctggtatcggttcgctgaaaggcccgcttcacggaggtgccaatattcaggttgccgacatgttccagcacctgaaggaaaatatcaaagactggacaagtgtagatgagatagacacttattacacccgaatgttgaacaaagaagtgtataacaaaaccggattgatctatggtatcggacatgccgtttataccatctccgaccctcgtgctcttctattgaaagaactggctcgcgaccttgcccgtgaaaaaggcagagaaagcgaatttgctttcctcgaactgttggaagaacgtgccatagctactttcggacgggttaaaaacaacggaaagacagtgtccagcaatatcgacttctattcgggcttcgtgtatgaaatgatcggtttgccgcaggaaatcttcaccccattgtttgccatggcacgtatcgtaggctggtgtgcacaccgcaatgaagaattgaccttcgacggtaaacggattatccgcccggcttataaaaatgtacttgatgatttggcttatatcccaattaagaaacgctgataagaacaaatccttttattgaatagataagtaatcccggatgtgtgcccgatcatttcagaagcacatccgggaaattttacattttctccttttttatgttcgtaaaagaatgtacttcagattctttctattttttgtatcgtcatttatctcatttttgttatttttgcgtgttataaaatagatcggtatgagtatagatacttttaatctgtttctgggggtgatgagcctaattgctttgtttgtttttatcgccctttactttgtgaaagccggatatggtattttccgcacagcatcgtggggcgtagctatctccaataaactagcctggatattgatggaagctccggttttcgtggtgatgtgcgtgatgtggatctattccgaacgtcggttcgagccggtgattttcactttcttcctcttctttcaaattcactattttcagcgtgctttcatcttccctttgctattgaaaggaaaaagtaagatgccgctggcaatcatgtcgatgggagttctttttaatctgctgaatggttatatgcaaggaaaatggattttctatcttgctcccgaaacgatgtatcaagccggttggtttacttcaccgtggtttattatcggcacactgctctttttcgcaggtatgctgttgaactggcagtcggattatatcatccgacatttgcgcaaaccgggagacacccggcattatctgcctcaaaaaggaatgtaccgttatgtcacttccgccaactatttcggtgagatagtagaatgggcaggttgggcgatactcacttgttcactttccggcctggtcttcctttggtggacgattgctaaccttgttccccgtgccaacgctatttggtgccgttaccgcgaagaattcggagacgcagtgggagaacggaaacgagtgttccctttcctttattaggggcgctttttatcatgacttacgtatgacttaaataaaatatcaactactatggaatctaaactttttagcccggtcacctttggtcctttgacgctgcggaatcgaacgatccgttcggcagcttttgagagcatgtgtccggagaatactcccacgcaaatgttgctggattaccatcggtcggtagctgcggggggagtaggtatgacaacagtggcttatgctgccgtgacacaaagcggactttctttcgaccgtcagttgtggttgcgtccgtctattattccccgtttacacgaactgacaaaagccgtgcacgatgaaggtgccgcagtaggtatacaaatcgggcattgtggaaatatgtcccataaaaatatatgtggtgtcactcctatatccgcatcttcaggcttcaacctctattctcctacgtttgtgcgtggaatggaaaaagaggagcttccggaaatggcgaaagcgtatggaaatgcagtcaatctggcgaggaaagccgggtttgacgccgttgaagtacatgcggggcacggctatttgattagtcaattcctgtctccctacaccaatcatcggaaagatgaatatggcggttcgctcgaaaaccggatgcgttttatggatatggtgatggaagaagtgatgaaagcggcgggcaatgatatggcagtttttgtaaaaatgaatatgcgcgacggcttcaaaggaggaatggagattgacgaatccatacaagtggccaaacgtctgttggaacttggcgctcatggattggtgttgagtggtggttttgtcagcaaagcgccgatgtatgtgatgagaggtgccatgccgattcgttcgatgtcttactatatgaattgttggtggctgaaatacggagtccgtatgtttggcaaatggatgataccctctgtacccttcaaagaggcctatttccttgaagatgcactgaaattccgtgcggctcttccggatgcgccgttgatttatgtcggtggtcttgtttcccgtcagaaaatagatgaagtgctcgattccggttttgatgccgtgcagatggcgagagcattactcaacgaaccgggattcgtgaaccggatgaaacaggaggaacaagcacgctgcaactgtggacacagtaattattgcataggacgtatgtatacgatagaaatggcttgtcatcaacatttgaaagaacaattaccttcctctttacaaaaagagattgataaactggagaaaaaatgagtgaaatgaaatgggcaatcatcaccggtgcggacggaggaatgggaacagaaataacacgtgccgtagccaaagccggttatcgaatcattatggcttgttatcatccgcagaaagcggaggttgttcgtgaacgtttgagcaaggaaaccggaaacccggatttggaagtaatagctatcgatttatcttctatgcaatccgtagttgcttttgccagtcagatcttagaaaggaatcttcccatctctttgttgatgaataatgccggaacgatggagacaggttttcatactacttccgaaggattcgaacgaacggtaagtgtgaactacatgggaccttatctgcttacccggaaattaattccgttgatggtgcgtggagcgcgtatcgtaaatatggtttcctgtacatacgcaatcggcaagctcgacttcccagatttctttcatagagggaaaacgggaacgttttggaggattcctgtttacagtaacacgaagctggctttattattgtttactttcgagctttccgaacaacttcgagagaaggggattaccgtcaatgctgccgatccgggaattgtttctactgatatcatcactatgcacaagtggttcgatccgttgacggatatttttttccgtccttttatccgtaaacccaagaaaggggcttctacggcaatcggtttactgttggacgagaaggaagccggtgtgacaggacaactgtatgtcaataaccaccggaaaaacttgtctgataaatacacgaatcatgtgcaaaaagagcagttgtgggaggtaacggaacgtgcgttggcgagttggctgaagtaggttttcttttctttttttatttaaattatccagtatttacttatatataggtattgtacatatctatatacctcatttttgttgtcttatttttaccaatagatagggattgtttggcatccctctttctgcttacctttgcatcgcttttagagcaatgaaaaggtataaagtaaaaaggtaaaaaggagatgagcaataaatattttttggtttttctggcattcttgttttccgtatccgtatattcacaacatgggcgtcaccgtagtagtttaatttcgggcagagtgatgtctacagagaaagaagtggtggattttgcgacagtttatctgaaaggaaccaaccaaggatgctatacagatgaaaaaggtatatatcatttgaaaactacagcaggtgaatatacacttgtcgtttcggctatcggttatcaaacggtagaaaagaaagttaaattagccaagggagaaagaataaaagtaaacgtcactatcgcaccggcggtaaaagaactgggagaggtgctggtcacgacatccggagtcggtcgtgtgaatcaatctgcttttaatgcggtagccattgatgcgaagaaattgcataacagtacgcagactttggcgggtgcactgactaaagtgcccggtgtaaaactccgcgaatcaggtggagtgggatcggatatgcaattgtatatcgatggctttagcgggaaacatgtgaaaatcttcattgacggcataccacaggagggagccggtgccgcattcgatttgaacaatgttcctattaattttgccgaccgtatagaagtctataaaggagtggttcctgtaggattcggaaccgatgctattgggggagtggttaatattgtcaccaacaagcaacccggaaagtggtttatggacgcttcctattcttacgggtcatttaatactcataaatcatacgtgcgcttcggacaaacgttcaagaatggttttatgtatgaggtcaatgcttttcaaaacttttcggataatgattattatgtagacacttacgtacgcgaatttgagattaaagaagatggaagcgtacgttttccgccacttgataaaaataagatttatcatctgaaacgttttaatgaccagtatcataatgaagccgtgattggaaaaatcggcctggtaggaaagaaatgggcagaccgtttggcgttgagtttcaattattcccatttctataaagagatacaaacaggcgtttatcaagatgtcgtgttcggtgaaaaattccgcaaaggacattcgttggtcccttctttagaatattacaaaaagaacttattggtgaaaaacctggatctgctgttgactgccaattacaatcataatatcaccaacaatgtcgataccgcttcgcgggcttacaactggcgtggagatttttatgaaaaaggtagccggggagaacagtcttaccagaacagtgaatctaaaaatagaaactggaatgggacgctgaagatgaattatcatatcggacaggcgcatacgtttactttcagtcatgtaatcagtgattttgaacgtacgagccgttctaccatcggtgcttcttccaaattcacggacttttctattcctaaaatcactcgtaaaaacgtcagcgggctttcttaccgtctgatgccgtcggacagatggaatgtgtcggcatttgccaaatattatcggcaatacaacaagggaccggtatcgcagaatacggatggaataggcaattatatcaatctgtccaatacggcaagcgctcttggatatggagcggcaggtacctattttatatggaaagatcttcaggtgaaactttcgtacgaaaaggctttccgcctgccgaccacggacgaactctttggagatgaagaccttgaagctggcaaaatgaatctgaaaccggagaaaagtgataatgtcaatttgagtttcagctataatcatcagtttggcaagcatggattgtatgccgaggccggtttgatatatcgggatacgaaagattacataaaaagaggactggacgtattgggaggaacaagctacggatattatgagaaccacggtcacgtaaggaccaaagggtataatttgtcattgctttatagcttctcgcgttggtttgatataggaggaacattcaatagcatcgatactcgtgattacgaaaagtttctggcgggttcctctttgcaagaaagcatgcactataaagtgcgtatgccgaatctgccctatcgttatgctaatatcaatgcaaatttttattggaatgacctgtttgtcaaaggaaatgtgttgagcatcggctatgatagctactggcagcacgattttcctctttactgggaaaatctcggagataaagattcaaagaatatggtgccggaacagttttctcataatctgtctttgtcctacaccatgaagaatggacgttataatgtatcatttgaatgtaggaatttcaccgatgcccaactgtttgacaattttagcctgcaaaaagcggggcgcgcattctatggaaagttcagagtgtttttcggtaaataataagagtaagtttttagtatcaatcaataataaagaatatatgaagaagtttttattacaggcttttgccgtagctttttgtttgagtagcggtgtgtttgtggcatcttgcgacgatgataataatccggtggataacccgccgattgatggagaaacggcttatgtggtggctgccacaactggtgaagcaagttatttggtagtagccaattctttggatgaaggaacagtgtcgactcaagggaatggaaccgaagtgattggcggtacctattgggtatataaaggactggattatgtgtttgctttagtttataataaaggtggcgcaggtacaggagcttcctattatttgggggcagatggtaaaatgaaagaaaagtacacatacacttataatcgtatcacgtcttatgggacctggggggataaagtggtgactgtttccaccggggactcgaaaataacggatgaggatcagaatgtggctcaagcattgttgttcaactatctggatgcaaccgacggcagtcaggaagagggtaccttgcttgccgaaaattacttgggtaatggtgaaaaagtttcatgggcaggtctggttgaagctaacaataagatttatacatctgtcatcccaatgggaatgagtaagtacggtattaaaaaatggccggaagctgtgacagatcaggaacttgtgactaagactgacggtggtagcggcagcggtgcatatacagccggtgttattccttctacacaatacccggataatgcttacgtggcaatttataatggcacgaactttaatgagactccggtgattgccaagactgataaaataggctatgcatgcggtcgtatgcgttcacaatattatcagaccatttgggccgctgataatggtgacgtctatgtgttctctcccggatatggacgtacggcagtttcatcttcagatttgaagaaggtaacaggacagaagccttcgggcgcaatgcgtatcaaagcaggcgcaacagatttcgatccggattactatgtgaactttgaagagataggcacaaaacaccctattttccgttgctggcacatctctgaagattacttcctgcttcaattgtataaaaagggagcggaagatatgattaatggcggtacaagtgcagatgtcagcgaattggctattttcaaggcggaagataagacgattatgcctgttacaggtctgccggctgacggaaagtttggtggcgagccttatggagaaaaagggtatgcttatatggctgtcactgtgactacgggcgagaaaccggccttctataaaatagacgcaaaaacaggcaaggcagtcaaaggtttaacggtagaagctgacgctatcactacggtaggtaagatggaatatctttcaaaataatacagtcggttaaatagagaatcttttgtatataaaagcctgccgagcggaaagctttgcaggctttttcaagaaataggattgaaaacatgaaaaaaatattcagaaagatacatttgtggctttccgtccctttcggactgataataactcttgtctgcttctccggtgccatgctggtatttgaaaatgaggtgaatgagtggtttcgacgcgatctttactacgtggaaacggtaaaggagtctcctcttcctatggataagttgcttgaaaaagtggcgacgacattgcctgacagtgtatcggtgaccggtgtcagcatatcttctgatcccggacgtgcgtatcaggttagtctttccaaaccacgtcgtgcatctttgtatgtagaccagtatacgggcgaagtaaaaggaaaaagcgagcgtagcggcttttttatgtttatgttccgaatgcatcgctggctgctggatagtatgaatccgggaaatgaagggatcttttggggcaaaatgattgtaggtgtcagtacgcttttacttgtttttgtactgatttcgggaattgtcatttggtggccgcgtacacgtaaagcattgaagaatagcctgaaaataacagcaacaaaaggttggagaaggttttggtatgacttgcatgtggcaggtggaatgtatgctctgatctttctactggctatggcactgacgggattgacctggtcttttccgtggtatcggacagctttctataaggtcttcggggtggaagtacagcaacgtgccgcccaaggacatgaacagaaaagtgatgctcaaaagagggataccaaactggcagcccatcgggaaaagaaaagagaaggaaatgaggttcgaaagggtgaaagaagcagacgtccggaaaacaatcacagtgatatgtactcggtaacttcaccattcgtttattggcaggagatttatgataaactaagacgtcagaatccggagtataagcaaatcagtatttcttctggtacggcaagcgtgtctttcaaccgtttcgggaatcagcgggcatctgaccgttattctttcaatacggataatggtgaatttacagaaacaagtctttatcaacatcaagacaagtcgggaaagattcgtggttggatttattctgtgcatgttggtaactggggaggaatgtttactcgcatacttacctttattgctgccttattgggggctgcactaccactgactggatattatttatggataaaaagactcataaaggtactgaaatgaatgaaattttttcctactataaagttgaaaaacataaaaacatctgccacctgcaacgaaacgcgtgtaatacactagttaatagatagttgtaacgttgcagatacctgtggcagataggttgcagataaagtatctgcaacacgttatataatcaaagaaaaagccttgattcctttatgcaaagctatgggataattggg

SEQ ID NO: 8089 - DNA, 8243 bp, Unknown
  gut microbiota DNA sequence
gtgcatattgagggacttggctattttgctccaatcttgcggagtacacaaaaagtgactcgcagcactaagaacaaatggtcgaaaatggagttgaaaacaatcggtttccgtccggatgctcgcctgcggggtgaattggtaggtgtcaaagccagccggagtaagtatgcgcgccattcggagtctttgtcggaggtggagatagatatgcggctgaaggaatatttcgccgagcatgacgtaatgcttcgttacgattttcaggaagtatgctgcatgacacggactacggcgaatcgtcatctccggcgattactggaagaaggcaaattgaaaaatatcggcaaacgtatgcagccgatttatgtggctgcagcaggttattacggggtgtctcgtgatgtgctccggcggtaaatggaaacgatttgaagtgtgtcggtgaaacctttggaagtagaatggaagggctttgcatggtcgctttcacccgctttcctgctctgggtggaggtttcaggaagaaggtgaaagcggtgaaggatgtagtcttatagatgatttactttcattgtttgattgaatagtaaggcttttttagttatctgttaaattgataatatatctgcttagaggggactatttaatagcatcgaacttcagtgtcccgtttacgtcgataattttcaaagtacggttaccctttattcccatatcaatgaaattgaccttgtataaaccatttcccaatgcagttactgatgttactttagatatgtcgcttggtccgtcttgcatacctgttcggaagttccatatcgcatatccttcgccgtcatactcgtagttatctttcagctgcttttgcaatttggctgtacaatgcttttttactgccggaacataattctttgctccaaaaacgtagtttgcgtagaaatctttgatgaactgaatggttttggtattgttcactttaggtgattgtagaataatggcagtcccattggcgagaacagcctcattgtcgagacaacaagcttgaatttgtatgggttgtagggcaaatcctagatgaatgatatataaaaataaaatctttttcatattcgtatattatgtattttgaaagtcttatttagatttagcgacctattgcaaagatagcgttaattacgaaaaatgaacgaagtatgtgagaaaaagataataatatcatatcaaaagatgaaatgaattgtccaaagccattttgataagagaggggaatgaatgttataattagcgatgaataggggatatttcgtttatctatacattgcagggcagccggatagtagcctcattgattgtactattctattaaatgatatagatttaatgtgtatctttgtaaaaaatgcaaaataaaatatggaatcaaaataaatgaaattagataattatgaaaaacattttccttcctaaagtaacgatgtgtataattgcactgtttactttaattttaccagcttctgcacaaaatacaaatgcgacagatgagtacaaagaaacgttgaagaaaatcatggatttttctggtacttcgactactacggatgactttctccagagattatcatctataatgaaattgaatgcgccgaaaaaggatgaggcttattggaatgagttctctaaaaactggaaagagaaagtagaaaataagatgtttgaaatgtatatgcctgtttatgagaagcatttaacattggaagaattaaaagctgttgctgcattttatgaatctcccgtaggtaaaaaatataaagaggcttcattgattgttatgcgtgagacaacgccgttgttagtgcagcaactccatacagagatgtccaaagaggtaatgccggagaaaagtgaacgagcaaaaagaggtgaacagcggttgaaagaatatgagcaaaagcagaagcgtgataaagaattatatgcacaagcctatatgcttccaagcgatagtatagttatagttcctgaagaggtgtatgagaaagcgtatgagaatgggaggtctacaactccttctttatattcgattgaaaggagaaagaatgatactaaagtgacattcatacaacctatttattgggattggcaatggttgtattatagtccaggatttaagattatcgataagaaaagtggcgatgagtataatgtgcggggatatgatggtggagctccgatggggaggctgttggctgtcaaaggatttaatcataaatatatttatatcagtcttttattcccgaaactgaagaaaagtgtgaaagaaatagatattcttgagttgccacacaaaaaagataaagaacagttgccttctaatgatgatggaaagtttaaatcattttttaatatagaggtgaaggattatcaggtcgtttccgataagaaaaataagaagatctattattagtttaaatgattattagaatttgaaatgacaatagcaggtattgaacataagtgtgaactgttttttttgatataaacttattccgtatgagaaaacgaattatgattttatgcacgttttgtgctattgctatattttcttctgcccaagagaaattctctatccgaggtattgctgatgaggaattgaataatcaattgttgtatttgtgtctgatggatgatggagagaaagccaaagaagtcattctcgacagtgcaaaagtgaaaaaaggaaagttctctttttctggtgtacgtcagacaccgaatattgcacttattaaggatagggatggagaaacctatccgttgattctcgaaaaaggaaagattgtgatcaatcttaccacaaggaccgtaggaggtacgccgctgaatgatactttggatgtggcttggaaaggaatgcagtcggtgataaataataacaaacaaatagtgaaaagtaatatttcacttgttatgagccagaaatccggagagagttttagagaagcactgaaacgggatactacatttgctgcaatatggcggagaaatgtggagatagatttggcacagagggattcgattcgcgcttttgtagtagaacaccaaaacagtttggtgggagtatttctgttatctttagaagaggtgtttatgtattacagtctattagaagatatgatgagcgaggcttctcctgtgttttcgcagcatgtattggtgaaagataaattagaaaaaatgaggcaaatagcccggcgttttgaggccgagcgtgaaaagaaaatgactccggaggagcgtgaagaacaaaagaaacggcaggcaatggacgctaagataaaaattggcgaacgttttccgaacgctaaggtgaaagacaatgctggagagataaaacagttgtccgactatgtaggtaaggggaagtatgtgttaatagacttttgggcttcatggtgcggtccgtgccggaatgaaatgcccaatgtgaaagctgcttatgagaaatatgcttctaagggatttgaggtgattagcatctctatagataagaaacagaaaccttggaggactgctattgaagaactcggaatgaactggatacaagtattgaatgtggatgctgctgatgtatatggtatttatgcaatacccaaaacttttcttgtagatcctaagggcattgttgttgcaaaagatttaagaagtaagaagctggaaaagacattgtttaatctgttggaatgattgttgtattatagtatcgtgatttgctaatctggatgaatttgttcgtattggtggacaattcatacttgctgtgacagttaagttatatcggatttcttacagcaagtatgaatagctatggcttaaatcagaagcccgtccaatagctctaaataaagtccgatagcttcttctatctctttcagcataatatattcctctgccgtgtgtgaacgtgacgagcgtcccggaccaatttttaccgatgggaaggacattaaggcttggtcggacaatgttggagaaccaaaaggaacgcgtcctaacttcatagctttctgtacaaatgggtgtttctcgtcaattcgtgaagaattgagacggaatgaacgagcttgggcttcacaggaaatatgctttttgatttcagcaaacagttcttcatttgagtaaagctcgttactccggacatcgacgatgaaagtacatttgtcgggaatcacattgtgttgtgtaccggcattgataacagtaacactcatcttcacgggacccaacaagggcgattctttctcaaaacgatagtcacggaaccaggcaatatcatccaatactttgtaaattgcattgtctccttcgttacgtgctgcgtggcctgctttacctgttgcggtaacatctagtaccattaatcccttctcggcaatggcgggttgcatctctgtaggttcacctactatggcgaacgaaacaggagggagcccctgtaatacactctcaatgccatccttgcctgaaacttcttcttcacaagaggccagataaatcagattatacttctgcgaagtacgacatagttgcaggaacacctgtaataacgaaacaacgctggcaccggcatcgttacttcctaatccatataacttaccgttttcttcacgtggagtgaacggatctttccgccaaccgttaaccggtttcactgtgtctatgtgggagttaagtaaaatagtcggcttcttcagatcaaacatcggactaaagcaccacacattatttcctttacgtcccgtctgcatacctgccatttcgatatagttttgcaggaaatccgcagcttgggtttcttcccggctgattgaaggaatactaatcagtgatttaagcaggcttacagcctctgttgtcatatacggaatatcatatttcatagtgcaaatcttttatctataccttaatatttgcacaaagatagtcgttttgagcaatagtttcaaataaaactaatacctttgtaccatatttactaatacaaagagtatgacttatcatcatttatctgtcctggtccatcgtcaggccgaaaaatatggcgacaaggtagccttaaaataccgtgactatgagacagctcaatggattcctatttcatggaagcagttctccggatcagtacggcaagcagctaatgctttcgtggcattgggagtggaagaacaagagaatatcggtatattttcacagaataaacctgaatggttctatgtcgactttggcgcgtttgccaatcgggctgttactattccgttttatgcaacgagttcacctgcgcaggcgcaatatatcattaatgatgcgcagattcgtttcctttttgtaggcgagcaataccagtatgatgctgctttcagcatctttggtttctgcacctctctgcaacaactgattatttttgaccgctcggttgtgaaagatccccgcgacgtatcgtctatctattttgatgagtttatggcgatgggagagggattacctcacaatgatacggtagaagagcgtaccgaacgggcttcatacgatgacttggcaaacattctctatacatccggcacaacgggtgaaccgaagggcgtcatgcttcatcattcctgttatctggaacagtttcatacacacgatgaccgtttgacgaccatgtcggataaagatgtatctatgaacttcctccccttgacacacgtgtttgagaaagcatggtgttatctctgtattcataaaggagtgcagatttgtatcaatcttcgtccggcggatattcagacaacgattaaggaaattcgtccgacactgatgtgtagtgttccccgtttctgggagaaagtatatgcaggtgtacaggagaaaattaacgaaacaacagggttgaagaaagcactgatgctggatgctatccgggtaggtagaatccataatctggattatctgcgtttgggtaagactcctccggtgatgaatcaactgaaatataaattctacgaaaagacaatctactctctactgaaaaaaacaatcggtattgagaacggtaactttttcccgactgccggtgctgccgtacccgatgaaatcaatgaatttgtccattcggtaggaatcaatatggtggtaggatatggcttgacggaatcgacggccactgtatcttgtacattgccggttggctatgatatcggttcagtaggtgttgtacttccgggaattgaagtgaaaatcggtgaagacaatgaaattcttcttcggggcaagacgattaccaaaggttattataagaaagcagaagctacggctgctgccattgaaccggatggttggtttcatacaggtgatgccggttactttaaaaatggccagcttttcctgacggaacgcattaaagacctgttcaaaacatcgaacggcaaatatgttgctccgcaagctttggaaacgaaattggttattgaccgttatattgaccagattgccattattgccgatcagcgtaagtttgtttccgctctgattgttcctgtatatgggtttgtgaaagagtatgcggaagaaaaaggcattaaatacaaagatatggaggaattgttgaaacatccgaagattgtaggattgttccgtgcacggattgatacactccaacagcagtttgcacactatgagcaaatcaaacgtttcactctgcttcccgaaccgttcagcatggaacgtggagaactgactaatacgctgaaattgaaacggtcggtagttgccaagaattatagtgagcagattgaaaagatgtacgaagaaaatgagaaataagcgatggacggtgaacgttaaatatgaaacggtaaaccgtaaacgataagtcgcaaacaataaaacggtgaacaaaatctgtgcaattggcagagttgttcaccgtttattatttataagtacatctccctaattagtttgtattgttttcatttttacaaattccttataaagaaaaacttcttgattttgatagtataaacttatttagaggacatacttagtttattcgttcctttttagtatccgaaaatctgctcctgcgtcaattcttcaataggacctacagctttcagcttatccagttccaaatccttcttatctctcagaatgcaataaacatgcgtgcgtccttttacccattgcttttggaaattggcaatgtttttcagcgtcatgttctgtatatcattgtagagcttgatacgtgggtctacgttttggcctaggtcctgtgcattgatataactccagatgatgtcacctttgatgatacgttcggtacgcaggcggttcgttaatccgtctttagccagtttgaatgcagcctccgattccggcatattctcattcagtccggagagtacgacatacgtacgttcgttgcctggagatacgtagaaagtacaagccaagcgatagaattcacttttcagttcctccggtgtcatgtccgaagtacccagagattatgtcaggaagagtgacaagcaagaaagtttcaatagtttgttcataatatgacaacattttaataacaaaaacaaaggtagcagatttttgcttatctttgtcccccgatatctgaattttgtaaataataaaattgtaaatcaaatgattactattgaacaacttaaagacgtgaaagagcgcactgatgcgctgaggaggtatctttgacatcgacgggaagaaaattcaagtcgaagaagagcaattaagaacacaagctccgggattttgggatgaccagaagaaggccgaagctcaaatgaaattggtgaaagacctgcaaaagtggattgaaggctacaacgaactcaagacattggcagatgaacttgaactggcatttgatttctataaagaagaactggtgaccgaggaagatgtggacgctgcttacgccaaagctagtgaagcggtagaggcactcgaactcaaaaatatgcttcgtgacgaagccgaccagatggattgtgtgttgaaaatcaattcaggtgccggtggtacggaaagtcaggactgggcttctatgctgatgcgtatgtatctgcgttatgccgagaccaacggttataaggctaccattgccaaccttcaggaaggtgacgaagccggaatcaaaacctgtactatcaatattgaaggtgatt

SEQ ID NO: 8090 - DNA, 35714 bp, Unknown
  gut microbiota DNA sequence
caaaaaactcaagtattacttatttgttgaagcattttgttccaatcgttgatgttcttctatcaacttcatgttttctcttgctttagacaggaactctctgaccagcttattatctttaaaagagtaaggagcatcctttataatatcatctatctgcggagtcataataggatagggcaaagagctgcaaagcatcataaatacactgggtcccaatacattttcgtaattgtcggaaatgaacgttttcacatactgattcatcgcttgcatcagtgaatcaccttccaccaccagctgactgtgaatttcatccaaatcccctccatccaataccatacgggtttctttctgctccagttcgctgatactttcttctaattggtttcttttgctgataaactcgtacaacgcattatttaaagaggttcccactgccttcaagtccgtattgctaatggtaactgttatttttccactttccagaacgatcggcataatgctttcttcatccatataaagcgtcaccatctgtatggaatctattttccctttcattgaaaacagaccatgcaccacttcagcagaatccagcttcacccactcgccatcaagcagggatttaagatacagcatctttccatccagactattcactgaagatgttccttcaatcttgtacttactggtacaggaagccagaaacggaagcaaaagcaaaaaaggcaaaattttattcacgttcatctattcattaaattctgtgcacaaaggtacaactgattcagaattcaaagaaacattttatcaatatttaaatcttgtaagactcttttctttaataatccttataaacataggtgtaaggctatttttttcatttagtttatctaattttgcagtcatgaaaacatcaacatttgccccttttgcaaaaccgctttacgtaatggtaaagcctgtaggtgccgtatgtaatctagcatgcgattattgctattatttggaaaaggccaacctatacaaagacaatccgaaacacgtaatgagcgatgaacttctggaaaagtttatcgacgagtacattaactcacaaaccatgccgcaggtacttttcacctggcacggaggagaaacgctgatgcgaccgctctccttctataaaaaggcaatggaactacaaaagaaatacgcccgcggacgtacgatcgacaattgcatccagaccaacggaaccatgcttactgacgaatggtgcgaattcttccgtgaaaacaattggctggtaggtgtctccatcgacggtccccaggagtttcatgacgagtatcgcaaaaacaaattgggaaaaccttcttttgtgaaagtgatgcaaggcatcaatcttctgaagaaacacggggtagaatggaatgcaatggcagttattaatgacttcaatgccgaatatccgttggagttttatcgtttcttcaaagagatcggttgccaatatatccagttcgctcctatcgttgaacgtattctttcacatgaagacggacgtcatctcgcttctcttgccgaaaataaagccggaacactggctgacttttcaatcactccggaacaatgggggaacttcctctgtactctctttgacgaatgggtgaaagaagatgtcggcaaatactatgtgcagatattcgattctaccctggccaactggatgggtgagcaacccggtatatgcacgatggcaaagacttgcggacatgccggtgtaatggaattcaacggagacgtttattcttgcgaccactttgtattccccgaatataagttaggcaacatttacagtaagacactggtagaaatgatgcatagcgagcgtcagcacaacttcggaaacatgaaataccagtctctccctactcaatgcaaggagtgtgagttcctgtttgcctgcaacggggaatgcccgaaaaatcgttttagccaaacggcagaaggtgaaccgggattgaactacttatgcaaaggttattatcagttctttaaacatgtagctccttacatggactttatgaaaaacgaactgatgaatcaacgtccgcctgctaatatcatggaagctttaagaaacggagaattgagagtggagagttgagaatgagaaacagaacatattaacaatcatatattcaaattttatcattaaataatgaacaaactaagattttatctggtagcgctggctgcgctttttgtattttccgttagagcggatgagggtatgtggctattgcaattgatgcaacagcaacactccatagacatgatgaaaaaacagggattaaaactggaagcccaggacttatataatccaaacggcgtttctctcaaagatgccgtaggtatattcggaggtggatgtacgggagaaattatctcgcccgaaggtttaattctaaccaatcaccactgtggctacgcttccatccagcaacatagtagtgttgagcacgattatctgacagatggtttctgggctacttccagagacaaggagcttcctactccgggactgaaatttacatttatcgaacgtatcgaagatgttacagacattgtcaatgccaaaattgcagcgaaggaaatcaccgaatccgaatcattcagcaatacattccttcaaaagctggctcatgacctttatttcaaaagtgacctggcagacaaaaaaggaattgttccgcaggctcttccgttctatgccggaaataaattctatcttttttataagaaaatatatccggatgtacgtatggtagctgctcccccctcttctatcggtaagttcggtggcgagacagacaactggatgtggccgcgccataccggcgacttctccatgttccgtatctatgctgacgcgaacggtgaaccggcagaatacagtgaaaacaatgttcccctgaaaacaaagaaacatttgtctatctctatcaaagggttgaaagaaggagattacgcaatgattatgggattccccggaagcactagccgttacctgactgtatcagaggtgaaagaacgtatggaatcggaaaacgacccgcgtatccgtattcgtggcgcacgtttagctgtcctgaaggaagtgatgaatgccagtgacaaaatccgtattcagtatgctaacaagtatgcgggttccagcaattattggaaaaactccatcggtatgaataaagccatcatcgataatgatgtgttgggaacgaaagctgcacaggaagctaaattcgcagaatttgcaaaggcacaaaacaatgccgaatatgcggcagttgtgaagaacatcgacgacctggtagctaaaacaactcctctcaattatcaatatacttgtttgagagagactttcttcggagctatcgaatttggtaatgtcatgttatctaaaacacgtgaagcattgcttgaaaagaacgactctgtgatcgaagcacgtatgaaagcgctggaaagcacttacgaaagtatccacaacaaagattatgaccatgaagtagaccgcaaagttgctaaagcattgttcccgttatatgcggaaatggttccggctaaccagcgtccgtctatctacaaagtaattgagcagaaatataagggcgattacaacaagtttgttgatgatatgtacgacaactctatttttgccaaccgcgcaaacttcgagaagtttacgaagaagccgtcagtgaaagcaatcgacaacgatcttgcattacaatactgccagtctaaatatgacttgatggataaactggtttcccagctcaaggacatggatcaagaactggctttactgcacaaaacttatattcgtggtctgggcgaaatgaaattgcctgtaccttcttacccggacgcaaactttaccattcgtctgacttatggtaacgtgaaaccatacgatccgaaagacggcgtacactacaactattacaccaccactaaaggaattcttgagaaagaaaatccggaagaccgcgagttcgttgtacctgccaaactgaaagagctgattgagaagaaagattatggccgttatgctttaccgaacggtgatatgcctgtctgcttcctgtctaccaatgacatcaccggcggtaattccggcagcccggtattgaatgaaaacggagaactgatcggttgtgcttttgatggtaactgggaatcattgagcggtgacatcaacttcgacaacaacctgcaacgttgtatcaacctggatatccgttatgtcctgttcattctggagaagttaggcaactgcggacacctgattaatgaaatgacaatcgtagaataaatgagaaaacaaatcctatttgtcctattttcactggcaactcttagcatccacgccgacgaaggcatgtggatgctaaccgatctgaaaacccagaacgcagttgccatgcgcgaactcggtcttgaaattccgatcgaagaagtatacgacgcgaacggtctttctctcaaagatgctgtggtacactttggaggaggatgcacgggagaaattatctcttccgaaggactggtactgacgaatcaccactgtggttatggagctatccagcaacacagtaatgtagaacatgactacctgacagatggtttctgggctatgaatcgtgacgcggaacttcctactccgggattgaccgttacatttatcgaccggattctggatgtgaccgattacgtcaatgagcaactgaaaaaagatccggacccggaaggtgtcaactacctgtcaccaagttatctgggcaccgtggcagaacgtttcgccaaagcagagaacatagaaataactcctgcgacaaaactggagctcaaggctttttacggaggaaacaaatattatatgttcatcaaaacagtgtacagtgatattcgtatggtgggcgctcctccttcttccatcggcaaattcggtgcagataccgacaactggatgtggcctcgtcacacaggcgacttttcccttttccgtatttatgcggacaagaacggaaaaccggcagaatattcaaaagacaacgttcctttgcaggtaaagaaacacctgaaaatcagcattgccggagttcaggaaggagacttcacctttgtcatgggattcccgggacgtaactggcgatatatgatttccgacgaagtggaagagcggatgcaaacgaccaactttatgcgccaacatgtacgtggagcccgtcagaaagtactcatggagcaaatgctgaaagatcctgccgtacgtattcattatgcgagcaaatatgcttcatcagccaactactggaagaatgccatcggtatgaatgaaggactggtacgtctcaacgtactggataccaaacgtgcgcaacaagaggaattattagcccgtggccgtgaaaaaggagatgattcatatcagaaagcttttgatgagattcgttctattgtggctcatcgccgtgacgcgatctatcatcagcaggctatcaatgaagcattggtcaccgcccttgattttatgcgcatcccttccacgatggaattggttgccgctctgaaatcaaaagataaggagcaaataaaagaggcgaagctaaaattaaagcaagaagctgataagtattttgcttctgtccccttccccgaagtagaacggatggttgccaaagagatgctgaaaacttatgccaactatattccggaggaacaacgaatcaatatcttcgaaatcatcaattcccgcttcaagggaagtatcgatgccttcatcgatgcttgctttgaacattctatttttggcaatcctaaaaactttgaaaagtttatcaagaaaccaagtttgtataaaataggatatgactggatggtattattcaaatattctattaccgacgggatcttgaaaacagccattgccatgaaagaagccaatcagaactatgacgctgctcataaagtatgggtgaaaggcatgatggatatgagacaggaaaaaggtacacctatttatccggacgccaattcaactttacgtttgacctacggccaggtactttcttatgaacccgctgacggtgttgtgtatgatgctcataccaccctcaaaggtgtaatggagaaagaagatcagggtaactgggaatttgtagtgcctcaaaaattgaaagagctgtataaatcccaggattatggacgctatggtaaaaacggtgaaatgcccgtctgctttattgtaaacaccgacaatacaggaggaaattccggtagcccggtatttaacagcaaaggccaattgataggaactgctttcgaccgcaattttgaaggtttgacaggagacatcgctttccgtccttcctcacaacgagctgcctgcgtcgacatccgttataccttatttattatcgacaaatatgcgggagcatctcatattattgatgaattgactattgtggaataaacagaagaatcatttataaagaaaaaatggataatgaagcctgatggatttacatcgtcgttcattatccatttttcttttcaacttatcctcattcagataaactcctcctaattactatttcacaaaccttacgattactattgcatgaacaaaaacgaccttttttcgttattataataaaataggatttatatttgcagtctccaatgactgctatttaactctaagaaaggaaagattatggaaaagtttgaagatttaatacagtcaccggtaccggttttagttgatttctttgcagaatggtgtggaccctgtaaagctatgaaaccagttttagaagaactaaaattaattgtaggagataaagcacgtattgcaaagatagatgttgaccagcatgaagacctggctactaaatatcgcatacaagctgtcccgacctttatattatttaaaaacggagaggctgtctggagacattccggcgtaatccatagcagcgagctgcaaggggttattgaaaagcattatagttaaaaagataaagataacgaatgaagaaagtattagtagtggtagcccttgtcatggtaagcgtgattgtatacgctttcaatgacagcggggaatccaatcaaggcaaaaaagaggtaacaggtaacggtgaagtcgtcgtaatggacaaagatatgtttctgaaagacgtcttcgattatgagaaatcaaaggagtggaaatacaaaggcgacaagcccgccatcatcgatttatatgcagactggtgcggaccttgccgtcagacagctcctatcatgaaagaactggcaaaggaatatgcagggaaaattgtcatctacaaagttaacgtggataaacaaaaagaactggcagctttgtttaatgctacaagtattccattgtttgtgttcattccgatgaaaggggatccacagcttttccgtggagctgctgataaagcaacttacaagaaagcgattgatgaatttctcttgaaataatgaagaaaatatagtgacggtatccggtcaggatagtgacgctataacaagcaaagagtgacggtatccgatagagatagcgtcactcttttttataggcttataaatcttctttatacggcttataagtcttcctgcgaatccttatttgaagtatcctacagaatgattcatcattggcatctgactatctttcaatttcaaaaatttctttagctgctcattgtccatcgaagcacgtggtactgttgccaagttagcagcagaacaaaagattgaaatattttgggaaacaataccggcatccatagcccccatcaactggctgcgtggacttttggcatcaccaaaccgagaaagatcgctgattaaaaccaatgataccggagctgttttcacaaacgcctgaccacctgccactgcaccacgataatctcccgcagctatcagtgtcaactgatgatttttagcatcatacagataacttccttcaggcaacactacatatacatccacatcctgtttattcaacgctgacggagcggttctcattccggattccttacgatttattccattagcagcccacaacaaatcagacagatcagccaggctcaatgctttcgaagcatattcgcgagttgaatgtcgttcagacaatgccttcatcaccgcaccagtgcggtttaaattaggcttcggcaatttaatcaccttatcagcagcaaaggcagccgctgaaagcattaaacaaactaacaatagttgtacttttctcataactgtggtatttaaaaattgatagacaaatataaataaaaaaggtctgtattcgttgtggaatacagaccttttaagagtttattaggcttaattatttcttatcaccgaaataacggttgtataatccttcaaaacctttaccgtgacgagcttcgtctttgcacatttcgtgtacagtgtcatggatagcatccaggttcagagctttagcacgagttgcaatgcgttttttgtcttcacatgcaccttgttcagcgtctttacgtttctgcaggttagttttagtatcccatacgcagtcacccaacagttctgcaaacttagcagcatgttcagcttcttcccaagcgtaacgtttgaaagcttcagctacttcaggataaccttcgcggtctgcctgacggctcatggccaaatacataccaacttcagtacattctcccatgaagtgattgttcaggtccttaatcatttcttcgtcacaaccttttgcaacaccgataacgtgttcgtcagcaaaagacaatgcgccaccttctacttcaacaacttctacgaacttgctggcaggagctttacacaatggacatttctcaggagctgcgtcaccttcatgaacgtaaccgcatacagtacatctaaatttcttcattttcttctcaattttaaattaattagtcaatacgtgtttctttatctttacttaagcaattcttgcaaatacctttataataataatgaacttccgatacctgatgaccatccatttccaaattttccacttgtttaatcgcttccggacattccaagtcataaatatgtccgcaacgtttgcaaaggaaatgggaatgtacagaagtatccgcatcaaagtttgtattcttttcgtcaatcgtaagcattaatgccgctccctgttcggaaaacaatttcaaagtattatagaccgttgtctttgaaagtgtcggcattgaaggagacaatgctgtgtaaatatcatcagccgacggatgaatcggatgctccatcaaatattccatgatagcgatgcgttgcatggaaggcttgatattatgctctaataatcgatcgtatggtttcattatcttcctttcttttcaaagttgtattcattacaattataaatctaatgcaaagataagaagtctttattttatttccaaataaatctttgattttatttgtgcggtcttgtaccaataaagataaatacaaaaataaaaaccgtttaaatacaaagatttgcttaaacggttttattataaaaagatgccccaattttcaagaaaatctgatggcaataaagtaagaaacagaatacaactagaatgaagctcttgttccggctatgatatctgccggaacttcattacaacgagtataaactttcatttctcccatatcttctttggcagtccatatcatcgaagtatcagtcaaccccgaaacaatgtatgaatattcccattcatcatccgtatcaagctgataatagtaagtaccgctaataatatctccgtaatcatcttctttactcaaaagaaaagaaccgggaatttgctcagatgtagcactgttgagattcgtataaatagtgtaagaacgttttccgtctttttccttccgatcaaacgttatataatagtaacgtgtgtcaccttccaggttttctccattccattcactcaatcgccagcttcctgcgatattcgcataatttacatccttagtatcaggaagctttacttcatcatcatccccacatgacacaaacagcatcgtggtgagtagtagcattattctgaatatatttttcatatacatattttatattatttattattgtaacaataatttcacttgtactgtccgttcagaagggcgtactgaaatgccgtccaagaccaaacaaaatgtaatttcattcttttgaggcaacaaacttctatcaatagaaagaatcatgtcggcttccgtttccggaagaataactttcggctctgttcgaaaacgaatgtattccggcagcatcaaggctgacaaatttaaaggttgctttcctgtattgacacaaatgaatctttccacttgcattccttctcgagaaagcactctaatctgccattctttccgtttcagtcgcaatgtattcccaatagctacgggatatcccttccattggtcgctggtaggtgataccttgccagtaagtaccagcctgatcatcggtttctttccggagagatcggtatagacaaatgcttcccgatacaaatcaccagcctgatccttaggatgaaaaatcaaattgatttctccccgttcccccggttgtaccaagtctttattacacttggctaccgtacagccacaggaagtagtcaacttagagatacgcaccgtttttttacttacattacagtatttaaaatgatacgttactggcgcatcgtcttccgacaaagtccctatattgattgcagtacattcaaactgcaagacttgctcccctcctgtttcctgcgcaaaactatgcgcagaagacagaagaaagaaaaagaacagtccatacttgatggctccggtaaagtatcgtttcataatcacatttacaaccaactatcgtttttacgaacagtaataaagaaatcttgcttggtaccatcagtcgccgtaacggtagctttcgtagaacccactttcaatcctttcaaggtgaaagtaatgttgtcttccgcagtgagaaaaacagctatcgagctatcatcaactttacatgagaaagtcatattctctccattcttaaaataacgggagtaattgatcttacttgtaccaccaacggacacatacatattgggaacagtcatctcgacacctctgccctcaacagctttcaataactgataggcatcaatcagtcctgtacccatattacctgtataagcagcaggttccatctgtccggctgcaatttggccaaatgaagcatttgtgtaccaatatactttcatttccgtgaaatatggttctaccggcttgacagattccaatatcattttacggaattcatctgcacgaaaatgacgatgcaatttggcagcataagaaagtcccagtgcggctactcccgaaacatgtggacaagcctgtgacgttccttccatgtatccataattcccaccatcttcactggcagaagatggtattgtggaatatattttacctttgggactctgatgataatcactgtctccacctggagcacagatagaaactccatgcgcataattagaataactggatggagtaccatcggctgctacggccgctaccgaaatataatcaggataagcgcccggatatccggccatagctgcatattcattacctgaagcaaacacgatgatacctccgtctatgacatcatttggcgagccggcattatgaataaaatagtcaaaagcctctttctccagcggagcactgtctacccaggctttatcagaagtataacccggactatatccgctaatgggattggcaagtcccgaattgtatccccaactacactgcaaaataacggcaccattatctgctgcatatttcacggctttcgcttcctgatacaggttacatcctttagaaccggaaaacacctgacaactcattatctttacaccacctatattactagctttatcccctcctgcaataccactaataccttcaccattatttctcactgcactgataatcccagccacatgagttccatgtccggtatcattcgggtcatcataagaaatataacctttatcatctgtgaaattgtagccataacggtcaccggcataaccatttccatcagcatcttcctttgaagcaaatgtttcggcctcattcacccacatattcccctttaaatcaggatgatcatacatcacaccttcatcaagcacagctacgataatggaaggatctcccgtacaaagtttccaagcttctccacaatttacatcaacccccgttacagcaggtactaccttgtcacccttgtcattcttgtcttcattctgaagaatagaaccatcattcttacacccccattgtagattaaaataggtatcatccggtgtgacatttatggcgcgagtgttacgcatcacatgactcattgcttgtttggtgagaactgttgcccgcacattaggatcgtatgaacgttggataatatggctaaattggactttcgccacatctgctacctgcgacaaatctttagccacctgctccaaattcgtatcttcatcaaaatggataacataccaaagattcagtcctgccttgcgggtgcgttcttccgtgcggttatctatcgggaaaatacgctccaatttatgagtaccgattcgttgtagaattatatccatatccgaaattcccgaacgggtcatcgcacctccgatagagcgagttacagcagcatccaaaaaggatgccgcttccggtttgaattttaccattatttttccctggctcgctccctcgggtaaattaataattggagctccctgtcctgtatcaggtttcactgtatccatatcccggtcggaacaggatgtaaaagtgattgctacagcggctattagaattaaatatattcttttcataatcaaatcaatattcagttaatgtaggtctggctttcggataacgctcgtaaaaccattccaaattagaaggttcgttcttaaatcccggaacattaccattcatatcctttccagaatcctgtgtataaatcaaagtgaacggttcgaaacgtgcgaaacgcggatggtaaagtagccattccggtaaatcatctcccgacaagaagttcaagttaatagtgaacctctcgacattaggcagaatccttggaatagtctttaatttttccttcacttcatcgcttgcactgtttaatgtatcgttactctgaatatcttcatcggtataagcaggaacttccggtaaatgtgaccatgaattaatgaatgtaggtaattccccatatatcaaattataggataatgacaacgatttcagtttttcccacttcaacaagttcttaaaattataattattactcgcatcaaatttcaagccgagattttcacgtgtatcgttcaaatctgtaattgaactgtatcgacgattacctgtcaaactcaaatgagtcagttccgggaagtttttggattgtaagtcagacggtatagccgtaaagttattactactcaaatccaatttagttaaaatctgacaagatccttctaattctgattttgagatagttgtaatacccatcgcatttattgtcagattcttcagatgctgcaatccctttaatgcgtttccaatcctataagtagcaggaagcaactgcgtattcgtgttactagcaacaaccaatgtctccaaatatttgattttaccgatttcagcaggtaattcctcctttgtattcagcattttgaattcaacagaacgtacacgaccgatttgttctggagtcacacctttatcagttctctcccatacggttatgcctgcccaatagtcaagacgttcgctggtatcccaacttatcattgaacgcaatttggtacttgcaatgacaatagcaatggaatctccccgtctatcatctgttatttccggtgaagcttcctgttttatagtcaaagctacctctttctccagttcatcttcctcgttcaccggaaggaacttaatcgaagcgattctttctttcggatccgtattcatatcccacttaaatcgcatcttgatggtacggggacgagctccataatccaaagatatatcaggttgtcttttggaagtagtcacccaagagcccatcaaaggataatcgaccttgaatttgacatttgtagtcaccgatatatcaaaatatcttttatcctcgttagccatactggcaacttccacttcatatttatccagacctatcatctttccatatccggtctgatgtattttcagttcttgcttagactgtccttccggtacaaacgtcacgacagcatgtctcacatcattagaaagtgtagaatccactacaatctcacaattagtgcttccgacaccattagcaggcatcaccttcacccaaggctggttgacctttgccacccatttagtacccgaagccactttcaccgactccattccacctgtagcacccaaggtgaactcctgggcatcgatggtgaagccagaaatgccttcctcatccgaatcatcacaagcagcaataaaacacaagcttgcaaagaggcataaatatattttaaacaatggtttcatatagattcttttttgttatttatctatttattctttcaaataatcacatccacgaatatcctgttccggatcgtagatgaggagatatcttccctctttaatcagatcgcaaacattggaaagattgagagagatatttggattatcctttatctcaaaaacgataatagccgatgatatcgtatcagaaatctttcgcaaatcatttccaccaatacagaattgtctcaaactcggacataagcctaaattgcccggccattttctcaacaagcggttaccattctcatcgcgctggttacgtacagcataaacagttaatgtggcagcgtccatcggtccggtaggaacttccgtaaagcggttgttacttagatccacaccataaaggaaaggcatatttttcccattaaaatcatccggaagctttgataagtgattataagtcaagtcgaatgttttcatcatatacgaatattttgatgcattgaatgtacctttcggtatctcttctattccattaccgttcagtcctaaagctgacacctgagaatttgtatcaaacagtatcttcgggaattttttcaatttattcccccccaatgcaatcgtactggcatttacgccattaaaagttccattctcttcaccctcaaatccatcaatttcattgaatgaaaaattaacagaagacattacatatacagattgcgaactgaatatattagggaatttcttcaatttattataagcaaaagagaaagactccacatcagcatatccgcagaaatgtccactttcatcacgtggcaattcctctatctgattgtgatccattgacaattgtaccaaaataacatcactaccgaatgctttctcaatctttttaatctgattgtatgcacaatccagtctaccaagttttttcaccattgacatatccggcaaaacagtcagtttattataagtcaaataaaagatctgcaatgttttacttatactttcgctggctacaaacttacctaaatcctcatgaaaatctcccaaactcggattactcgccaagttgaatgattgaaggttcggcagtttattcagttcttccggaagttttgtcatagacggacaattgtaaatttcaaggtctgtcagattctccagcccacttaggtcagtccccggttcaaatccttcgaatttaccgttggcaatatacaaatattgcaatttcttcaagtttccaatagaagcgggtattctatgaattccatttgtcaaccgattgaccgggacatctttcaaagaaggacgattggctttgctatttacagtaggctgagaaaaacgactgggtatcccctctttctgccacttcaaagcagcttgtatcggttcggagaaatacgattcaatatccacctttacaaacttattataataatcactccttatagagttcttctgtacttcagtcaattcagttcccatcgtcttctcaatgatattatcacctacttggtcggcatgattacctaaagataaagttctaagctccgttaagtctcccaaagattcaggaatatcaccttcaggaccgaacgcaccgatagaaagacctgtgacacgtcctttggcatccaaatcgacaccaggttgatctccccacaaatcaatatctttattgaaatcccagttagtacctaaaggatatgtagtacccgaataactccatcccttctgattcttttccggaatagacgggcctttcaaggcttcccacatttctttcagaacaagatagtccttaatactgccggtagttttactgaaattaatcggaacgttaacttcagtagtcacattatccagcacttcaaagtcagcaccgtttacttctccatattccaaagatcccttatttttctttttagtcgtataacttttaatcttatatttaccggcagaaagacggaataatgaatcactgacagccacggatatcttctttccactatcatccagcttctctgtatactttacggcaatattctcaagagtcgtctcttttttcgtaaactgttcctgtaccgttacattgatgtatttgatatcggagaaaacataatcttcgcctattgcccgagtggatggtagaaaatttttagttatagtaaatttcactatccctcgattcactactttcacctgtatgtcttgtacagctaacccaccatttactacagtcaaaattgtctttttatccggttcgccggaaagaatctgtttcaaatcctgcgtagttccatctgctttaaacagatagaaaccgataatctgataagttccgaccatcaattgaagtttgtcacttctcaagccaaattcactatcgtcgcccatcgcttccagaccgacagtctgtacaatttcagtaccgtcttcctgattgataagcacgattttcattttttgcgcatcacgcaaataatccagctcattcgtactggcacgtgtacctgtcgaaacacctttataaagtttgaactgagcatatccatatcctgcctgaagtacgtcatcatcgtcagagcaacttccagctgtaaaccctaaagtaaacaacatgcaagaaaggacaaacatttttataaataatatcttagttttcatataagctaaattttacatgttatcaatcctcatatcggggttgaatcagcaatactcctaaaatagtttcattatccattaatttaataaccataggctttgttccattcttgctttcgtccatgcctgaaacattgacaaatgcacttgtcatataccttccctcaacttcaattccttcccatacggtatcctgaccattatgcttagtttcagcttgcaaattccaaccggagtagccatttacaataatatggaatggatcataattaacacctaaagtcaacgatgaaaccaaaaatacatttgtagtaccatattcactttctaattgttcatctggcatatccgaaggtacagctttcacaggattgcctgtaccatccaaaataggttcaccactttctttaaccaaagatatcagatctcctgccactccttcctgttttatatcagcaattatattttcatcatattcctttggaatccccttttcaagtaaaacaagatcggatagatgatccttaatttcagcatatataacgttaggaaatgctaatacatacgcagttcttgctttcgaattatttgcgcttgctgctatattaatattcccttctttatcatcatctatccaaagccaacgattaaaggaatccattattgtataagaatattcaagctcccatgtcatctgattccgttctgccacatattccacacataccaaggtatattcatcattcttagccattaccgttacaggaactccctcgctatcataactattatcgcctgcagtataactttctccatcaaccgagacttctatgttgtctttcagagtaccaataattctatcagcaggaataccttcatacttcacaggaacttttgcaacagctccgcttctactttcaattgtcagaaagccggtaatttcattctttttatattgcattatcatctgtggaatgacgctgacattatctccggcattgccagatacaacttcgctgtctgatgctctacgattgaattccatccattcggggttacttttcaaagcccaatcctcattagcttctaacaccaatatgtcagttccatcaaaattgatgacaaaaggatttttttctgtgtacattacagacttgtccgcattgaaagcccgaacttcataaccagtagacggacgcgtcacctccgctatcacctgctggcttcctgccagcttcatagtcagctctgccttataagattttaacagttcggtagcatcatcactaatatggatagtgactgtctgctttccggcattgcctgaacaaacgaacgtcctctcaccatcctgttcaaaatagcaccataacgatgaggaagtcaatatccagttatcggcagcctcaaaagtcagtgtcttggtatctccgacttcacattctattttctgcaaatccgggaatacaggcgttgtagtctcgtcatcatcactgcaagcagatacgaagagacaaaacactaacgtaatcaattgcaaataatatttcattatatctttcatatttatttccgattatagtttagagtccttcctctttcttatactgttccgcttcttcatcactaatccactccaagatattcacataagtacctactgtacctttacccaccacataaatagtgctatataagaatacgaatttctggcatacattataataagaatcgtacgcaacaggctgagtacacatcagctttccattaccgtaaatggttccgaaggcttctgccgtactacctataatttgatcatcaaactctacaaatggtttcaacggatcggaaggatcatacttaattttaagatcataattcttgtagaaaaaatcatgtaatatgatagtattatcttccgtcttgtctctttctgcctgcaataaccgatgttccgtatccgtcatatatgcattaaagaaagaagaagtcaatagacaatagccttcaaaagtacttagttcgaaaggacatgctttttgcatttgaacacgagtacgtgtaccgtacaaatcccatatattttcatctttcggaagcaaattgaacgtaaccgacaaagagtcagttttacctatattttcatagacacccttcatccggaactttgcaactcgctcccctgctttaatggttaccgtatttgattcaactacatattgctttttttcaattgcattactagccttatcgtctacttccacaccaaaagaacggtcataatcgcatatattcgtagctactaccggaatctcaaaccatttctcgctgtcctgcaccggatacatagataatgtatcggagaacatcacgtagtcggaaccgctgtaagtcgtccgggaaagatcattacatccccagaatccgacagccaacgtcgtaagtgttactattcctgttattaatcgtttcattgtttctctatattatctttatacattatttattgctttcattaggtgctagatctacgccaggagcatccaactcatgttgtggaataggccatacaaaacgaggatcgtctttctctaacttcaacgtattacccggagagatagtcgaagtttgttctttacgttcaaatccctcatgccaacgtttcaagtcgttaagacggaaaccttccataaagagttctttcatacgttcttcactgacagttttaaaccaattttcttctgtaagcgtagtagagccaccataagaagaataacgagccatacgtaaagtagaaatatcaattcctgcttttccataataagatgctcccatccggcaataagcctctgcacgaatcagatattgttccgctaaccggaacggtttcggcatggatacacacagcaatctttggcttataaaatcctgatttcccatgtatttaaccaaaagaggccaagtcaacccatgagagaatccggtcgttgccgtagcgaaataagcattatagcgtaaatcagcattggcataggcatccaatgcccatttagctggtacataatccggtttataagatgtataatcataattgaggaatacagtgcctaatgcccctccataggaatttacctcaaacattactttccaaatgatttcagtagaattatcatactgccacatgtatgcaaaatcattataagtaaccgaataactatgcttggttgcatcagctaatatatatttcttactatctattactttagtagcatattcaacagctttctcccacttccgcatatacaagtacatacgagcatataaagcattgactgtaccaatcgtgaaatatgcagaattataaataacctcagtgtcatcatccgtagccagatattcggccgatctagccaaatcatccaatacaaactgatacgaatcttttaaagaagcacgttttacaggtcccggattaacgtagctggactgcagtacaactcccagttcattggcagcttcttcgtcactttcataagctttacagaaacacttcaacagttctgaataagccagcgcacgggcaaaatagatatgacctttataggtatccaacttgtccagttgttcatcatctgaagtgttggcctctacagcagcaatgttatcaagaacaaaattgcaacgtccgatgacagtatacaagccaccatacacatattccacctgtttattgatagctaatatttcattacgccatacatcaccatagatatttgtatatcctttaacagcgtataccagatccgtctgaatatcaggcaataaagtcaagtatccgctatataggctggcatttttaaactgtgcataaataccgaccaaagcttggcgtacatcgctcactgtcttaatagcctcttcttgcggaattgcatcttgcggatatttatcaagacaggaagatgccgaaagcaataccgcaactaaaactatatataattttatttttcttatcatcactgattaattttagaatgaaacttccagtccgaatgtaaactgacgggacatagggtattgagccttatacacattggaggtagactccggatccatccctgtaaaacttgtaaatgtcaacaaattctgtccctgcgcataaatacgggcactacttaaaaaattagtccgctgcaaccatttctgtgggaatgtatagctaagcattaaatttttcagacgcaggaaagaagcatcttccaggaatcgtgaatctagttgaggagtaactccataacgagggatatcagtcacatctcccggctttttccatcgatcataaagcatacgttttgactgattgtaggcactgaacagtccgttgctctcttgaaaaactctgtcattgttaagcatccagcgatcggccacccacgtgaactgtgcggaaagtgaaaatccttgccaagaaagtgtagtaccaaaaccaccttgccaaggagcttcatgtgtcttacccagcatcactttgtcactttcattatattctgtagtaatttcaccgtctttggtataccataaagcatctccattagtaggattgactcctgcataacggttcagataaaattcacctaacggatgacctaccgcaaccattctaccagtatcagaggctacatattctgttatcccattataaagctcggttatctcatttttattatatgaaacattggcgttcacattccatgtaaagtctttgatgcgaagtacgtctgcactgacattaatttctacaccacggtttcgcatagctcccacattatcccaacgagttccaaaaccgctagttgtgtaagaaatgggaactgccatcaacatattagtagttttcttattataaaactccacatccaaatttatacgatcaataaaacctaaatgcagtgccacattagtagcccatgtagactcccaacttaattcttcatttcccaactgggaaatagcaatacctgattcattgttatacttatatccaccggaaactaaagccaaatgttcatagttattaatagaagagttgcccgatgtaccggtattaatcgctatttgcgcattagtaagccatttatatttttgcatgaacttctccttacggagattccacataaacccgactgaccaaaaagctccccaatgtttatctgttccgaaacgggaagatccatccccacgaaccgaaaagtcagcatagtaacgatcatcataattatattcaccacgaccaaagaaagagagaaaagaatattccgtaacgggatctccccatgatgaagcggtagaaccggaagacaagtttgtcaaaatatcatttgtctgtccacgagtcgtaacctgaaaaccttcataatgataatcgactccttcctgcccaaccataaagttgaatgaatgaacatcattcaacataaaacggtagtttgccgtatttgtaatcatcagattaagcatatcatacgaactacgctgggcacctccataattattatttggcttataactcggaaaacttcgataaaaagaagtagtatgaccataatctgcacttagttgtgaacgaattgtgagattctttataggtgtagcttcagcatagaaagtagataaaagtttatacttcttatttgataacggattgttttccatccatgctaacggattctccgtcgttcctttccaactgccgtcatcctgaagagccagacttccatcctccttataaggattccagtaaggcaacatgaaaaaagatgcggaaataggagcccacaatgcatattcaccatcatcactctgttctacctcctgataagtaaacattgtattcgttcctattttcaaccatttattagctttcgcctccacattggcacggaagttaacacgctcaaatgtagaacctactgcaataccatcctgatcataatagcttcccgaaacataataatttaacttttccgtaccaccatttactgacaactcgtaattctgcaagggtgctttgtcattgtataccttatccagccaattgatatttatcttacttaatttctcgtaatcctgtcctttatccaatcccacttctttttcaaactgaatacgttcgttcgtatccatctgatcccagtcctttgaagctaattgggaaaaacctagttgtgtacggaaagtaatcttggcagcttcccccatatgtccacgcttggaagtgattactaccacgccattagaagcacgtgcgccatagatagaagtagaagaagcatctttcaacactgaaatgctctcaatatcattaggactaatcgtgttgaaatctgaacttgaaatagccactccatccaatataaaaagaggatctttccccgaattaattgaatttgttccgcgaatacgaaaagttgctgccttactgggttcacctgattcagaaagcaccattaatcccggtgcctgcccttgcagtgcctgatcgaaactcggagcaggaacatcttccatcttttcagcttttaccgtagatacagaacctgcaatcgtacctttcttacgtacaccgtaggcaacaaccactacttcttctaccatttgtgcatcactctccatcttcagattcatgcgagtggcagcagacacctgcttttccatcgttttcattccaatgtaagaaaactgcaaaatagcaggggatttcgtcactgtgatactgtaattaccattcatatcggtaattactccgttcgtcgtacccttctccaaaacagacacaccaatcatcggctgattgtcttccgccgaaataatgtgtcccgttacctgatatccaccctgtgcaaaaagcaacagggggatacttgtcagagtaaagagtacaaacaagagaattgattttctcatctttgatactttgattttaaattaatgaaattgatttatttttatagatttatctacaataaggaatacgcagtcttcgcgtagaataatacactcctttcccaaaatcggtttatgcattttctgcaccgacttgggacaggctattattatctataaatatagaataggaatagactaacttggcaaattcttaatattgcgccaaatatccaaatagatttttcgtgttactgctgtgtgaattaaatgtatgaccatctgctctcttaagttataaattaaacactaatatcacttgttctgtttaggtgttatacacttctaatattgttctattttggctacaaatatatatattatatttaaataaaagaaacaatatgtcgcatattttataccaaatttccacttatatctttttgatacatatttaagtacacaaacccataaatgaaaataaatccacaacatatttcaatgatagttgaatataaacgttcattttgacagttactttaattactcaaataacaacatcacaactcatacaaaatagcttattaagaggattcaatatagaaaagataattattcaaaactatttcctatttttgcactcattatatataaataaggtataagatgaactacggatttgtaaaagtagctgcagccgtgccacacgtaaaagtggctgactgtaaattcaatgtagagaagatagaaagtctgattgcagtggctgaaggaaaaggagtgcagatcattattttcccggaaatgagtatcaccggatatacttgtggtgacctattcggacaacaacttttgctggaagaagcagaaatggggctgatgcaaattctgaataacacccgtcaattagatatcatttctattgttggcatgcctgtcgttgtcaattcgacagttatcaatgcagccgtagtgattcagaaagggaaagtgttgggagttgcagccaagacctatctgccgaattataaagaattctacgaacaacgttggttcacatcagcgcttcagttgactacaaacaacgtacgcttgtgtggacaaatcgttcccataggtgcaaatctgctttttgagacttcagatacgacttttggcattgagatatgcgaggacctttggtctactatacctccaagttcctcattggcactgcaaggagcagaaattctgttcaatatgtctgctgataatgaaggcattggaaagaacaattatctttgttctctcatcagccaacaatctgcacgttgtattgccggatatgtattctcgtcttgtggctttggagaatctactaccgatgtggtttttgccggtaatgggctgatttatgaaaacggttcactgcttgcacgcagcgaacgtttcagtatgaaagagcaactgattatcagcgaaattgatgtggaacgcatccgggcagaacgcaggataaatactactttcgccgctaatcaggcaaatttaggagacaagaaagcagtttctatcgcgacagaatttgtcaacagcaaaaaactgaccttaacccggaagttcaatgcccatcctttcgtaccacaaggaattgagctaaatgaacattgcgaagaaatattctctatccaagtggccggactagcacaaagattagttcacaccggagccaaaacagctgtagtgggtatttcaggcggactagactcaacactggcactgctcgtctgcgtgaagaccttcgataaactgggattatcccggaaaggtattctcggaatcacgatgccgggtttcggaacgactgaccgcacctaccataatgcgatcgatctaatgaaatcattaggtatatccatccgtgaaattagtattaaagatgcctgcatccaacattttaaggacatcgaacatgacatgaatgtacatgacgttacatacgagaattcgcaagcgcgcgaacgtacacaaatactaatggatgtggccaatcagacttggggaatggttatcggcacaggggatttatccgaacttgcattgggatgggctacttacaacggcgatcacatgtccatgtacggggtaaatgcgagtgttcccaaaacacttgtgaaatatttagtacaatgggtggcagaaaacggtatggacgaaaactcgaaagctactttgcttgatattgtagacactcctattagcccggaattgattccggcggatgagaacggagaaattaaacagaaaacagaagatttggtaggtccttatgaactgcacgacttcttcctatattatttcttacgtttcggcttccggccttccaagatattctatttggcaaaaacgacattcaaagatatgtatgatgaagaaaccatcaagaaatggctttccactttcttccgtcgtttcttcaatcagcagttcaaacgttcttgcttaccggacggacctaaagtaggaagtatttctattagtccacggggggattggaggatgcctagtgatgccaattcagctatgtggcttaaagaaatagagaatttatagggaagtacaaacatcaaactattctcactgctatgagaaaaaatactcattactatgagaagattttctcattatagtgagaattttttctcatagcagtgagaatagttgagaaaatataacgcctcatcatagcttcgatacaacattttagcaagacatgtatctgcacaaaattacatactaaaatccctctgtacacataacttttcttcttatttgctctatatccgcttctttaatcctccgaatgatatttttataaatacgatgaaagccaaaaccgccttcagtcatttcatgaatcgcgtcttcttttgaaacattctgaaataccactcgataaagtgcgcaaacagctcctgtgcgatctgatccgtgatggcaatggataacaatcggcgctttacgattctttataatacgcaatgcttcaatcaactgttcttcattgatggaatgagctttggtctttacccgatgaagctttacgtttgttcctgcggcttcatcatcatcactatgtctattacggagattaagagcttcgccgataccatacttttctaaagctttaaagtcttcatgcgaaggttgctctgaacgatatacacccgaatcgatcttgtacagattagttaattcactatcaggaagagtaatcttctctacttccaaattctgactaaaaatagatatagagaagattactaccaaaagtaggctcaacaggattcttttctgcataagtctatattgttattataaaaagatcaaagtactcccttgctggatggaagttcaaaatgatagatatctcttttgattgccattttcaaggcacgggcaagggctttaaaaataccttctatcttatgatgttcattttgtccttccgccttgatgttcagattcatttttgccgcatcacttagtgacttaaagaaatgaaggaacatttccgtcggcatctcccctatcttctcacgcttgaattcggcatcccaaaccagccagggacgaccaccaaagtccagacaaacctgacaaagacaatcatccatcggtaaagcatagccataacgttcaattccacgcttactacctaaagcctggtaaatacattctcctaatgcaatagcagtatcttcgatcgtatgatgttcgtctacctccagatctccttttacacggattgtcaagtctataccggagtgttttccaatctgctcgagcatgtggtcgaaaaagccaagaccggtagagatgtcacaagcgccgtttccatccaagttcaaagccacatcaatatctgtttctttggttgtacgacgtacttccgctttccgttctccggcaaaaaggaactcggatatctgatcccagtcagttgttgcaagagcgcagacttcttccaatcctttttctttcagggtttcaggtgaattttgcagataaattgcccggcaacccatatttttggcaagttccacatccgtaggacggtcgcctataacaaaacttccggcaagatcgtattccggattatttaggtacttcgtcaacattccggtacgtggtttacgggtgggcgcattatcttctgggaaactacggtctatcagaatctcatcaaaagtaatcccctctccttccaatgttttaagcatcagattatgggcaggccaaaacgtttcttccgggaaagaagatgtacccaatccatcctgattggtgaccatcacaaattcaaaatcaagtttactgcggataaaacctaaattacggaatattttcggatagaattccagcttctccaatgagtcgagttggtaatctacgggaggttcgatcaccaacgtaccatctctatctataaataatactttcttcttcataaattatcccgggtattttttaagggtggctaatagtgtattattctctacacgggtaccgacagtcacacgcaaacagttgcagcaaagcgaaatgttatggcgattacgcacaataattccttcacctaccaaataattgtagattttcacggcatccgtcacttttgccaaaaagaaattcgcatcagacggaaacagtttaatggtacatggaagcttttcaaattccgcttccagatagtcacgttcttccttcagagttttcacccaacgttctatctcataatgtttatgcaacatggcgatggcttgctgttgagtcaactggttgacattatagggatatttgattttactaagaatatcaataatctctttggaagcaaaagccattcccaaacggatagcagcacatccccaggctttggagaatgtctggaatacgacgagattgggatatttatccaactcttcgaggaaagacggagctttagaaaaatcattgtaagcctcatccaacattaccaatccttcaaactgacaaagaatcttttctatttcggaacgaagcaaatcatttcctgtcggattattaggagagcaaaggaaaataagtttggtatgctcgtcggtagctgccagtaatttgtcagcagagaactggaagtcatcatccaacaatactttccgatattccacatcgttcacatcggcacagacctgatacattccataggtaggatcgatagctactacattatctttacccggttcgcagaaagcacgaaagaccaagtcgatggcttcatcactgccgtttccgagaaaaatatgttcgggagatactttcttaattttcgacaacaatgttttcagttcacactgcatagggtccggataacgattgtgaggcgtattgtacggattttcgtttgcatccaggaaaacagaagcggtgactcctttatattcatcacgtgccgaagagtaaggctttaatttccagatattcggccgggttaattcttgtaatgttttcacttctttaaattttaagttatgaattttgaattgctttgagacgaactgtgaccgcattcttatgcgcgtccaaatgttcgttagccgccatctcctcaatagcaggaccaatagcctttattccttccgggagaatttcctggaacgtaatcttgcggataaaactatccagactgacgccactatatgctttggcataaccgttggtaggcaaggtatgatttgttccggaagcatagtcaccggcactttcgggagttaacgatccaaggaaaacagaaccggcatttgttacacgctctgctacttccatgtagttttccgtttctataattaagtgttccggcgcgtatgcgttagtcagttccaatgcttcatccaaatcctttactaaaatcagtttactattctctaatgattttgcagcaatttcacgacggggcaattcggctaattgacgttctacttccgccattacttctgtttgaagtttctcggaagtggtaatcaatatagcctggctatctattccatgttctgcctgtgacaaaaggtctgctgctacaaaaaccgggttggcagatgcatcagccagaacttcgacttcagaagggccggcaggcatatcaatagctacatcacgcaggcttaccaactgtttggcagctgtcacatattgattacctggaccaaatatcttatatactttaggtacactctccgttccataggccatagcggcaatagcctgcacaccaccagccttgaatattttactgacacctgccagttgcgcagcaaaaagaatagccggatgaatatttccattcttatcgggaggcgtgcaaagtacgatttccttgcatcctgcaattttagccggaacagccaacatcaatacagttgagaaaagtggtgctgttccacccggaatatacaatcccactttttcgattcctaccgatttttgccagcaagtcacaccgttcattgtttctaccttctttccgataaaacgttgggaagcatgaaaggtttcaatattttgttttgccagggagatggctgctttcagttcatcgcttaccaatgttccggcaacctgtatctcttcaggagtcacagcaagcgcagacaaggtgactttatcaaaagtagcttcatatttcaagacggctttgtcaccttctgctcttaccttatttataatagagcgaacagtgtcgaacaaattttccgtattcagtgccggacgtttcaaaagttccgtccactgttcttttgagggatatttaatcaatttcatagtttatatcttattaggcacggatttcacgggttacacggtatctgggattagcgactacattatctgtgtaatccgtgaaatctgtgcctatatatttatacaatcatcttttcaataggcagtactaaaataccttccgctcccagtcctttcagttttccaatgatttcccaaaaacgtttttcatcaagtactgtatgaacagagcaccagccttcctgtgctaacggcatcaccgtagggctcttcatacccggcaatacagcaatgatttcttccagtttatctttcggagcattcatcaatacatattttttatcttcggctgtttttactgcattcatgcggaacagcagttcttcgagcacttcttttttctcgtcgctcatattcttgttgccaatcagcaatgcttccgacttcattacgacttccacttctttcaaacggttacttaccaacgtagaaccggagcttacaatatcgaaaatagcatcagccaatccaattcccggagacacttctacggaaccggtaattacatgaatttcagcatttacaccatttttcttcaggaagttgcgaagaataaccggataagaagtagcgatcttcttaccgttaaaccatgacaaaccgggatattcaatatctttcggcatagccaatgaaaggcgacacttactgaatcccaaacgtttgatgatttccgcatcttcttccttttccataaattcgttttcgccaacaattcctaggtctgccacaccggtagccactgtctgcgggatatcatcatcacgaaggaatagaacttcaatagggaaattggaagactgcaccaataaggtacgttttgtagtgctcaacttaatatccgactctcctaaaagtgccattgtctcttcgaagagacgtcctttggcttgtactgcgattcttaacatgactttatttaatttttaattataatatgcgttgagaaataaaaaaaggcttaccgtattcggcaagccttagttatcgtttatatagttatacacaatatcatccacgcccaccgattattcgttaggaaaatgatgatgatgatgtgtagttgtatatttcatatttcttttattaactgcgacaaaagtaaagcatttgtttgaaaccaccaaacatttatcacaaaaacttgagtttttatttcaaattaaaggtaatatctcttccggctctacatcacatttcgtaaaatgcatttcgtctttcgacttttctttcgagaaagtaaagtaggtacaaaccgattccgtgcatacttctccatcctcattatatagctttgcttcaacaatgacaatgttccgcttcacttctttaatagaggcacgcaatactatatgagaatctttggtatcaacagattttcggtaacgggtttccatcttcgaagtcactccagtcgtttgtagtttacgaagcaccacccacgcacagatttcatccatcaaaactgcttgaataccgccatgcaaagtgtcaatccagccttgatactcgggacgtggcttccaaatgctcactacttcgtcaccatcctcataaaattccatttttactccagcttcattattcggagcacagccgaaacaattgtacccttccaaacccttccagggatttattatcttcttcatagttctctcttttatttagttttacttcccaaatataagcaatttatgaaaaggagatgcaattttcactgatttactttctaatacaacgaatagcgaaagctttcgtatcaatacccgcattagattcttctatgatattcgtatcacttttcatgtagaaaaccttagtatcgatggtggcatttgtattgtccaatgtccaatatgccaaatgtttgttctcataatctgcttggaaagcccctacatacattcctacaggaataccattaaaaccggataaattagttgcaggttgcacttgttcttccgtcttcagggacaaccaggtccctgacttcaacaaagaagcttcccccttcaagtagtcttttaaaatattccagtcttcccaattcggtatactccagtgagttggcaagatcctaccggaaagcgcaacattagcggtataaaaataatgctctgtagtagattgcaaatatccggctatatttgctgttacctgattcaatttagggagcgcatcaccgtttacatataaagatgtctccaaattactcctcatccagtattgagttccgatcttcactagcggataattatggatgactcctccacgtacgtcacgaaccacatcttccaatgctagaacaggtaacacatcatctgccagtgttactgataaggagattgttccgtctgccaacacataaacattattacgagccaataaggtgccatccacataggttaatgaatgatcttccatattccatgatacacttccaccattcacttttcctgattttcctaataactgtgctacaatcccttgagataaattaacgctaccgtcttctttcatcggataggcaacaatcgcttgagaagaaaaatccggagttacaagatactctttacatatttcggctacttgttttcccaaatgtatcactttgtacacattcgatttttcaaaagtcagcttcgatacatctatgtatttatgcaaaatacccgattcggtatggtccacttctgtcccatcccaatctccgatttctccgttcactttactcattaatacatcttcggccgatacaaatgttatttccaactctctctgttttccactttccaattgtaaagtagatggtaataaactggtatatagtttaccggcagcttccaatgttatgtattggtatccggctgtcgcctcttgagggatcaaaataagctcttttcctaccagtcgaccgtcttttatttcccattctcctgcaggagtaatatctttctcttcagaataggcagagaatgttttcttctgaaaatcataaatggtcttagtataaaagccactcaccgaaagtgtaggtttcacagacagtatttcttctatattctctccctctccggggacaaggactattttcatacgaaaaaactggtgattgtaagtcaaagcaactgcatctttactggctaatacttcctttttggaagcaactagaaaatcagaatgagaataatcatccagtttatcttgagttgttgcaacggtcacttgcatggaactttcacccattgctaccccgcccttctgatatggataataactgattaaattcaatgtaactccatcatccggatagtaaaccgattcatcagatacaaactcaccagtagatgaacgcacaaaatgaagattatctgcataacgttcttcttgcattgtagtagttcctgcaagtgcaaataatcccacttcatctttttctccaaaactattgtttactacacgagtattcataatctcatgaatatcagctacaaacttcaacggaatatctccattattaatgatttccccttcttcctccgaaatatggtttacacaagcagtaaacatagtacaacaaaggataaaaaaaactactcccacaaataggttatggcatgttttcattttgtttttctattagttcaaaaaaagaaattcttgattgagcagaaagaatgccataagaggaagtattcactttcggttatgaaaaaccatacaacacgtctgttgcaactgtagaatcttaaattcccacattacagtttgaaatgtggaagcgaaagtacagattatagttaagaaaagaaatattttcctttaaaaagattaatcttttatataaaaagcacgtaatcagccatttaaataacacatgcaaaaacaagacattctgaactccacattattatattagcattggttattatttactatccgtcatttatttcaaaaagaataccccacttctattccggcaatgtgtctgccttgcgaagatgcatattgataacaataaaatgcatccaatgaccaacgtttggctaaagcaatctccactccgggacgatagcgcatacggtctgctctccaaaaagaggtatcatccagactttgataaatttcaacagaaaaataaggagaaacgattccttttgtaggagcataggataacttcaaacgagaacgtagacgagtttcagaatcaccacggtcaaaagtctgctgaaacctctcccgcaaagacactttcaaccattgataacgaaagttggcagtggcagatatatgatagcgatgtctcaacttccagtctgaatcacccaaattccgaagatgggtctcatatcccactcccagattcaaaaaagaacaagggcgataacttccaccaactgtcagtccccaacgatctaatcgacttacatcatccttcatacgtaattccaaatcgcctgaaaccgagaaacgagaatctatcttat

SEQ ID NO: 8091 - DNA, 8314 bp, Unknown
  gut microbiota DNA sequence
gacgaaacatcacacgagccatgtcccccatgggaaaaggacttcaaagctggttgtgtgcctatacagccaacacatcgaacaatatcacaggcgctcccgttgctcaaggcaactatgtcacctcctcccccggtgtgctgacaggaaatctaggatataaaatgtatttgagcaatgctatctatagcttttatgccgtatcatgcaattccaccagcccggcgcccactttcaccaacggactatccgaacctttatccaacggagtagattatctttggtggcacgcggttcatcaggacatcgccagttcacaggtaaacatccccataacctaccaacacgcagccacgcaagtagttgtagcgatcgccggaggagaaaatatcactttaaacaagatactttccgctaccatcaccccaccgaaaccgggcgcaatcatggatttgtcaacaggtatcatcacttcggaagtcagctatgacaaagcagccgatatgggaatcaacgacttcaccgtacaatatatcatgctacccgtaaagagctcctctcccatgaccttgacactggagctgatggtaaacggagaaagcttttcacgtacttacaccactccgctcactccacccaacaacctcctgtcagccggaaattcataccttttccgggcagttatcaatgaaaactccatctcattcgccaatgtcagtgtgaaagaatggacagaggtagacgaaagcggaaacccgctataccctgtacaagattaaaatatccgaaataaaatcaaagcaaaccaggttacgcaagccacaaaccgggttatgcaaactgcaaaccgggttatgtaaactgcaagtcgggttacgcaaaccaccaaccggcaatcatgccaccgtttgcgtaacctgactattcgtaaatacctgcttcttcaacctgcgataaacgtagataaaggccggcacgaggaataagtctgccgctatccaagccatcggatcaccgtagcagacagcaataaaaccgaataccggtacggcatagagactgacaagaatacgagcaatcatctccgccactccggagaacatggcaagattggtaaagcccactccctgaatggtataacgcaagatgcacaacaaaccaagcatcgggaagaacatacaggagacatgcaggaacaactccgtatccagcagaatttccgtttccgacgggtctacgaagatcaacgcgaaatatttagcccctaccatcagaagaaggaacgtgaaagccgcataaataatcatcatcagagcactagccttgattcccaaccaaatacgttccggtttacctgctccgtaattctgtccgctatatgtagccatcgcaatgcccaaactctcgaacgtacagataaagaacatcttgatgcgcatagcagacgtaaaggctgccacacacgccgttcccaaggcattattcgcactctgaagcatgatgctgccgatagccgtgatagaaaactgcaatcccataggcacaccgatgtagagcagcgtcttagccagtttagactggaaccggcgttctttcggagtaccctgcaatatttcaaacttccggtacatataaatgtagcagagaacagccgacaatccttgcgaaaagacagtagcaatagcagctcccgccactccccagtcaagtaccagaatacagaacaagtcgagaatgatattcagaacagcagcaaacagcagaaaccaaaaaggcgtcttactgtctcccaacgcacggataatgctcgaaagaagattatagaaaaacgtacacggcacaccgatgaaagtgacaagcagataagcataagccccttcaaaaatattctccggtgtacgcatgatccgaagaatatcctcacataaaatacaggtgagaagtgcaattaccaccgacattcccgcagccagtttcagactgacagccacataactgcgcatcgtactgtaatcccgcgccccaaacttctgcgcaacgggtattccgaaccctccgcaacatccattgcagaatccgagaatgagaaataccactgacgtgctggctccaacagaagctaacgcgtttattcccaagaactttcctacaattgcagcatcaacaagcgaatacgtttgttgcaacagattgccgagtaaaagcggcagtgtaaactttaaaatgagaggtaatgccggccctgccgtcatttctttagaagttgccatacgtctatgttctaaaattgggcgcaaagatacggaatattcaacgaattaatccttgtttcccgtccctcttttagttgacataaatcaaaaaattgtgattaaacactaaacagttaatcacttaacaagtcgtttaggcgaaccatgccacgaacaacccaggcagaaaacctctgtcaagtcgaacccttccatcgaatcttccggatatttgggaacgacttcaccattttcgagcacataaaccagcagcctttccccctgttcattcttcacatacatggctgcaatcttgcattgcggacataataactttttcatgccgcaaagatacagattgtttccgtcatccacaagctcttcagaagatgtttcaaaaagcctgttcatgatttaccatcagaaaagaaaatacccaccagaaagatacattttaacaaaatacgcctgtgattctgcataatcttcgctatctttgtcaatccaaagtgtaaagaagaaagagatgaaggtatcacgcatcgcacacgaaaagaaaacagtagagttaatgatccgcctctattgtcggaaaaaagaaaaaaacaagactctttgtaccgactgtgaagagctgcttcgctatgcgcatgcccgtctcgaccgttgtccgtttggagagaaaaagggtgcatgcaaagagtgcacggtacattgctacaagcctgtcctgcgcgaacgaatgcgacaggtaatgcgtttttccggaccgagaatgttgttctatgcaccctggcaaaccatacgacatttattgaacctataacttactaaaaaaaatcagtaatgaaaaaagccattatcataggggccacctccggtatcggacaagaagttgcaaaatgcctgttactggaaggctggaaaatcggagtagccggcagacggcaatcttctctcgaaaacctgcaacgggcagcaccggatcaaattcaaatccaagcattagacgtaacccaagaggatgcaagcgaaaagctgaatctgctcatcgacaaactaggcggcatggatttgtttcttcttagttccggcatcggtttccagaatatggacctgaacatggaagtagaattgaacacagcacacaccaatgtagaaggctttatccgaatggtagataccgctttcatgtacttcaagaaaaacggaggcggacacctcgccgttatcagttccattgccggaacgaaagggctcggagttgctcctgcctattccgccaccaaacgttttcaaaacacttatatagatgcgctcgaacaactgtcacacctgcaaaagctacatatccgttttaccgatattcgtcccggatttgtagccaccgatttactgaatgacggaaagcattatccactgctgatggatgccgccgaagtgggccgtcatatctcctggtcgctgaagcgcaaacaacgggtagcagtaatcgactggcgttaccggattctggtgtttttctggaaaatgattccccgctggatgtggaaacgcctgccggtaaaaacaaattaaccccaaaagtgaacaagccgggaaatgaacaggtaattagcaagatcagataactcctattccaataattctacctatatttgtcctgtaacataaacttataatctaacaaaaaaagatggaacaaaaaatttgtcagagttgcggtatgccgatagacgactcaacttttggaaaagaagcagacggtagcaagaatcaggattattgccactattgctatgcggacggacatttcacgaaagagtgtacgatggacgaaatgatcgaactcaacctgaattatatcgacgagtttaataaagactcggaagtgaaatacacggtggaagaagcacgtaaaacgatgaaagagttcttcccacagttgaagagatggaaataatcaatcatgaatatagaaatgtgtcgaaaataacctaaaaccatatctcgacatatttttacattctaaagctttttcactgaaatcaatcactattgccattcagttccgggtggcgttccaaccattttaccgcataagagcaggtggctttcggtttcattccgttggctattgcatagtcatacgcagctttcaccaatgcagcggctattccgcgaccttctatcgggcggggcacgatggtatgaatgatgtcgagagaatcacctaagaggcgatattgtacaaaggcggtacgaccgtctacttctgtcttaaacaaatgctgttcgggctgatgaataatttcgtaatccataatctatattgttttaaagttcattattgttttaagtactcttgcctaataattatctattatcaggcacggattttacgtttttttttcaaaatgacgcatagataaagcaacagtgttcatcagcgtaattcgtgcctagatttattatataaactaattatgaaagcatatttataatcaaaattgttctatccattgcaaccggttggtatcgtaaccgcggcgttcggcagcggtgacgagtttctttttgatttcctcgggcagttgcggcgcgcggcttagtatccaaagatatttatcggtgctgctgcctacaagggcatagttgtaattctcttcatccagctccaatatgtaataatcagagtagaaattaaggaagaaagagactttcagtttacccggttgcgcgggatcgggtatcttggcgtgtccgttggcagtcttgcagatatcataaggagaattgcgcttgcatccccggttctccacacgaatcgtaccgtcgggacgaagcgtgtaagtggccgtgacatctaccagcccgtgttcaaaacggttctcgtagcgggctatttcgtaccaaagtcccatatatcggttcaggtcgagagaggagaccgtggtgtgatccgtacctttaaaaagacgttcgacagtagggatggaaaaacgaaaaccggcttccgtcagacgtgtcgggcggactttctgaccggctgtaaggaaagaggccgcttcaccgtaaaatatacggaaagcccgctgcggagcaataatcgttgtccatgcctgataagccctccccatctcacgggtaaaagaatattgcgaaatctgttgcggagccaccagattatacacaccccgcgtttcttcatgggcgatcaaaaactccatagcacggcaaagatcgtgcatggctatccacgggaaagactgggtgccgggaccgatggcggtagctaccttcgtggcttgcaaaggacgaagcatctgctgcatcgctcccccatccggagaaagcactacgccaaagcgtgtaatgacgagccgggtaggttggggacagtgtttggcttctttctcccatgcataacagagatcggaaagaaaaccgtcgccacgggtacgggtatattcgtccgcttccacttccggaggataatagcccacggcggaagctgaaatcatcagtttcggttttgtcttgacggcatttaacgcacggataatacggtgcgtcaccacaatgcggctgttgaacaattcctgtttgtactccggtgtccaacgcttattgatgggtgcgccagccaggttgatgattacgtcgcaatgcgtcaatgtctgaatcaaatgtccggacataccttcgcggaacatcgatcttcccaagggaataatccggtgtccgcccttttctgtgagataattggaaagatgtttacctatatatccggtagctccggtcattgctatattcatcttgattcattatttattttaactctattagaaaaacgtataaaatgcaagaaaagttctttgaaaaaaacaaaatggggctatctttgcaaggcagattttaatactgaaagaaaaaaatctctgaacagactgacaaagagagagaaaatttgttctatcaaataaaggagacgatgaacggcatctacaaacagggcggacggaatacagaaagcgatctgtttggagagaatggcaagtatgtgaacagtccgacaaagtctgaacaagaaactgaatggtattaattgaaataatgaaataaataaatgaaaagacgaatgaaaatcaactatattcttacacttatattagtattttgcatcggcgcatccattcctgtattgacaggcagcagccaggtgaccgaacaacattccgccaaatcggaagttccttattgcgtcacctcgcccaccgttcccgcccaggttacttttgacggagaaaccatcgacctccgccgctatgaccgccgcgaacggatggatcgtgaaatgatggctttcacctatatgcattccaccaccatgctactgataaaacgtgccaaccggtacttccccatcatagaaccgatactgaaagccaacggcatccccgacgacttcaaatacctgatggtaatcgaaagtaacctgaacaacatcgcccgctctccggcaggagcagcaggactgtggcagtttatgcccgccaccggacgggaattcggactggaagtgaacgacaacgtagacgaacgctaccacattgaaaaagcaaccgtagccgcctgtaaatatttcaaacaagcgtatgccaaatatggagactggatggctgtctccgccgcctacaatgccggacagggacgtatctcctcccaactcgacaaacaactggcaagtcatgccatggacttatggctggtagaagaaacttcccgctatatgttccgcatattggcagccaaagagatattcaacaacccgcaacgttacgggtttctgttgaagcgggaacatctgtatccgcccattccctacaaaaaggtgaccgtctccactagcatcaatgatttgaatgattatgccaaatcacaaggtatcacatacgcacaactccgtgatgccaacccctggctgcgcgacacctcattaaggaacaagaccggaaagacatacaccctctatattcctacacaagaaggtatgtattacgatccgaaaaaaacagaggcctataataaacaatgggtgattgactgaaaatcctctcccctaacctcttctcatagcggaaaacggagtttgcactgcccattcacagccaaacaacctctttctacaagaagatgccggaggaacatccaaatagcatttagtatgaactgttagtatgaaactgaaagaaagaatccatcgttttttacatgacgaaaaactgaaacgaaagttgtacgtcatcatcttcgaatcggacactcccgccgggaaactgtttgacgtgattcttatcggctgtattctagtcagcgtactgcttgtcatcatcgaaagcctgaaagggcttcccagctttctgacgactccgttcgtcattatggagtaccttttcaccgctttcttcactttcgagtacctgacgagaatctactgctcgcctcgtccccggaaatacatattcagcttcttcggaatcgtagacttgctagccacccttccgctctacatcggcctgctcttccccggtgcacgctatctgctcatcatccgtgctttccgcctgatacgggtattccgtgtcttcaaactcttcaactttctgaatgagggcgaacgactgctcaccgccttacgcgaaagcagcaagaagattgcggtattcttcttatttgtcgtcatcctggtgacttccatcggcacgctgatgtatatgattgaaggaacacaacccaactcccagttcaacaacatcccgaacagcatttactgggctatcgtcaccatgactaccgtaggctatggagacatcacccccgtcaccggtcttggtaagttcctttccgcctgtgtcatgctaattggttacacaattattgccgtaccgacagggatcgtatccgcctccatgatgaaagactacaaacgcagaagagacaaagaatgtcccaactgccatcgctccggacacgaagacaatgccgagttttgcaaatat

SEQ ID NO: 8092 - DNA, 18916 bp, Unknown
  gut microbiota DNA sequence
gtcacgccgatggtactgcgtaacagtgggagagtaggtagccgccgtttttagagaagccccttgattcagcaacgaatcaaggggctttctgttttgggtactttgcaaaatttctgttttttgatttatcaatggtactttggtatttataccgccctttttagcagatacaaacctcataatagtttgttcaatagagatgctttttttaacaaattaaaatgatgttccctagaacaaaacactttagaacttgttcttatagtagagacaaatttttatgcttaaatgatgtgaacaatgatactcgtgtacattttattgctacatttgtcgccgaatctgtaacgaacgatttaaacaactaaaaatacaatgaaactttcgccgaaattcatattagcttttgttctgctgatgctatcttttagcatgggtggaaatgctatgaatttttcggcttatgcttcaaactgtgaagcttcttgtcaactgtcagaatcgtcttctgatgttaatcgtaattcttctgtagataatcagtcagttagttatgataactcgcagtcattaactatttctgatgtagaattaggatttaaattagtaactgaatcaaactctaataattatcgcctacgtagaatcattgaaatcaatgactccttgaaagacgttatgcataagtttctcgtgttaagagagaattctttagtattagatcaaagtaaatctttttattcggataaggatccacattactccattacgtgtagcgattactatgtgttcgctctaagacatatccttatttagtttatttccccctattatccgttttttttcgtactctgtatgaactgtgtgactttttccttttaaaagttgcagggtctgtagcgcagtgtgcctaatcgaaatttttacttcctaaataactaaaattaatttcttaacaaaaaaacttattatggaaactactaaaaaaactcaagttgtaggtataaaaaatgccggtatcgtaatcatctgttgtttagtaatagctgtatgtatcttccaattcctattaggtaacccgtccaactttatgaacaatgacccgaacaatcacccgttgaacatgttgggtactatttacaaaggtggtatcatcgtgcctattatccagacattgttgttaaccgtacttgctttgagcatcgaacgttatttcgctcttcgttctgctttcggtaaaggttcattgtctaagtttgtagctaacatcaaagacgctttagctgccggcgacatgaagaaagcacaggaaatctgtgacaaacaacgtggatctgttgctaacgtagtaacttctactttgcgtaagtatgaagaaatggaaaagaacacatctcttcctaaagaacagaagctgttggctatccagaaagaacttgaagaagctactgctttggaaatgccgatgatgcaacaaaatcttccgatcatcgctaccatcaccactctgggtacattgatgggattgctcggtactgtaatcggtatgatccgttcatttgctgctttgtctgctggtggtggtgctgactctatggctttgtcacaaggtatctctgaagctttgattaacactgctttcggtatcttgactggtgcattggctgttatctcttacaactattacactaacaaaattgataaattgacttacggactcgacgaagtcggattctctatcgtgcaaacttttgcagctactcactaattctgcgaacccttataaaatctattattaatcatgggtagagcgcaaattaaaaagaaaagtacgttcatagatatgaccgctatgagtgacgttactgtattgcttctgactttctttatgttgacatcaacatttgtgaagaaggaaccagtgcaagttaccactccggcttctgtatcggaaatcaagattccggagactaatgtactccagattctggttgatccggaaggaaaaatatttatgagcctcgacaagcagcaggatatgcaggctgtcttggagagcatgggtgaagagtatggcattaagtttactccggaacaagagaagagatttatgttgtcttctacttttggagtgcctatcagaagtatgcagaaatatcttgatctccccgaagatcaacgggataagatccttaagaatgaaggtattccatgcgatagtgttgataatcagtttaaatcgtgggtacgtaatgcacgtactgctaacgctgatctacgtattgccatcaaggcagacgctacgactccatactcagtgataaagaacgttatgaactcacttcaggatttgcgggaaaatcggtacaatctgattacttctctcaaagcagaatctgaaaattaaaaaggaggaaatacaatgagtgctgaagtacaagagagcagcggaaaaagaggaaagagcaagcaaaaaaagataactgtccgggtggactttacaccgatggtggacatgaatatgttgctgattactttctttatgctttgtaccacactgagcaaacctcagacgatggaaataagcatgccgagtaatgacaaagatattactgaaaatcagaagagtatggtgaaggcttcacaggcaattacactattgctggggcctgataataaactctattattatgagggagaacctaattataaggactatacctcgttgaaagaaactagctacggtgcaaatggactgcgtgccgtacttcttcagaaaaatgctgttgctgtcaataaagtaagagaattgaaacaacagaaattggatcttaagataacggatgacgaatttaagaagcaggtttccgagataaagagcggaaaggataccccgaccgtaattattaaagctacggatgacgcttcttatatgaatctgattgacgcgctggacgaaatgcagatatgtaatattggtaaatatgtgataacagacattgcggaagctgatgaattcttaatcaagaatttcgatgcgaaaggtggattgtcacagaacttagccgataattgatgtaacacccaaaaaagaaaagtaaaatggcaaaattagatttagcttcttcggaatggtgtcaactgatttttgaaggcaagaaccaggcatacggagcatatagaatgcgtgccaattcaacaaaacgacacaatgtcgccatgttgattgtggtaatcatagcggcagtcggatttagcatccctacactgcttaagttggcaactccggagcagaaagaagtgatgacagaggtgactaccttgtcgaaattggcagaaccggaaatcaaacaggaagagatgaaacgggttgagccggtggcgcctcctccccctgcactgaagagttctatcaagtttactgctcctgtcatcaagaaagatgaagaggtgcatgaagatgatgagatcaagagccaggaggatttgaatgctactaaagtatccatctctattgccgacgtaaaaggtaacgacgaggcgaatggtaaagatattgctgaccttaagcaggtggtgacacaggctgcaccggaaccggaaaaggttttcgatatggtagaacagatgccgactttccctggtggtcaacaggaattgatggcttacttgggtaagaacatcaaatatccgactattgcacaggagaatggaacacaaggtcgcgttattatacagtttgttgtggaacgtgatggttctatcactgatgtgcgtgtggctcgtggtgtagacccttatttggataaggaagctgtgcgtgtggtaaaaagcatgccgaaatggctccctggtaaacagaatggaaaagcggtacgtgtgaagttcaccgttccggtaatgtttagattacaataaaagatgatgaagagacaatttaggctgataggactcgtagcgttggtggtgttgagtgcttgtaactcaaaatcgaaagggccgacggatacttattcttccggtgtggtatctattgcagcggatgagagtttcgaacctatcatacaagaagagatagaggtgtttgaaaacctttaccctttggccgggattgttcctcgctacacaactgaagtggaagcgataaatttacttctgaaagacagtgtccggttggctattacaacccggacactgactaaggaagaaatgaattcattccacagccgtaaatttttccctcgcgagataaaattggctacggatggtctggcattgatcgtgaatcgtgctaatccggattctttgttgagtgtacgtgattttcgccgcatcctcaccggtgaggtgaaaaactggaaagaggtaaatccggattcccggttgaaaggaattcaggtggtgttcgataataagaattccagtaccgtacgttttgcaatggactcaatctgtggtgggaaaccgttggctgaaggtaacgtcagtgccttgaaaaccaaccagcaggtgatagactatgtagtgaagaatcctgatgccatgggagttattggagttaactggctggggaaccgcagtgatacgaccaatctttcttttcgtgaagagatcagagtgatggcagtcagtgctgaagatgtggcaactcctgcgaacagctataagccttatcaggcctatctgttctatggtaattatccgctggcacgatccatctatgcattactgaacgatcctcgcagtgggctgccctggggatttgcttcttttatgacatccgacaaggggcagcggattatattaaaatccggacttgttccggctacacagccggtgcgtattgtccacgtgaaagacgaataataactaaaattagagactatcatgaaacgagtacaaatgtttttagctggagcgtttatagcagtagggtcgctctgtgcgcaatcaaccgatgccgaatggcaggcggaagttgccaaattgaaagaaactattcagacgaatccggcacaggctgctgaagaagccgagcatctgattaaaggaaagaataaaaagaatgtggaacttttggtagctatcggaaatgcgtatctggatgctgacaaacttcccgaagcgcaagaatatgcaactcttgccagaaaagcgaatggtaaatcggctcttgcttctgtattggaaggaaatattgccatgaaacagaaaaatgcgggtctcgcttctcagaaatatgaagaagcgatttatttcgatccgaaatgtacggaagcttatctgaaatatgcagatgtttataaatcagccaatgcaagtcttgctattgaaaagctgaaccaattgaaagccttggaaccgtccaacacagccgtagacaaaaaactagccgagatttattatttaaaaaatgattttagtaaagcggcagaagcttatgcgaattttgcaatggggcctactgctacggaagaagatttggtgaagtatgcgtttgctttatttttgaaccatgattttgagaaatcgctcgaagtggctaatatgggattacaaaagaatgcccatcatgctgcgttcaaccgtctggcaatgtataactatactgacctgaagcgttttgatgaagcgataaaggcagcggacatcttcttcaatgaatgtgaaaaagccgattattcttatttggattatatgtattatgggcacttgctggaaagtctgaaaaaatatgatgatgcagtaatacaatatgagaaagcggtaaagatggatccgacaaagacggatttatataaaaatatctcttctgcttacgaacagaagaatgattataaaaaagcaatcagtgcttaccagaaatattattcatcccttgataaagaaaaacagactccggacttacagtttcaggttggtagactttattacggtgctggtacgcaacctgattcattgacaatcactgttgaagaacgcaagcaggcgttgatgtccgccgattctgttttccatgcaattgcggaagcggcaccggacagctacttgggtaacttctggagagctcgtgccaattcagcactggaccctgaaaccactcaagggcttgcgaaacctttctatgaggaagtggctgctttattggaaagcaaaaatgatcctcattacaattcagctttggttgaatgttacagttatcttggatattactatttgttagcgatcgagaatccggcattgaaggccgaagcaaaggctaataaagataaatccatagaatactggaataaaattctggctatagaccccgctaatgctactgctaaaagggcattggacggcatcaaatagtgaataattttagttgtttgtcgtgacaggaggagtggagagtgatcttagctcctccttttttgcacttttttctccttttctattggaatattcaaaagattgtctacatttgcggtgtactattacactaatacactaagaaacattgttcattaaacagaaatgctatgattacagtagaaaatctttcatttacttatcgtaaatcgaagcgtgcggtattacatgatttttcgctttcgttcgagtccggcagggtatatggactgttgggaaagaatggcgcgggaaagtctactcttctctatctgatgtccgggttattgactcctaaaaacggcaaagtggtgtttcacgatacagatgtgcgccgtcggttaccggttactttgcaggatatgtttttagttcccgaagagtttgaattaccttcagtctctctggttagctatgtggagttgaacagtcctttttatccccgtttcagcaaggaggagatgattaaatatctccattattttgaaatggatatagatattgatctcggatcactttctatgggacagaaaaagaaagtattcatgagctttgcgcttgctacaaacacttctcttttgttgatggacgagccgaccaacggactggatattcccggtaaaagtcagttccgtaagtttatagcatcgggcatgtcggatgataagacgattgtaatttctacgcatcaggttcgtgacattgataaggtgctcgaccatgtattgattatggatgacagccgtgtgttgctggatgaatctacaagtaatatttgcgacaaactcttctttgtggagagtgacaatcgggaactggcgaaaaatgctcttttcgcaatccctactatccaggggaattacctgatacttcctaacgaagaacaggaagaatcggaattaaatctggaacttctttttaatgctacgttggctgctcctgaagagatagcccgattgtttcacactcaaaaataaaagacgatgatgaaagatacttttttcagtttgcctcgttttatgaatctttgccgtaaggagatggtagagagttggagatcgaatgtgcttcgtatggtgttgatgtatggagtgatggcggtggtattggtttggaacggatatactcaatataattatcacgattcggtttattttattcgtcatgcaaataccgatcctgcatggggatttatattgatggcttttttgtggtttctatttgttttcgggtgcttaagtgcatcgctggtgatggagaagatgaagaataagactagtcggctatccacattaatgacaccgtccactcctttcgagaagtttttttcccgttggctgatatcaactatcgtatttttagttgtttttttgattgcttttaaattggctgattatacaagagtaatggtttattcgcttatctatccggaggtaaaagaggtgatactccctgtcaatctgggagatttagtcggtagcgggaaacggtggtttttattcaatgaaacgtatcagttgatattagtcctttctatatattgctttgtgcagtcattgttcgtattaggtagttctgtttggccgaagaactcttttcttaaaacttttgtttcggttacaatcattgttctgatttatgtattgatgggaatgttgacgggtaatatgctatttcatggaaacaacaataaagattacggctatattttttcttctttcacggagcaacaagttttcaccttaggaaccatagcctttatgttttttgcattggttaattgggtacttgccttttttcgttttaaggagtccgagattattcaacgtatgtaatactctagcctatgaattttaaagaaagtaaagccatttatctgcagatcgctgataggatctgtgatgagatacttctggggcaatttggggaagaggaacgcatcccttctgtcagagaatatgccgctattgtggaagtaaatgccaatacagtgatgcgctcatttgattatcttcagtcacagaatattatttataataaacgcggcattggttattttgtctctaccggtgcaagggaactgattcattctttgcggaagaatacttttttgaaagaagaactggattacttcttcaagcagattaagacactggatattcctatcaaagagataaccgatatgtaccgggaattttgtaaaaaagaaaagtaaaacaaatattatgaaacgtacaacttatatattaattgggctttttgtagccggactttgtgtgctggtaggcggaatgtttgtgatgtattgtctggggaggccgcacttttccaatcaaataaatctgcaaggagagcagctaaccaaagaaatcccggcttgccgggtaatatggcttgctcaaacggagatgcatacagaagaatgtagtgtctggctggcaaattcttttttgcgagtgctgccttcaaaaggagagaaaaatgaattttcctgttcgcagaaagtaaatgactatctgaaaatgactgtcatgggggatacgttgaaaattcttttggactatccgctggataaactcctgcaagagttaaaggaagccagatatgtagcgatgataacgggagacatgcaactgaatctgacgcaagaagtggaatgtgttgtaaatgatatttatatgcaaaagattgttcttaaaaatttgacaaaggattctctttccattaatacttctaattctatgcaagtggattcgtgcgattttagagctttgcatgttgccaggagtggcaggaatgtggaatttcagagtggtaagatcaataatctgcatttgaatctgaatatgatggataattggtctgtaaatgtgcaagaatgtcggattgatacggaatacttgacaggtcacaatgggaatgtgaaacttcaaaaaggagagtgcaaacgtatgttttggattcctgaaaaggatgatgccaaattacaggtaactttgaccgaaaaagcctgtgtgacgatgatagaataaactggcatatagattaaaaaaggagtaaagatgtatttatcatattttactccttttttatatggttattacaatgcttttgtcagagtgaagcaatcgatatccggtgcccagttgtaactattacccatgcgaatggtgttatatcctgcttttagttcaacgggaactgtgattttgttatggttattatcctctctcagagaatctattttggtaataatgccgttgacatccagttctatctggcgtcctttaccgtatgagtaatggatagtcatgttgtagcgtccgccatcttcgctatacacttccttccattcggcataattctccggttgtccacccaggaaacctactttcattttgccggaagcttctttgtcattggcataaagaatacctttaggatttttacctaggtcgttgaaaagaggcaagtaagcccattccgcttcgtatagagtcggttccagacgggtttcgccttccatacggaggaacatggcactgtgtgccggaagcgtttgttcgaatgtgccggagaagctgcctaaatcgttatgttttacgagatcacgtacttttacgtttcctccaaattccaatgaagagaacgggacggagaaactgcatacggtatcggaaggattgtagagagccacagcacgtacgtttccacgtttctgctcaatatctttcacaagtacataaccttcattttcatgttgcgctacgtatgcctgcaaacctagcgggtcttggttgagggcaatcaattctttgtttttcagcagttcgagagaagactccggtatgttttccaggttacatccgataagcaaaggagagctcatgatacaccataaaccgaaatgagcttcttcttctgtcggggtaagaccttggccgcccactttgctgtcgttacggaatccgataaccatcatatccatgtcattgtaatgtccgttgccggcataggcagacaggtaaagattcttgccgactacatatcttaatgagccccaatgtgcgttaatatcaccgctgatacgccaggaggttgctgcgtctttggcccaagtacccgggaaggcccatcggcagatattgatggaagcatctttgttcactttgtctatactgttccggattgaagtgtagcgttccttttcattaagtcccagcgcatctcctccgcaatagtcaattttgataaagtcgaaaccccagtcgccaaagtataattgggcgtcttgtggttcatgcccgtagatacctgctcctatacctgcagtgtcattgtcccacatggaaccacacgtactattacccgcatcggtataaaggccggctttcattcccaggctgtgaatatgatctgccaccggtttcatgccgttcggaaaccgtttttcatttgcaagcattattccgttgtcgtcacgttttccgaaatagccatcatcaacattgacataatgatatccgacatctttcaagcctttttccaccattaggtcagcctggtgtttgataatgtcttcactgatgtctacacgaaacgcattccatgaactccatcccatgataggaggattgactgccttttcattttccgaaagagtggtttgagtctttgtacaactgatgcacataaaagaagctactgctactgtaaagagataaatcctgtttctcatgatataataggttggtgttttttttgcatagccgtcccgatttcgtcccggcgactaaataaaattaaagggtaacttactgtaatccagaaagctaccctttatcttgtcggaatgaggcgactcgaacgcccgacccctacgtcccgaacgtagtgcgctaccaactgcgctacattccgattgcttaagaagtggtgccaccaggaatcgaaccggggacacaaggattttcagtcctttgctctaccaactgagctatggcacctttctcgtttgcgggtgcaaagataagtatattttttaataccgcaataacttcgtgggaaaatttcgccaaattctgaccgatgaaaatattaatgtatttgtgttagaataaatatgtagataactcactatttatgcagcatattttataaatttacgcactgaaactatcaaaacattataaacactctaatcctatgtcatcactggcaattatcattataatagttctatcagctaccctcatttatgtgtgggcaaagtgccagtcacttcaaaaagaggtacattcgaaagaaaataaagagaatgaacttaagaagttggctttggttttgcagaacatcaatgcctacttcttattgattgacaaggattttgtagtctgtgacaccaattattattctttgaaccgtctgcctgttcaggtaggtggagttacaaaaagagtgggggatttgttgcattgtagaaacgcgatagcagccggtgaatgtggtcagcacgaacagtgtaaactatgttgtattcgtgcgtctatcggtaaggctttttataagaaagcaagttttaagaatctggaagcttcgatgaagttgttgagtgaggatgaaatgacagtgactccttgcgatgtatcagtatcgggtacttatttgaatattcatggccaagattatatggtgttgactgtttatgatgtgacagaactgaaaaatgtgcaaaggttactgaccattgaaaaagaacattccatctctgccgagaaattgaaatctgccttcattgctaatatgagtcacgaagttcgtacaccgctcaatgctattgtcggattttccggtttgatggtgtcggcttccggcgaagaggaaagaaaaatgtatgctgatattctcgcagagaataatgaacgattgttgcgcctggtgaatgatattttcgatctttctcaaatagaatccgggacggtagatttcgtatataaggagtttgatgccaatgatttgttgagagaattggatggaatatttaaggcgaaattgaataactcgccggtggaattgatttgtgaggcgcatgtgcaacctattatgatgtattcggaacgagaacgtatcattcaggtattgtctaacctcttacataatgcgatgaaatttactgcgtcgggtgaaatccgtttcgggtgccgtttggaaggaatggaagaagtttacttttttgtgtccgacacaggcattggtataccggaagaagaccagaaaaagatattctcacgtttcataaaactcgaccgtgaaatgcagggaacgggacttgggctgactctttcgcaaacgattatccaaaatctgggtggaaacctcgaactcgattcgaaggtcaaccggggatctactttcagctttgtgttgccgagggtgattaagccggaattgattaagccacagccataaagtaaatcgcccttactacagttgtaaagtgtatctcaaaagtgttaaatctgacttttggagatgcttcacttgactgtagtgagggtgattttataaattcaaggcttttcgaattgtcttgaacttcttgatgaacaggatgaatgtttagtctttacgacttaggtgcatccttatctttgtctccggttcccggagatgctttgctggcagaggaacttccgaaggaagctgaaccggaggatgctgtgcctgaagttgctgcattagaagcggttgccccggggttagctgtgcttgtcccagttgttcctcctgtgtgtgcagaagttgcattagcaggacgcggagcattaacgctgcttgcactaacatttgcagtggcaggttgagcctgaacttcccaatggaacggttcgaaattggaattaggatctacccaagacggtttcttggaagcgtagataataaacggagcaacgacaacgataattgcaccgataattagtacggagaaccaaacggtgttgctaccggtagaaatctggctgggcgggatgaagctaagaataaaggcaagtaatgatccgcagaagccaagaccgccaacaaaccacatcaggccgttgccggatttaccgatacggaacggacggttgagtttcttcatcttataacgcaatgcgatagctccggagaacatcaacaggtacataatcagataaagaataactgtcagctgtgacagaatttgatagaaactctgtacggaaggcataacaacaaacaacaaacttaatacggttacagcgataccctgtacgaacaagatattcttttgtacacccagcttgtttgttttctggaagaacggaggcatataaccggctttacctacggcaaatatacctttggacggaccggcaacccatgtcaatacaccagccaatacaccgaaagcaagagcgaccgcaatgattggtgacaaccaggaagcatgaatatatttgaaatagttgtcgaaaccgacgagcaggctttgagtcaggttgatgtctttagcagggataatcacacctaatgcgaaagtacccaaaacgaagatcaacactgtgataagcgcaccaataaatacggctttcggatagtttttagaagggttatctacgtcttttacgtggataccgcccatttccataccggcataaaacaagaagatactggcagcaagaacgacattatcgaagttggtaaagtcggggaagaagctgctgttgaaatccatattggaatgtccgcccgttgccaggtaaatgattcctaagataatcaacaatccggccgggataatggtaccgaccataccaccgattttggctactttacctacccagctcatacctttcagggagatgaaagtggccagccaatagatgataagtacgacgacgagcgtataatacttattgtttgccagtgacatgtcatgtacgtcattcattccgatgaaagcgatagatacggcaccaaacgttaatactgtcggataccagatcgtactttcgatccattgcacccagatggcgaggaatcccagtttcttgccgtaggcctcgcctacccaccggaatacaccaccctgcttatcctgaaacattgctgccaactcggctgcaacgagcgatgtagggattagaaagacaatagctgcaaaaagataatagaaggccgaactcattccgtatacggcctcggctggtagtccacgcaaggatactactgccgtaacattcatgatagcaagggtaaacacacccagcttcactgcatttttaatatttgccataagttaaggttttaagtgaaaaatattttaaagtcagtgttataacaacattttgcgcgagatgtttccgcaatctctttcaaagttcgttaattaacatcgccggaacgggatattgcaacccccgatttacctgtttcggaacaattacttttctcgattgtttctaaacaatctaaattatatgtgaaccattttattataaactaagtagttatgaaatcagcgttttcagattttatttccgggaaaaaggggatttatggtattcttcacattattatattaataatgtctctttttctggttatcagtatctcggtggatacttttaagggaattccgttctatacacagtcttcttacatgaaggtacagctatgtatctgcctttggtttcttttcgattttgtgttggagttctttttggcaaaacataaaggacgctatctgcggacacactttatctttttattggtggctatcccttatcagaatatcatcgcatattatggatggacgttttcggatgagattacctacctgcttcgtttcattcctttattaagaggaggatatgcgcttgctattgtggtcggctggctgacttacaaccgggcttcgagcctgtttgtctcttatctgacgatgttgctggcaacagtttatttctccagtctggcattttttgtgctcgagcatcgggtaaatccattggtgaatgattatggagatgccttgtggtgggcttttatggatgttactaccgtggggtcgaatattatagcgcagaccgtgaccgggcgcgtgctttccgttttgctggccgccttgggtatgatgatgtttcctatctttacggtttatattacaaatctgattcaacaatccaacaagcgtagaaagcaatattacgaagaggaggaacaacagaaaaaggcttccgcccaaaaggaatcggcagaaaaagctgtcgtacagaaggttaatacataatatgcttgtgtggcggataaaaacagatagaatgagagtaattgtaatgtgttgaaaatcagcttagaaatacttttcttaatagtattattacttttctttataagcatggaaggaaaaggggaggaaaagtggaataactttctatctttgtagaaaagagacagaggcaaacagttgttagttgttgtctataaatgaataagttccaccttatccgggtgaataatagtgacactgatatgctcattttaattactggagttgcataggggtaaatttaatttgttgtatttgataattaataccgtttgtattgaaaatactggtgggagatcaagcgggaaatcaatgggataaggaggaatagaaaaaggttactatcgggagatagtaacctttacctacttataaaagagatcgagagagagttttagtcaacaacggtgatatggttgttgctaaacacatttaattccagcttgttcatgatgcattgaatagctaactgcgctttcacggagttgcccgatccatccaaaggaggagcaaaggcagcaataccgaactgtccgggcagtacacccatcacaccaccgcctacacctgttttggcaggaataccggaagtgtacatccagtcgccggtatgttcatagaaacctactgcggcaatcatggcagtgattttaggagccagcgtggcatcaaaaacttctttcttagtcaccggatttacaccaccgttggcgattgtgccggctgcaatggaaagctgcaatgcagtcactcctaatgagcactgacgggtgtagaggtctaatgacatatccggatcatcataaatccgattataatttttcagcaaccatgcgatagaacggttgttgaagttggtatccgattcggacttgtacaattcatcaatcaactgtggggcgctgccgcataaatcggtcacgtttcctacgatggcatcccatttcttggcagagtcgccaatgggctgcaccatgctgcaggcggagatggctccggcgtttaccagcggagtagacggatggtcgttctccagcaagatggcgataattgaattgaaaggtaagcctgttgcatcggctccaatcttgtccaggatttctttggcaccatattggcgcagtgccagaatagccgtatgtactttggatacggattctataccgaagcggtagtcagtatctcccacatggatggtctgcccgttgagcaggcagacactgattccaaagagatctttgttgacatttgccaggtaggggatatagtcggcgttcttgccgccggtattagtctttacctgatcgtatgcctcctgtaccacttctttcaattgagcgagtgttacttttttatccatagatctttcttatttttttacggttttacgacgaccaccatggttgaacatcttagcttctactggaagattcttttcttgagccatacgggtaggggtaggatattccagtttttccagttcagtgatggcgttgttgatgtcgcccagtagcatatctgccatatcgcggctgaatccctgacggacaacgacacgcatcactacataatcttccagtttggaaggcaaggtgtaagcaggaaccatccaaccgtgttgagacagtttgtcttgcaaatcgtacaaagtccatttggcgttctttgcatattccggtttcagataccagatgaataatgggttcacaacatcttcagagtagttgacaaacggaaccatcttggctatttcgctgtggatatatttagcaatttgcagggagttgtactgtacttctttgtatccttggaatcctaaacggatgaattgataatattgtcccaggatttgtgcagccggacgggagaagttcaaacctacctgtgtaatgttggcacccagataattcacgctgaatgacatttcttcgggcagatattctttgcctttccagcaaacccatccgagtcccggatataccaaaccaaacttatggccggatacgctgatagaaagtacccatttcaaacggaagtcccatttcttttccggatacaggaacggaaggatgaaaccaccactggcggcatctacgtggataggaatgtcataaccggtcttggcattgtaagcatccagtgctttgtccaatgcttcgacgtcatcattcagtccagtccatgtaacaccttggataggcacgatacagatggtgttttcatcacacattttcaaagcttcttcggggtcaagagtggttttttcgagtgtcaaaggcacttcacgcatttcaatctgccacaactgtgcaaacttttcccaaacaacctggaaacctgtagaaataacaaagtttggtttatcaaacggtttgccctgtgcttgtcttttcttgcgccaacgcaaccaggcagctacaccacccaacatacatgcttctgaagaaccgatagccaaagcaccggttttccaggtatctttttcaggagagttccacaagttggcaacgatgttgatacatttaccgttcatcactgcgatacgcggatattctgtttcatcaatgtagttgatgttaatggcctcattcatcagcttagtggcgtattcatccatataagtagtcacgaaagtagccagattcaaacgtggttgggtttgagcaaatgtttcatctttcaccatttgataggcgacttcaggagtagtaggtccatcaggtattttctctaccggagagggttgtaacattctgtctgaaccaaatacatcggtttttgcatcaccttttctgaaatttaaatcttccatactaatttgtttttttaaaggtttagggcgatggggattttccccgtcgaatttcccacaacaacagcagatagttttgaaagtttccgggttttacattatttggcgtttattaaggaggaggacgtccttattgaaacgggcctattcaccacggaggacgcagaggacacaaaggtgaatcttggtcatttctgtactgaaatgagctaaatgataattttgcggagtgccctgaaagggcttaattatatagcgtcgggcaacgccctacgtaaaagcgacaatctgaatttgcgccctgaaagggcataattgtatacagttccgccctttcagggcttgtagctggtgtg

SEQ ID NO: 8093 - DNA, 25755 bp, Unknown
  gut microbiota DNA sequence
aacaagggatacgaatcgtatattaccaataaatatcccgataagaaaatagctattctttcctgtatggacacccgactgactgctttgcttccagccgcattaggaattaagaatggcgatgtgaaaatgataaaaaatgcaggtggcgttatttcccatcctttcggtagcgtgatacgtagtttacttgtggctatttttgagttgggggtagaggaaataatggtgattgctcattctgactgtggagcttgccacatgcacagtgaagtaatgctcgaaaaaatgaaagcacgcggaatcaattcggattatattgatatgatgcgtttctgcggagttgactttcattcgtggctggatggcttcgaagatacggaaaagtcggtgagaggaacagttgattttattgtacgccatcctttgatcccttcagatgtgacagtctacgggtttattattgattctactaccggggaattaactcggattgtatagataattagatagattaggtaaatagataaacttcttttttaatcccttaaatatagtgacgctatcctatcatgatagtgacgccattcctattgtatagtgtcgctatgtctggaggatagtgacgctattttgaagacaaaaaaataaggcagctttttatcggctgcctttatctttctgcggttatatactttctttgactggtgcactcgtttgtgacaaatagggtgcccgtacatctcaatttctgcctcacggctggctttacgattcgctttaatgtaatcgtcttgtgtaattcgctttttcataatgaaattatttatctgtgcaaagatacaatatattcttcatttagtggagtatttggcactcttttcatgtcatagattcccttccgacaatagaaatgaaaaagatacttttatttcctattacgctcggtttgcattatctttgcatacattaatcaaatgaaaccggaaaataatatggaaaatttcagtgaattaataaagaaccgtcgtagtatgcggaagttcaccgatgaagagttgacacaagatcaggtagttacgttgatgaaagcagctttgatgtctccttcttccaaacgtagtaatagttggcagtttgtagtgattgatgataaagaggtattgaaagaattgtctcattgtaaggaacaggcttcttcattcattgccgacgctgctttggcaattgtggtaatggccgatccgttggctagtgatgtttggattgaagatgcttctattgcttctatcatgatacagttgcaggccgaagatctcggcttgggaagctgctgggtgcaggtccgcgaacgtttcactgctaccggaatgccttccgatgaatttgttcatggaatcctgggcattcctctgcaacttcaaattctttccgttattgctatcggacataaagggatggaacgtaaacctttcaacgaagaacatcttcaatgggagaaaattcacataaataaattcggaggaaaataaatatgggagctgctaaagcgagtaacagcaaagatacttatttggctactgctgttacctttatcgttatcggagcactttatctgattgataaactgattcatttctctaccctcgggttgccttgggtgatgaataaagacaatatgttattgtatgcttcgatctgttttcttattttcaaacgcgataaatcaattggttttgtgttacttggtctttggctggtgatgaatatcagtttggtaatatcattgctgggttcgttatccgggtatctgctgccattgactttgctcattgtcggcatcattttattctggtttgcaaaacggtaaggaaataatgaagagaagtatagaagatacaccgattgtgtttattggcgcaggtaatctggctactaatctggcgaaggctctctatcataaaggcttccgtattgtgcaggtatatagccggaccatggaatctgctcgtactttagccgagaaagttgaagctgaatatacaacagatttacaggaaatctccaaagatgctaaattgtatatcgtatctttgaaggatgccgctttagtagatttgttgccgcagataacagaaggaaaacagaattctttgttggtgcataccgcgggaagtatcccgatgagtatttgggaagggtatgcagaacggtatggagtattttatccgatgcagacattcagcaaacaacgtgaagtcaattttcaggaagtgcctttctttgttgaagcgaaacgaccggaagatgtagagttcttgaaagctgttgccgccactctttcggagaaagtttacgaagcttcttccgagcagcgtaaaagccttcatttggctgctgtttttatctgcaacttcacaaatcacatgtatgcattagctgctgacttgcttgaaaaatacaacttgcctttcgatgtcatgcttccgctgatagacgaaacggcacgtaaagtacacgagctggcaccacgtgatgcacagaccggacccgctgttcgttacgatgagaatgtgatgaacaatcatcttgccatgttggtagattctccggcattgcaggaaatatataaactaatgagcaaaagtatccatgagcaccatcaactatgatttatcccgtatcaaggctttagcttttgatgtagacggagtattgagttcgacaaccgtacctttgcatccttccggagagccgatgcgtactgtgaatatcaaagatgggtacgctatccagttggctgtgaaaaaaggacttcacatagccatcatcaccggtggccgtacagaagcagtgcgtatccgttttgaaggactgggcgtgaaggatctgtatatgggatccgccgtcaagatacacgactatcgtgattttcgtgataaatacggactgaccgatgatgaaattctctatatgggcgatgatgttccggatattgaagtgatgcgtgaatgtggacttccatgttgtccgaaagatgccgtgccggaagtgaaatccgtagcaaagtatatctcttatgcagacggcggacgtggctgcggacgtgatgtagtggagcaagtactgaaagctcatggtctatggatggcagaagatgctttcggctggtgaatgaattagacgattggacaatttacgatttacgattggagtatctctgtaaattaatccggtgatgttaatagaagtactcttgaccgtcaacgaaatcgctcttaattatcaacagaaacattcttcaatcatcaataaatagtattttcaatcgtaaatcgtaaatcgtcaaattgtaaataaaatcatgcttgataatttaaagaaatatcagattatactagcctccaattctccccgtcggaaagaattgatgtcaggcttgggagtggactatgtagtcagaacattgccggatgtagacgagtcatatccggatacattggttggtgctgaaatacccgaatatattgctcgtgaaaaggcagatgcctaccgtaccatgatgcagccgggagaattattgattacagcagataccatcgtctggctggatggaaaagtacttggaaaaccggagggcagggaaggagccattgaaatgcttcgtgctctttcaggaaagtctcatcaggttttcacaggtgtttgcctgactactactgaatggcaaaaaagctttaccgcttcctctgaagtattgtttgatgtcttgtcagaagatgaaattctgtattatgtcgaccgctatcggccaatggataaggcaggagcctatggtgttcaggaatggatcgggtatatcggtgtaaaatcaatttcaggtagcttctataatattatgggacttcccatacagaagttgtatggagagttgaaaaagttatagtaaggatcctgaatctatctgaatatttctacttaccccaataatatgagaaggctgcctcaaaatagaaaatgaggcagcctttttctgtattcttaagcagggactgctgaatatcccgaattgaaagatgcaggagactataataaatccaacatcagaggaatgtcctcttctcgaatcccttgtgtgagaagagattcttcatctttgtggaacatctccaagaatctttcccggttcccactagccgtaatggcttttccgtagaaaacggcagctttctgaatatctcccattacccaggccacatgccctgcgttcatataatcaatagccagcggcttttgttcaataatcttttcataatatttcatcgcctgttcatatttctggctgatgaacgagcaccaaccgatgccgcgccatgcctttatacaattgttctcgatgaaatccaatttgaagaaataattcagagcttcctcgtattgtcccagttcagccaggcaactaccgatatagaaagtcacattggtatcttccggagcagcttcttctacctttttataataagtgagtgcagcctgatagtttctgtttaaccggtaacaaatagccaggtggcgattgttccagatattatccggcttcagcgtgtctgctttcagataagcctgaatagcttctgtatatttctttcttttctgtaatgcatagccaaacttctgataatattctgcactttctccttcgaatcctccaatagactccagttcttcataaatttcaatagcctcgtcccaacgttcctttgccagataaaaatcggcaatggggaacaatacatcttcccaatacaagatattgtcgagtgcaggaacgtgatgaaggtcgagtttctctttaaaaatatctctgaactcactcttgcgtacactaagtttgaagaaacggtacaagtcgtgcaggtattggttgctgaccgttcccggacgttcattgaacctcttcattgtttcaacattcgatttctctgccaattctgccacctgctgttcgttcaactgactcaacatcatatcttgttgcgactgtggcaattgatgaatcgtgaaaaagagcgagtacttatcgctgttgctgaaaaagcccgattgaagaattaagtccagcagactgcctccctgatttcccgcttgtttcattgctttgagtacattggactgttgcttgctgaatggataaaaccagttatgcacctcgcggaagaacggataatttttcaatgcggcaaaagtgctcatatacacatctgcgccctctaattgcaattcgttcatttcacgcaatttatctcccaggccggacttctcgaacgcatcttcccaatccgggttcatatcattgttttcttcatcgttttcttcaaaaccgaatcgcatatttttcatggaggaaacattcttcagcatttcaggaataatctcttccctcatctttttatcaatcttttccgtttcctgacacaatagcatttggcggtaaatacgtgcgacgtcttctctgaatgaaggtatttcctccatgagatctacccttttgataagttccggataaaaagaaagacggcttctgtagatgtggaagataatcattgtacctactaatgcccgttggctgacgttgacgttagggtgttcgtaagcattgagcagccacattatttttcgtaagtcgaaacattccatcaagctcaatgtgagggcactgacaaataagcataagtcatctcccggaagtaattccgaggcaagcatagcttttgcgtcttcctcgtcttcgggagtccatgcactgtttgtccatgttcttataaacataaacttgagcgtatcttcatgccgtcttaatacttcatccatcttttcgtcagacagtaatccgctgactgccaagtcgtcattaaatgactccaatatgtgtaatattgttttgataccatagttcgacaagtccgccgatctgggagtgcggcgtacctcatgataatatcttgatgaagcgttgtccaacatgagcaaacgtgattggtcggcaattccccaggtgtctgctaccattttttgatacagattccaccggtcagggtcgtttgctccctgtttcatgtattccagcatatatttgtaagaggtctgcaattgttccaggcgagtgcgcaaatcccagtcaggacactgccacagcaaagattccaactgcattaaggcttctttgagtcttttctcttcaagtaaagtacgtatatatgcgtattgttcattaatcgttttttcgttcatcattctttaattatttattttttccaatccaggtcaaacgtttccagagaccttcaaaaggaccgtgtttatggtgtcggagccaccacgaacaaaataccatttgtaatagaacaaaaaggatgccaaaaaggaaactgtaagtgattcctaaatatcgtccaagttcaaatccccaatgatagaacaaaagagaaccgaaaatagattgcccgaggtagttcgtcaaactcattttaccataagatgtgaaacgcataaagaaactgcggtctttcacacggtagaaagtcagcagtaatcctgttaccagcaataccatgaagctaaggctactgaatgaacttaatatcaattgcaagggaacaaggatggcacttcgttcgatgaattccggcagcatattgttcaatccgtagatggggaagaagcagagaagcgaaacggccaatgcctttaaccacaggcgttcgttctgttcgctgtacaggaaatatttgcggcgaccgacaagcattccgaataagaataaccccggtgtctgtaagatacgtccatgttccagtgcccaggtcatattggccagttgtccttcccacatattcatgcggactgtttcgaggaaagttccgttcttttgtacgtcgaaagcaatgctgaaataataacctgccaaactttttcctgccacatagtcaggattacacaaagcataaatcaatttcacccaatcgataggttgtaaaattagtaaagtagcgaagatgacaaccgtgcggtcgctcatccggcagaatatcggaagcataattcctaaaatcgcatacatagtcaatatttcaccggtaaagaaagcggcattgaactgtcctatcatgaagagaatgaataatctccataaaaaacgcaagcggaaatctttccctctccgttgttggttgttgtcctgaatgtagaaactgaaaccgaagagcagggcaaacacagcgtatgctttgttactgaatgtgaagaataatcctctccaaatagcctgatcggtaaatttcatccattcaaaaggtacttcttctgggaaagagtagaaattaaaatgttcaatactgtgtaagagaataattcccattactgctaatcctcttaatacgtcggccacgtctattcgggcgttggtttccgcgattttgtgttccatgatttcttcgtttctgttatttataaggttgatattctataattatttgattccgctgttttaatactgttactccagccctaataccggatgctaatacttaatacttgatacttaattgatacttaatttaaaaccttacctgcacctgtgcctgtatcagattggagtctttttgtctgtctcctttcttgtcgcaaaaggtatattgtgcttgtaagcggcatctagggtagaaccagtattgtacgcctgcaatatagttattctgtttgaaatcagcagctttgttcgggttgaaataatcgaacgaagcgatgaaatcgaaattccgggcgaagcgtacactgcctgttgcatagaaaccttcgcttttcacactccggtcttttccggcaagatattccgtgcgtagattaaaggtggaagtggtgacaacccctcctgcactccagcgtttcttggcgtaattttctccggctttaattcctgtatattccgaatctgctatggcatgtcctgttccgcggataaacgaaccacctacggataaccattttagcggattaaccatcaggttaccgaccacatctttttgactgtttttgtctttggtgttcaatccttgtccattcattacggccactttgtattgcaggaagtcacgaaataattttccgtgaagcatcataccgatatcccgtccggacgtcattccgtaacacttatcgctgccgcttactcccgccagataacaaacagactgcgaataacaattgatgagttctactgtggtaggagataattcattttctatggtatagggaaccttgaattcaccgatacgtgccgtaagtccggggagaaactgataatcggtatacacttcgagtaacatgcccccattgtagaagtcatacataaaatcacaagtccaccgtttggtgatctttccgtgtgccatgaaaatgattcgtttgatgtcgaatgtattgtccgggttcgctgcatcgtcataagtatatcccaattgggcatatccagagagactaatccgttctttcagtgtgttgacaacttgatttagtggtgtctgctcctgtgccaggagaggattttgcatacctgtaatgcataatacaaaggttaagaattggagtagtgtttttcgcatgagttagttgttatttgattttgattatggttgatactgtattatggttgatactgtggggatatacgttgtgtcaatcagattcttttcagagtaggtttcggggattcggtggttttctttcaaccactgtatagctttatctatcccttcagccgaagggcgttttgctttttgataattggggagggcgacgagtcctgtcagattttccggtacacctatttctatcagcacttgctcccattccttctgtggatgcatttttatataatctactcccagattataacctgtgatgagtagttcgatttcttttcttttttggttgagcgcttttcgtgagaaagcggtagccgtaaaatcaatgcccaattcctgtgtgcttactaatgaacgatgctggctgttcatggcgatggatgcggcagggtcgggcaggaaagaggcgtcaatctgattgtactgcaacatttgcagtcggagaggaagctggccgatttccggcatattcatttccgaaagactgattccggctttgcttaataactggtcggtagcatattcgataactgtgttgcgtgacacagctatattcttttctttaagttgttccagttggttgatattactttctttagagacaatgaagcagaaataaccatcatttttcaagacgagccctagatcagcatgatggatagcttgcagcactactgcgctgggatagtcggtaatcatgccatccattttcccggtctggaaagcagcgtcccggtcgttggcagagttgaatgaaagaatagtcaggttcagccctaatgaatcgtagataccttgtgttttagctatatggaaagggagtccgtccagtgtaggcatcatgcccagggtgagtggttgcagttcggttagaggtaaaaaagagccgtctccttttttactctgacaggagtaaaggaagagaaggatgaaccaaaagagtagtatcggtcttttcatacctcgtttttgtaaataagaggaactccgttttttataaataagggcaactcttttcacaaagaactgccctcttatcattaactatttaaaaaattaactaattatctagttctattattcttgaatagcagcgatacccggaagaacttttccttcgattgcttcgagcaatgcgccaccaccggttgaaacgtaagatacaccgctagccaaaccgaacttgttaacacaagctacagagtcgccaccacccacaagtgagaatgcgccgttcttagttgcttcaactattgcttcacctactgcacgtgagccgtgagtgaagttgtcaaattcgaatacgcctgtaggaccgttccaaagaatagtcttagattctttgataacgttagcgaagatttcttcagtcttaggaccgatgtcaagaccttcccatccgtcaggaatttcgtcaacagcacagaatttagtatttgcgtcgttagagaatgcgtcagcaatcttagcgtcaacagccaataccaggtttacacctttttcttttgctttcttcatcaaatccaaagccaggtcaagtttgtcgtcctcacagatagagataccgattttaccacccattgccttagtaaatgtataagtcataccaccggcgatgattaagttgtctaccttgctcaacaggttttcgatgatttcgattttagaagaaactttagaaccacccatgatagcagtgaacggacgtttgatgtcgttcaatactttatcaacggctttcacttctttttccatcaggtaaccgaacatcttgttgtttacatcgaaatatttagcgatcaatgctgtagaagcgtgtgcacggtgagcagtaccaaatgcgtcgtttacgtagcagtcagcgtaagaagccaatttcttggtaaattctttctggctttcttttactgctttcttggcagcagctttttcttcgtcagttgcatcttcagccaaacctcttggtttgccttcttcttcagcgtagaagcgaagattttcgagcaacagcacttctcccggttgcagagcagcagcttttacagcagcttcttcgcccatgcagtcgtttgcgaactgaacttcaacgcccagtaattcagacagatgcttgatgatatgtttcaaagagaatttatcggcaacgcctttcggacggcccaggtgagagccaatgatgatgcttccgccgtctgccaggatcttcttcaaagtaggaagagctgcacgcatacgagtgtcatctgtaatgttgaagttttcgtccaggggtacattgaagtccacgcgaacaaatgcctttttaccggcaaaattgaatttgtcaattgtctgcataatactctatttttatttaaaagtgtttttaaaattcttcttttagaacgaccgcaaagttactatttatttcggttccttgctattaaatcgttatttattcttggcttttggttcctcttttgtaactttataggtgttacagaaatatttgcacatcatttgcaaaccacaggtgtcacatttgggagtgcgtgcctgacaaacataacgaccatgcagaatgagccaatggtgggcaatcggtatgagtttttccggaatattcttcaccaattctttttccacactgaacggggtagtgcaactatccggcaccagtccgatgcggtggctgacacggaatacgtgtgtatctactgccatggcagctttattaaacacaaccgactggatgacattggctgtttttcttcctacaccgggcaactttatcaaatcatccagattgtcgggcacctgactattgaagtcattcaccagcatctttgccataccaaccagatgtttggctttgttgttcggataggacacacttcgtatatattcgaaaataacttccggcgtagtggctgccagcgcttccggagtcggaaaatctttatacaaagggggagtgatgatattcacccgtttgtccgtacattgtgcagaaagaataacagcgatcagcaactcatacggattgttgtaatgcaattcagtttcggctacaggtacattgtcctgaaaccaggcgattactttctcataacgttctttctttctcatcgtagcttgtttttatggtaatgaggcgtcacttttagtttgaaatagagggcggaaactaccgtcaggcaggctccgaaaagataagccttatcaaatgtactaatttctgcgatatatccaccggtcagcataccgataccaattcctacgtcccaagaggtaagataagtggaagtggctgttccccgctggctattgggggcaaggttgacaaacaacgtattaaatgccggaaacatgattccaaatccgacccccatcaacaatgcgataccaaaaaacaggatgttgcaaacggtatcattccattgaatcagatacacacaggctgaaagcaggaagaaactgcagacaaccaggtataatccggctattattacttgtgttatttttccgcgatccaccagtttccccgaaaagatgcgggagattgccatgccgacagccataaaagtaaagaagaatccggtttgcgtgttcaatcctatttggcgggcatacatggcgacatagttggttgtcattccgtaagggatggaaagtaacaataggctaagtccggctggcagtcctttcatcaaaataaaacggtcgagtgaaatcggttcccgtttcacaggaggtttatagggcgttttcaccagactggcacatagaaaacccaaaatgcaggaaccgaatgcgtaacagaagatcgtagcaaaagagactcctgcatcgtgcagaaacagtccgaacatcggcccgatggacatagctgtattgttggtaagcccgtaatagcctaaaccttctccacggcgggaagatggcataatgtctatcactaccgtgtttcctcctactgtaaccattccgaaagagatgccatgaatgattcggaatataataaataaggtaagggagccggctatcaggtatcccccgaacatcatcataaagatgaagtaagcaaacagataaagaggtttgcgggcaaacgtgtcgagcagataaccggaaaatggacggatgcagagagcggctaccgtatagcaggaaagtacaatgccaatagtggaatttccagtttggaagaattctgataaatagaacggcaaaacaggaatcaacaaccaaaagccgaagtagagcaggaagttggctgccaagatgaaacaataactgggagtaatgagtctatcctttgccataatgaatgtatttgtttcaccacagaggacgcagaggacgcagagtctcacggagttttttctttctaatgactttctatgaaaaacgagtcgtagttgatacggctgaaataaaaactctgtgtcctctgcgtcctctgtggtgaaatctaaatttagtaagcgctctcgaattctttcaggaagcgagtatcattttcagagaacatacgcaggtctttcacctgatatttcagatttgtgatacgctcgatacccataccgagagcataaccgctgtatattttgctgtctataccgttagattcaagtacgttcgggtctaccataccgcaaccgaggatttctacccagccagtgtgtttacagaacggacaacctttaccgccgcagatattacagctgatgtccatttccgcactaggttcagtgaacgggaagtaagacggacgcagacgaatctttgtatcagcaccgaacatttctttagcgaaaagcaacaatacttgtttcaagtcggtgaacgatacgtttttgtctacatacaacgcttctacctgatggaagaaacagtgtgcgcgatagctgattgcttcgttacgatacacacgtcccggacagatgatgcggataggaggttgtgaagtttccatcacacgggtctgtacggaagaagtatgcgtgcgcaatactacgtccgggtgagcttcgataaagaaagtgtcctgcatatcgcgtgccggatgatcttcggcaaagttcagtgccgagaatacatgccagtcatcttcaatttccggaccttcggcaatactgaatcccaggcgggcaaagatatcaatgatttcgttctttacaatggtgagcgggtggcgtgtaccgagttccacgggataagccgaacgcgtcaaatccaatccgtcacaatcattgtcctgactttcaaacaattctttcagcgcgttgattttgtcctgcgcttttgttttcagttcattcagtctcatgccgacttcttttttctgatcggcagctacattacggaaatctgccattaagtcgttaatggctcccttcttacttaggtatttgatgcggagagcttcgagttcttcggcattggaggcgtgtaaggcttccacctctttcagaagttgttcaatcttagctatcatattttcgatgtattgttattcagtttcttagtaaaaaccgtgcaaagatataattttatcacgaaccatcgaaataatttgtatctttgttgccgatatgtaccgaaaatccggcaacttatgaaaaagattgttttctgtcttctgcttttaaccttttcttttcgcctggcggcccagattgactatttggagccggtgaaacctttttcttcttatacaggcgagttaggcgaatattaccgtagtgtgttttctttactaaatactggctttcagaaacagccatacgcgcgtttcgcagctatcccttctttttcgccggagtatgcaatgtcggtagaaaggaaaaatgggcgttatacgctgatttcgaatacactatctcgtacctattggcaggcggagaaggggacagtgacggtggatactaaatcggttgtcattagcgcttccctgtatcagtctttaggggctatctttcgtttggtgacagagcaggtgcaggatctggatggttctacggccggtttagatggaattgtctattacttttcttctacagacgcaaaaggcaaagagcggatgggacgaaaatggtcgccggaaaaaggaacgttgatggaacgtcttgtattggtttgtcagtcggcatatatgttatctcggggagagaatatttcggaacagacattggcggaagaggctgcttctttattgaaagcattgcaacagcgtagtaaggaagaaccggatgcttataaacaaccgatgtatgttggaatttatccggtaggtccccgcgcaaagacgctttccggaaggcaggtggaagaacctgctcatttctctgcgatgagtccggaagaatatatttccaatgaaatgatttatccggcaggacttttagagaagaatgtttcgggttatgctttgtgtgagtttactattgataaggaaggggttattcttcgtcctcatattctacgttccactcatccggaatttgcagaggaggctctccgcattgttaaagggatgccgaaatggtcccctgcattggcgggaggaaagccggcggatagtaattatactctttatattcctttccgtccgcaactttatcggaaaaataagtaactttgtatccaaagtccgattaataaaaaagagatattgcatttataacttgaacttaggttcagcctctctaataaataaaaaaataaatttgctgtcatctgtcacagattgttgcttaactatttgataatgagaaaataatggcgtgacagcaacgtggtgacagcactgtgacggcaatcgtgctgtcactgcaaagccaaggagagataaacgcactacaaaggtatgatagagatgcatacccgaatcaagtaaaaatcacagatgaagtttcattgcctaaatagtattaactacaggcagataggctattctatttattacccttgtacttacgggacgggatctaccttgtgactgatagtttcaagccttgaaactatttgttcatcggcttgaaactacagttccgtaggcttgaaacttttatttctcttgcttggaactattagtttcttactgatgaaactatagtttcacgccgatggaactgtagtttctcaccgatgaaacaacctttactctgtaagctggattatgttggagtacttttgatagtataatacatgattgatttcttcaaaaatcattaaaacagaaaacttttcttcgtttgtattgtcttatagccataaacttttaaaacgagaacttatggatgatatgattaacaggcatgattcgatagccgaagaaaatatcgaaccgaatggccgtccggccaaggaccagtttgaagaatggagcggtgaggttgccgaccgtgcggatgacgtattcaagaatgacaagaaagacggtcctattaaagaccgcgagaaacgtataaaagaaatggacgaagtgataaaaaaggaccttgagtaaaggtccttttctttttttctttagtttgccggagtaacgataggttctttgataaaaatactccctatctcaattgttttgtcatcaaatacatctagtctaatatttatcgattccttttcggaaagacttatgaattttccttgaatataatacttctgattatcaataagattggaggcttcttcctcatctaaagccgttataattctgaaagaaatattatactttccggttttttgaaggctgctacaggtaaaggatataagatatttatatcctttattatcggtacttttaactttatccatagaagcgaatttgactgctatatcagaaaggaaatcagggttattctcaagttccttttctaacaaagaacgcaattcttttcctgctttttttctttggatgtcattgttgaaacaattaggatgtctagacatatatgcgtctaaaaaagcatttattttttctccatcagcgttcccttcttctagcattgcgtttactgctgctatgctatcattgaggcgtatatcatagtctgcattgtttgattgtgttgtttttgaagacttgtttccgtagcaggaaattaagcatgggatgattagaagaatagtggcaaattttgtgatgttcatgtccagtacactattaaagttcaaagttgggagagaaaaaagtggagcgtatcggactcgaaccgatcaccttaacactgccagtgttacgctctagccagatgagctaacgccccttttttgtcttatatgataacgtttgtaaacgaatccttttttgttgccgcaaatataatgcattattctgaaataattgctatgtttgcggtaaataatagtatgaaattaagatatgctgatttataatacaacttttcaagtggacgatgacgttcacgacaatttcatgatttggataaaagagagttatatccctgaagtacagaaacacggtgcgttgaaggcaccacgtatttgccggatattgagtcatcgggaagaaggaagtgcgtattctttgcaatgggaggtagaaagcagtgggttattacatcgctggcatttggaacagggggtgagattgaatgacgaactggtaaaaatatttaaagataaagtgatcggatttccgaccttgatggaggtgatagagtgattcaaccggtaaaagaaaagataatcctggggattgaccccggtacgacaatcatgggatacggggttctaagggtgaggggaaccaagcccgaaatgattgcgatggggattatcgacttacgtaaatttgccaatcactatctgaaacttcgtcatatccatgaacgggtattgagtattattgaaagttatctaccggatgagttggctattgaagcacctttcttcggaaaaaatgtgcaatcgatgttgaagttagggcgtgcacaaggggtagcaatggcagtagcgttgagccgggatattccaatcaccgaatatgcccctttgaagataaaaatggctatcactggaaacgggcaggcatcaaaagaacaagtggcggatatgctgcaaaggatgctacggttttcaaaagatgatatgcctacttttatggatgcaacagatggtttggcagcggcttattgtcatttcctgcaaatggggcgaccggcagtggaaaaagggtatagtagttggaaggattttatagcgaagaatccggataaggtgaaataaagcatttaattttatggggggatagatatggtgtgtagcatagggggaggtttagaatgaagataggaaataattatttagcgatattgggtgtgactacagtgacaacagtgatgagttgttccccaacgaagaaggaatatacttcttttgaattatatccggttcgtatgggaagccttacagagatggaatatacgccgttggcaaccaaatttttcctttggtcaccaacagcagaagaggtgcgcctgatgctttatgatgccggagaaggcggacatgcttacgaaacagtaaagatggaactcggtgagaatggaacctggatgacatccgtagataaggatctgcttggcaaatactatgctttcaatgtaaaaatcaacgataaatggcagggcgacacgccggggattaatgctcacgctgtaggagtgaacggaaagcgtgcagctatcatcgactggaagactaccaatccggaggggtgggagagtgaccgacgtccttctctgaaatctcctgctgatatgattatctatgaaatgcatcatcgtgacttctctgtcgactctacttcgggaataaagaataaaggcaaataccttgcactgactgaacatgggacggtgaattccggcaatcaaccaacaggtatcgaccatttggtagagctgggagtgacacacgtgcatcttcttccttcttctgattatgcttctatcgacgaaacaaaattagatgaaaatcactataactggggatatgatccggtaaattataatgtgccggatggttcttattcaaccgatccttatcagcctgctgttcgcgtgaaagagttcaaacagatggtacaagcgttgcatagagctggaatacgcgtgataatggacgtggtttacaatcacacttttaatacacttgaaagtaattttgaacgtaccgttcccggctatttttaccgtcagaaagaggatggtacattggcaaatggttcagggtgtggcaatgaaacagcaagtgaacggcctatgatgcgtaagttcatgatagagtccgttctttattggataaaagaatatcatattgacggcttccgctttgacttgatgggggtgcatgatattgaaacaatgaacgagattcgaaaggctgtcaacaaagtcgatcctactatttgtatctatggagaaggttgggcggctgaagctcctcaatatccggcagattcattggcgatgaaagggaatatttcccacatgcccggaattgctgtgttttcggatgaattgcgcgatggactttgtggacctgtatgggagaaggacaaaggagctttccttgccggagtgccggggggagaaatgagcgtaaaattcggaattgttggagctattaagcatccgcaagtacgctgtgattccgtaaattatagtcagaagccgtgggcggaacagcctacccagatggttagctatgtttcctgtcatgatggtttgtgtcttgtagaccgattgaaggcaagtatgccgggagttactcccgaacagttggttcgacttgataaactggcacaaacggtagtctttacttcacagggaattccttttatctatgcaggtgaagaagtgatgcgtgataaacaagggatagacaatagttataagagtccggatgccgtcaatgccattgactggagacgcaaaacgacaaacggagatattttcacgtactataaacgactcattgatcttcgtaagtctcatccggctttccgtatgggaaatgcagaaatggtccggaagcatctggagttccttccggttgaagggcaaaacctgattgcgtttcgcctcaaagagcgtgcgaatggagatagctgggaagatattatcgtagcctttaattcccgtacgactcctgcacgactggaaattcctgttggtaaatatacggtagtatgtaaagatggagtgatagatgtgcgtggattgggtacgcaaaccggaccggaggtgattgttcccggtcagtctgcattgattatgtacaagtagttttttcctgtttactacaattccaagatactcaagttttttatgcagtagactggctgcctatttcagtctgatggaacaaatgaaatcatgtgccggctggttagtcggcactttttatttatggcatatataacaactcaacgttggttgccggcatttctatcatctttaaatagatagaatgaataacaataactactgtaatccgttctttctaaatccttcattttcctcctattcatcggcaatcttaattgggatgtaacattacgacaagtatttgtaacatacgtaaacgatgatgtaacaagcgagtaatgatttgaatcaaaatctttgggtaagcggagagaaacttcctaagtttgcaaagtggaattcaggatggagtgtttttctttccggattactaataaagacataaaagaaaagatggataatgaataagtattggttttataaggttgggttagtagttgtgttcctttgcttcgctctgttgggtgaagcaaaggttaaacttcccgctcttgtttccgacggaatggtgcttcaacgcggggagcctgtcaatatttgggggacggctgatcctgatgaaactgttagtataacttttcaaagaaagaaatataagaccgttgccgatgcgcaaggcaactggaaagtatctttacctgcattgaaagctggtggaccttacacgatgattattaatgatatagagttgaaggatattcttgtgggtgacgtttgggtatgttctggccagtcgaatatggaattacctgtttcacgggttacagaccgttttcgggatgaaatatctgcggacaatgattatccgatggtacgttatataaaaactcctctattgtataactttcatgccccgcagacagatattccgggaatcttctggaaggctatgacttctgaaaatgtgatgtctttctctgctttggtttatttctttgctaaagattactttcagaaaacaaaggttccggtaggaatcataaactccagtgtcggaggttcaccgatagaagcgtggatcagtgaggaaggtttgaaaccttttccttattatctgaacgaaaaacgtatctacgaatcagatgacttggtggaatcaatgaaaaaagaagagagcaagaaaagccgtgcctggaatgcaacactgtatcagggagataaaggaatgcatgaaaccatcccttggtatgctgccggttatgatgacagtgattggacaccgactgatttgtttgcttctggctgggctactaacggattgaatacaatcaatggttcccattggttccgtaaagattttcaagtgtccgggcgacaagcgggagagaaggcaactcttcgcctgggatgcatcgtagatgcagactccgtctatgtaaacggtacgtttgtgggaacagtttcttatcaatatccaccacgtatctataccattcccgccggattgttgaaagctggaaaaaacacgataaccatacgtcttttcagttatggcggtttccctcattttgtaaaagagaaaccttataagatacttttcggaaaaggtcagccagaaaaaggagaatcggagattagtctggaaggtgattggaaatatcgcctcggcgctcccatgcctgctgctccgggacagactgctttccattataaacccgtaggactttataatgctatgattgccccattgctgaattatacggtatctggtgttatctggtatcagggtgaatcgaatgtgtctcgcagaaatgagtataaagacttgttgacggcgatgattacggattggagacagcattggaaccgacctgatatgcctttctatgtgattgaactggcggatttcctctcacccgaagataaaggagggcgtgctgcttgggcagaattccggaaagtgcaggcagaagtagccaatacaaataaaaatgtcactctaattaaaaacggtgatttaggagaatggaatgatatccatccattggataaaaagacgttgggacaacgtgtttcccaggcagtctttcaacaaagagtcaaataaattaaaaaagagattagtaccatgaaaacacagactcaaaaagtgtcgatggccgagaaaatcggttatagcttaggtgatggttcggcgaacctgattttccagatgatgatgatgttccaactcttcttctatacagatgtgtttggaatcaaagcaacagcagcaggtatgatattgctggtcgcacgcatttttgatgcgtttgtcgatccggtggtaggtatcctgtccgacagaaccaatacccgttggggtaaataccgtccctggttgttgtggacagctattccttttgccgtattcttcattctggcatttacgacacccgatttgagtgagcgtggaaagattatttatgcaggtatcacttataccctattaatgtctatttactccttcaataataccccgtatgcctctttgggtggtgtgatgacaagtgacatcaaagaacgtaccagtatctcgtccgtccgttttgtgacagctacaatagccacttttgttgtgcaggggcttactttgccattagtctccaagttcgggcaaggcgatgatcaacgtggatggttcctgacaattaccctgtttgccattatcggagttgttcttttagtaatcacattcttctctgccaaagagcgtatcacgcctcccgtaggtcagaaaacttccgtgaaacaggattttaaagatatcgtaagcagccgtccatggaaagcgatgtttatcctaaccctctttttgtttacgacattggctatgtggggcagcagtatgtcttactactttaattatttcgtagataaaacagccctttttgacttcttgcaaaattttggattagtacggatagaaggagaaacttatggaatgtggcacactttccttgatgctttcggactgattgcgcagcccgatcatagtaatgtgtttgctgtaggtttcagtttgttcaatatgattgggcaggttatcactttggcgggtgtaatattgctttccggatttctttccaatatctttggcaagcggaatgtatttttgatctgcttggcactgacagccttttttacagccctgttttttgtggtagattcgacaagcataagtacgatctttattattaactgtttgaagagtttggcatacgcacctactattccattgctttgggcaatgatgggagatgttgccgatcattccgaatgggtgaaccatcgtcgtgcgacaggatttgtatttgcaggtgtagtctttgccctgaaagccggactaggtatagggggagctatttgcggtgcgattgttgattcgttcggttttgtatctaatacagtgcagacagaaaacgctattttcggtatccgtttgacatccagcgtaattcctgccatcactttctttgtaggagtaattgctttgttcttttatcctatttctaagaagttgaatgagcatattcaggacgatttggcaaaacgccgtctggaaaacaattgatttataactaatagatagactatatgaagacttcgacaagaacaaccgtagtttctttgttggctgctgtagccctgataactggtacttcggtagcttttgcacaagaaacaaagactttgaaagaagctttgaaggataaattcctgataggaacagcagtgaatacacgacaagcatccggtcgggataaggcaggagtgcgcgtaattcaggaacaatttaatgctattgtagcagagaattgtatgaaaagtcaggaaatgcatccgaaggagaaccgttataatttcacacaggcagatgaatttgttgcttttggagagaaaaatcatttggcaatcacaggacatacgttgatttggcattcgcagctttctccctggttctgcgtggatgagaatggcaaaaatgtgtctccggaagtattgaagaaacggatgaaagatcatatcaccactattgtgaagcgctacaaaggccgtattaaaggttgggatgtagtgaatgaagcgattgaagataatggtgcatatcgtaagactaagttttatgaaattctaggtgaagaatatattccattggcttttcaatatgcacacgaggccgatccggatgcagagctttattataacgattattcaatggctcaaccgggcagaagagctggagttgtgaagatagtgaaagacttgaagaaacgtggtatccgtattgatgcggtggggatgcaaggacacatcggcatggactatccgaaaatcagcgagtttgaagaaagtatgcttgcctttgccggagcgggagtgaaggtaatgataacagaattggatctgactgtattgccatcacccgaccccaaggttggtgcggaagtctcggcatcttttgaatataaaaaagagatgaatccttattcggacggattaccggaagaagtatcaagagcatggacagagagaatgaatgacttcttccgtctgttcctgaaacatcaggatatcataacaagagttactgtttggggagtagccgatcaggattcgtggcgtaacgactggccgatgagaggacgtacggattatccattgcttttcgaccgcaatcatcagccgaaaccggtagttgatttgattataaaagaggctatgcagaaatgatcatttggagttcacttcaccacagaggacacggaggacacagagctcttctctctctctccgtaagtagaacagagcgataaatatacgattacgtgagactctgtgttttactctatagtgaataaaaagattaaacctctgtgtcctccgtgtcctctgtggtgaaatagaaattcccatttataaaattaatttagaactgttgcaataagaataaaaccatgaaaacagaaaaaagatatttagttcccggtgattatatggctgatcctgccgtacacgtgtttgatggcaaactttacatttatccctcgcatgactgggagagtggtattgccgaaaatgacaatggagatcatttcaacatgaaagattaccatgtgtattctatggatgatgtaatgaatggagagattactgaccacggggttgtactttctacggaagatattccttgggcgggtcgtcagctttgggactgtgatgttgcttttaaagatggcaaatactatatgtattttccattgaaagaccaaaacgacatattccgtatcggagtagctgtgagcgataaaccatacggaccttttgttccggaagcaaacccgatgaaaggaagttatagcattgatccggctgtttggaatgatggagatggtaattattatatgtattttggcggactgtggggtggacagcttcaacgttaccggaataataaagcattggaatcagccattttacccgaaggaaaggaagaggccttgccatcccgtgtcgttcgtttgagtgatgatatgatggagtttgcggaagaaccgcttccgttagtcattctggatgaaaacggtaaacctttgacagcaggagatacagaacgtcgtttcttcgaagcttcttgggtacataagtataatgggaaatattatttctcttactctacaggcgatacccatctactttgttacgcgataggtgacaacccatacggacca

SEQ ID NO: 8094 - DNA, 25679 bp, Unknown
  gut microbiota DNA sequence
atgtttgctatttttatattttcatgaatatattgttctgctgagtcacagacaaaagtctcatattgatagataagctctttgtttaaattataaatatcttccaacgaattaagaccagccttctttttctttaattcttttatggtagcttcttttttctgggtatatatcaaacgttcagaaatcactttgtccaacaccttcaacaaagaatcattctcactatctgcatagaggtaaaacaaggagtttagaaggaaaaatataaaccaaagtgtgcgtttcataatcatgtattctttcttaatctgcaaaaaaatgtattttctttgtgtaattcgcaaaaaagagcataaatcattctttttattgcatcttttaacaaatgaagatggagaaattaccccattctaaatgatatttgtgaaaccatgctgactaaaaaatgaatctaaaagatatggagttaaaaaaagcttttttgccatacggactttgcaaaaagtataaatattagttctatatttgcagccgttaaaggagaaagatgaaacaaagcttaaaattcggactacttttagtgttggctttgctcatccattgcgcaactaacggagcaatggaagatatgtgcaaagtttcctccccgacttatcggcaggagaaatgctatgtatcacaagatcgtccgattcaggatgctttggaacgtctttataatctttatacgactcaaacctgtgacatgagtcatacagacgtcgcacatgttccgacagataaaagcatgtttttgttaatcgcttatttctgtgaccattacaaacatcaaagtccaccttaccctgtctcatcccattctcctacatactattacgatcctatctcctattatatatatgggttgagaaagattgtcatttagcctacagtacagtagactcttttgctcgtcatttattacagttggttttattctccatagggcgaatagactaattgcttatttctatataatattcaatctaaacagctattgaattatgaattttacatttttagttgttgttttactgacagcgcttgcttttgtcggtgtagtaatagccctctcgcgtgctatctctccccgttcatacaacctgcaaaagtttgaggcttatgaatgtggtataccgacacgtggtaaatcatggatgcagttccgtgtaggctactacttgtttgccatcctattccttatgttcgatgtcgaaacagcttttctgtttccgtgggcggtagttatgcgtgacatgggaccacagggacttattagtgttctcttcttctttatcattttagttctgggtcttgcttatgcctggaggaaaggagctttggaatggaaataaccaaaaagccaaaaataaaatctattccgtatgatgagtttatcgacaatgaatcattggaaaagttggtcaaagaacttaatgcaggaggagccaatgttgccctcggagtacttgacgactttatcaactgggggcgcagcaattcactgtggccgcttacctttgcaaccagttgttgtggtatcgaatttatggcactgggtgccgcgcgttatgacatggcccgctttgggtttgaggtagcacgtgccagcccgcgtcaggctgatatgattatggtatgcggaacaatcaccaataaaatggctccggtactgaaacgactttatgaccagatgcccgatccgaagtatgtggttgccgtaggcggatgcgctgtcagcggaggtcctttcaagaagtcctatcacgtagtgaacggagtggacaagattcttccggtagatgtatatattcccggatgcccgccacgtcctgaagcattctattatggcatgatgcaattgcaacgcaaagtgaaaatagaaaagttctttggtggagtaaacagaaaagagaagaaaccggattatttaaaaaatgaagaatgatgaatgatgaatgaagaattcgcatgcaacatcccgacagatttttcattcttaatttttcattcttaatttaatttgatttatgcaagaaatacaatttatagctcctgcagcgttacacgacgagatgctgcgcttgcgaaatgaaaaacagatggactttctcgaaagcctcaccggtatggactggggagtagccgatgagaaagacgctccggaaaaactccgcggtttaggcgtagtctaccatctggaatctaccattacaggcgaacggatagcactaaaaacagcgacaaccaaccgcgagctaccggaaattccgtctgtcagcgacatctggaagatagccgacttctacgaacgtgaagtttttgatttttatggcatcacctttgtcggtcatcctgatatgcgccggctctacctgcgcaacgattggatcggttatccaatgcgtaaagataacgatccggaaaaggataacccactgtgcatgaccaatgaagagacgtttgatacgactcaagaaatagaactgaacccggacggaaccatcaagaacaaagagacgaaactgttcggcgaagaagaatatgtagtcaacatcggtccgcaacaccctgctacccatggtgtaatgcgcttccgtgtttctctggaaggtgaaatcattcgtaagattgatgcgaactgcgggtatatccaccgaggcatcgagaaaatgaatgaaagcctcacttaccctcaaacattggctttgacagaccgtctggactatttgggcgcgcatcagaaccgccatgcattgtgtatgtgtattgaaaaagccatgggcattgaggtcagtgaacgcgtacagtacatccgtaccataatggacgagttgcaacgtatcgattctcacttgctgttctactcttgtcttgctatggacttaggagcgttgacagcattcttttatggattccgtgaccgcgagaaaattctcgatatctttgaagaaacttgcggcggacgtctgattatgaactacaatacgattggcggtgtacaggctgatcttcatcctaacttcgtcaaacgagtaaaagagttcattccatatatgagaggaattatccacgaatatcacgatatattcacgggtaacatcatcgcacagagccgtatgaaaggcgtcggtgtgttaagccgtgaagatgccatctctttcggttgtaccggaggtacaggccgtgcatcaggatgggcgtgtgacgtacgtaaacgaatgccatacggtgtatatgacaaagtcgatttcaaagaaatcgtttatacggaaggtgactgctttgcccgttacctggtgcgtatggatgagatcatggaaagtctgaacatcattgagcaattaatagacaatattcccgagggaccttatcaggagaagatgaaacctatcatccgtgttccggaaggcagttactatgcagcagtagaaggaagtcgtggtgaatttggtgtcttcctggaaagtcagggtgacaaaacgccttaccgtctgcactaccgtgctacgggattgccgcttgttgctgcaattgacaccatttgccggggcacaaagattgccgacttaattgctattggcggaacaatagattatgtcgttccggatattgacagataatacttaattattaaaaatatatgttcgactttagtatagtaacaaactggatacatgagctactgctctccattatgccggagggattagccatctttatagaatgtgtagctgtcggcgtgtgcctcgtagcactgtatgccatcctggctatcatattgatctacatggagcgtaaggtctgcggtttcttccagtgtcgtcttggaccgaaccgtgttggtaaatggggttctatccaagtggtctgcgacgtgctcaaaatgctgaccaaagaaatcttcatgccgaagggtgccgaccatttcctttacaatcttgctccattcatggtgattatcgcttcattcctgactttcgcttgtattccttttaataaaggtgcggcgattctggactttaatgtgggcgtgttcttcctgttggcagcttccagcattggagttgtcggtatcttgctggccggttggggtagtaacaacaaattctctttgatcggtgccatgcgaagcggtgcacagattatcagttatgaactttctgttggtatgagtatcatgacaatggtagtgctgacgggaaccatgcaattttctgaaatcgtagaaggacaagctgatggttggttcatcttcaagggacatattcctgcggtcattgctttcatcatctatctgattgccggaaatgcagaatgtaaccgtggcccgttcgaccttcccgaagcggaaagtgagctgacagccggatatcatactgaatactccggtatgggtttcggtttcttctatctggcagaatacttgaatctgtttatcgtagccagtgttgccgccactatcttcctgggaggatggatgccgctgcacattgttggtttggatggatttaacactgtaatggattatattccgggctttatctggttcttcgccaaagcattctttgtggtattccttctgatgtggatcaaatggactttcccacgcttgcgtatcgaccagatcttgaatctggaatggaaatacctggttccaatttctatggtaaatctattattaatggcatgctgcgtagctttcggcttccacttttgataaatgaaaattatggaatataaagataaaaaatatacgtacttaggtggtctggtgcatggcatcagtacactggcaacgggtatgaaaaccagcatcaaggtatacttccgtaagaaagtgaccgagcaataccccgaaaaccggaaagagctgaaaatgttcgaccgttttcgtggtacgctgaatatgccccacaatgagaataatgaacatcgctgtgtagcttgcggattgtgtcaaatggcctgtccgaacgatacaatcaaagtgaccagcgaaaccgtcgaaacagaagatggaaagaagaagaaaattctggcaacctatgaatatgatttgggtgcctgtatgttctgccagctctgtgtcaatgcttgtccgcacgatgccatcacgttcgaccagaacttcgaacatgcagtcttcgaccggacgaaacttgtcctgaagttgaaccacgacggtagtaaagtaatagaaaagaaaaaagaagtttagatatgggatcaacacttgaaacagtagtattctactttttggcagcatttattattgctatgtccatcatgacggtgactacccaacgtatcgtacgctcggccacctacctgctcttcgtgctcttcggcacggccggcatctattttttgctgggttacacctttctgggttccgttcagattatggtttatgccggtggtattgtcgttctttatgtattctccatcctgctgaccagcggagaaggcgaccgggccgagaaagcaaaacgaagtaaagtcttagccggactcttcactatgattgctggtttggccattatcctgtttatcacactgaagcacgatttcatgcagactgctaatttggccccgcaagaaattagcattcatgctatcgggaacgctttattaagtagtgacaaatacggttatgtattgcctttcgaagccgtcagcatattattgctggcgtgtatcatcggtggcatcatgattgcacgtaagagataggaattttaagtattaactatcaaaatagagttcgaatatgatacacatggaatattacctggtagtttctaccatcatgatgtttgcaggaatctatggattctttacccgccgaaatacactggctatcctgatttctgtagagttaatgctgaatgctacggacatcaacttcgccgtgttcaatcgattcctttttccggggggaatggagggttatttctttgcactcttttccatcgccatctcggctgcggaaactgcaatagctatcgccatcatgattaacatttatcgtaatcttcgaagcattcaggtgcgcaacctggacgagttgaagtggtgatttgtttcattcccagaaacaaggtgtttcattccttgaaacacttcgtttcacaccgagaaacaaagtgtttctcaccgaggaacaactagtttcacaacgggaaaccaaacagaaggtccgagtatagtgattatcagctataagaccaagaattaataataataactcaagtaattaaataaaactgtatggaactaacaattctaatactccttcttcctttcttctcctttctcatattgggaatcggaggtaaatggatgtcccaccggacagcgggtacaatcggtacgctgatactgggagcagtagcagtactatcctacgttacagctttccaatatttctccgctccacgactggaagacggaacattcgccacactgatgccttacaacttcacgtggcttccttttacagagactttacacttcgatttgggcatcttgctcgatcctatatcggtaatgatgttgatcgtcatctctacagtgtcactgatggtacatatctactctttcggttacatgaaaggagaagtcggttttcaacgctattacgctttcctatccctgtttaccatgtctatgctgggattggtcgttgcaaccaacatcttccagatgtaccttttttgggagctggtgggggtaagttcttacctgctaatcggtttttattatacaaaaccggctgccatcgctgcttccaagaaagcgtttattgttactcgctttgctgacttgggcttcctgatcggtatcctgatttacggatattacggtggtacattcggattcactccggatacagtatccttgataagcggtggagcttctatgcttccgttggctctcggactgatgtttgtcggtggtgccggtaaaagtgccatgttcccgttgcatatctggttgccggatgcaatggaaggtcctactccggtcagcgcattgattcatgcggctaccatggtagttgccggtgtatatctggtggcacgtatgttcccacttttcattacatacgcaccgaatacgctgcacatggttgcttgggtaggtgcatttacagcattctacgcggcaagtgtggcttgcgtacaatcagacatcaaacgtgtactggctttctctaccatttcacagattggcttcatgatggtagctctgggtgtttgtacttccatgaatccgcacgaaggaggtttgggctacatggcttccatgttccaccttttcacacatgccatgtttaaggcattactcttcctcggtgcaggtagcattatccatgccgtacattctaatgaaatgtccgctatgggaggtttacgcaaatatatgccgatcactcactggaccttcctgattgcttgtctggctattgccggtattcctccgttctcgggcttcttctcgaaagatgaaattctggctgcttgtttccaatacagccctgtaatgggatgggtgatgacagtcatcgctgcaatgacagctttctatatgttccgcctctactacggtattttctggggaagcgagccgccccgggcaagttcccattcggaacataacacgccgcacggaaacttggaagcggcaccttgccgcccttgccgcccacatgagagtccgttggctatgactttcccgctgatgttcctggcagttgtaacttgtggagcaggatttattcctttcggacacttcatcagttcgaatggtgaatcttattctatccatctcgatccgtcagtagctattacgagcgttgttattgcgattatttcgattgcaatcgctacatggatgtacaagaatgccaaacagcctgttgctgattcgttggcaaaacgattcaaaggtctgcacaaggcagcctataatcgcttctatattgatgatatctaccagtttattacgcataagattatcttccgctgcatctctactcctatcgcatggttcgaccgtcatgtagtggatggattctttgacttcctggcatgggccaccaatacaacaagcgacgagattcgtggtttgcagagcggtcaggtacaacaatatgcgtatgtgttcctttgcggtgcattggcacttatcctactgctgattctctaaatagtaaatagtaaatctttaaatagtaaatcataaagatgaatttcttatccatattcgtacttatccccttattgatgctggccggactttgggcagcacgaggaatcaaagccatccggggggttatggttactggcgcatcggcacttctgattgcctccgtcgtacttacattcctgtatctgggagagcgtagcgccggaaatacggcagaaatgcttttccgtgcagatacgctttggtatgccccgcttcacatatcttattcagtaggtgttgacggaatttcggtagccatgttgttattgtctgctgtcatcgtattcaccggtacattcgcttcctggcgcctgcaaccgctgacgaaagaatatttcctctggttcaccctgttgtctatgggagtattcggattctttatatccgtcgatttgttcaccatgttcatgttctatgaaattgcgttgataccgatgtacctgctgattggtgtatggggatcaggacgtaaagaatatgcagccatgaaactgacccttatgttgatgggcggttccgctttcctattgatcggtattctcggaatctatttcggctcgggagcaaccaccatgaaccttctcgaaattgcacagttgcacaacataccttttgcacagcaatgcatctggttcccgctgactttcctcggcttcggtgtattgggcgcccttttcccgttccacacatggagtcctgacggtcacgcttctgccccgactgccgtatccatgcttcatgccggagtattgatgaaactgggaggttacggatgtttccgtatcgccatgtatctgatgccggaagcagccaacgaactttcctggatattcctgatactgacaggtatctctgtagtctacggagccttctccgcttgcgtacagaccgacttgaaatatatcaatgcttattcatccgtatctcactgcggactggttcttttcgccattctgatgctaaaccagacagcagcaacaggagcaatccttcaaatgctttcacacggattaatgacagccttgttctttgctctgatcggtatgatatatggacgtacacacacacgtgacgttcgcgaacttgccggtttaatgaaaattatgccgttccttagtgtatgttatgtgattgccggtcttgccaacctcggtctgccgggattaagcggtttcattgctgaaatgaccatcttcgtcggctctttccagaacaacgacgtatttcaccgcacactgaccatcatcgcctgctcttcgattgtgattaccgcagtctacatcctgcgcctggtaggtaagattctatacggaacctgcaccaacaaacatcacctcgaactgaccgacgcaacttgggacgaacgtgtagccgttatctgcctcatcgtttgcgttgccggactaggtatggctcctttctgggttagccacatgattggtgaaagcgtattaccggttgtctcacaactaatcccctaactcataaatcataattcttaattcataaataaacaagatggattattcacaatttctaaatatgcgagaagagctgtcgctcatagctgtcttactgctgctatttctagctgacctcttcatgagtccggatgcacacaaaaatagtgggaaagcacgcctgaacactatgttgcccgttattctgatggctatccatacggctatcaacttgattccgggaactgctaccgatgcattcggtggtatgtatcactatgtaccgatgcacacagttgttaaatcgatcctgaatgtcggtacactgattgttttcctgatggcgcacgagtggatgaaaagagaagacacttcattcaaacaaggagaattctatgtgcttacactctctaccttgtttggtatgtatctcatgatttccgccggacatttcctgatgttcttcatcggtcttgaaacagcttctattccgatggcagcattgattgccttcgataaataccgtcacaactctgccgaagcaggtgccaaatacattctgacagctcttttctccagtgcattgctgttgtttggtctgtccatgatctatggttctgccgggactctttatttcgatgacctccctgcccatatcgacggaaatccgttacagatcatggcatttatattcttcttcacaggaatggcattcaagttgtcactggttccgttccacttatggacagcagacgtttacgaaggcgctccgagtacagttaccgcttatttgagtgttatatcaaaaggatcggcagcatttgttttattggctgtccttatcaaagtattcgctccaatgattaatgactggcaggaagtactttattgggtaaccatcgcttctatcactattgcaaatatatttgctgtccgtcagcaaaacctgaaacgtttgatggcgttctccagtatttcgcaagcgggatatattatgttaggcgttatcggaggcacagcacaaggcatgacggcattggtatattatgtattagtgtacgctgccgccaacctcggagtatttgccgttatcactatcgtggcattacgcagtcagaaattcacgctcgaagattacgcaggactttataaaacgaatcctaaaatcgctctcttgatgactctgtctctgttctcattggcaggcatccctccgtttgccggattcttctctaagttttttatcttcatggctgctttcgatgcaggtttccacttgctggtattcatcgcattggtaaatacagtgatttcgttgtattactatctattgattgtaaaagcaatgtacatcactccttccgacaacccgattcctactttccgcagcgatcgttgcacaaaatggggactagcactttgcacattgggtatcatcggactgggtattgcaagtatcgtatatcaatctatcgataaactgtcgttcggaatttaaacggactacaccttttcaccaaagaaacggtcttggtttcatgtcagtatcaatcgacatcaaaaccaagaccgtttcttctatataaaagccgcttttattaatgaggaaggaagatattcacctgccttattaccactctaccgggcacagttcatctcttccgtcacgatcactccgggaatagtaaaccaaaaccttgatccttttcctttttcagaatcaacgccaatccgcccacctaattgttcaacgatgctctgacagatagaaagtcccaatcctgtaccgtgtacaaaagaattaagcttcacaaaacgctcaaagatatgtggcaactgctctttttcaataccgatgcctgtatcttcaacatagaattccaattcgccatcttttagtttatatcccacatgaatactaccttcagaggtaaacttcattgcattgttaacaaagttagagatcacctgatgtatacggttacggtcactaatgacatgacaaaccggaagatgatcatcaaacaccagttccacctcttctttcgctttcatccccatagagcggacaatatcctcacataacagatttacatctacatctccgttagtaaactcaaatgtacccgcttcaatctttgacaaatcgagtatatctgaaattaattgcaacaaaagttcattattctcacgtacaatcttaatatactcctgacgttctgccagctcttcagtttctaccagcaaatcggagaaaccgacaatggcattcagcggcgtacggatttcatgactcatattggcaaggaaagcacttttcaaacgatccatcatctctgctttatcacgtgcctgaatcaattcggcttcagtctccttcaattctgtaatgtcataattgataccgatgatttctatttcattttcttccggtttataattggtgaccattacattactgctgacccaattccattcgttcttcgttccgggacgacgaatacgcatctccccttggaaatgcctcctttttccgtctctgactccatcataaaaatcgaggaaacgcttgcggtcttcgggatgcatttggctataaactgctaccacctcactcaaaggaatatcttcctcctcacctaaattcttataccactgttttatagcataacctttgcggttcaagagattcaacttggcatatcctacttttgcataatcggatatcatcaagaagaaattctcaaaatcacgaatacggttcattgcatcaatacgctccgtattgtcaatgcttattaaaatatatccgctgaagttaccctcattatcatatagtttactaaccttcgaatatagttctatcacattagaacggcttgtctcataatatcctcctgcttgctcaaaagaataattaagtctgaaatccaccagatcttcattccgcacacgatcacgaatcccctgcggcacattcggattctcaaagaaattaacccctatcacatccgatttattcactacaccgaatatttctaaatccttattattcaaatctatcaaatagccgtccttatcgtagatctctactcctgccggaatattagcaaagatattcttaaagagtttttcactacgatccaatgcccggtttgcttgtaccgatcccgtagaatcgaggaatagaccgactatttcgtcctttccgggagaataaataacccaatgcgtataccgttccgttcgagggaaatattcatctttctctctataagaattactatccagtatttcttccagaaaattaagtttttggagatagtcaggatgcttttcagatgccaaagaaccaatatacgactccaaaggaagcccgaaaaaggttgaactgacctcattcgcatccgtcacccgataatcgcaaggtttattattctcgtcacggataatagacatacgtatatatcccatcggcataaaatgaaacagattatttaggaaagtctgttcacggattaccttgtccttagttttacgcaactcgatacagatatttataatatttcctaatgaggagaaccattgaaaatcttcattactccagtcatggtaagtctcaaccaaatcaatccccatatatccccaaacgcggtcgcctgtcatcaaaggagtcaccattaacgatttgattccctgaactacaagaatctgatattcatcaggagcctcttctaataactgctccagtgtatttaaaataatcggcttgcccgataatatctgttcactccaccattttgactcactggcaggcatgtcctgcagattgtctatctctgccgataccccttcagaaacaacttcgtagatacaactatgatgggcataaatttcgtcgtattcaaaaatataaacacgtccttttccattataaagattcagaatatctctcaaaatatctgcgatacaagattctactgcctcatcacgtaggaaacgaagcaacgattgcgaaacaaaattctgacgacaaagcaggtcattcacacgtcttaatgcatccctttgatcttcttccttgggagcctcaacgcgctggattattccaaaagacttatcacctccatcaacacctgtacccttctcacgaaaagccagacgggtatgcaaccagacctcgccatattttgaatgaatagggaaagtttgttcataaaagtccttatggatagaagaatttgcccggaactcctgggcaatctgcttgcgataatcttcacgtatcaggttcagaaaatccgaagtagagatggtgtcgccgtccaatcccaaaagatcagaaagataatcggaacataaataatatcctgccgttaaatctacttcccaccacccgatttgtgcaagagaagccatttttttgtatcgctcgttgtctgtttgcatattttgtatcgttgtaaaataataggttgacaaatatacgaaaaaggtaatcactgataccataaaggagcaaataaaaaagctaaaagaagattacgaaaacaaataaatagaatatgggagaatctgtttgttacaaattctcccatacctcctattaaaaaagatacactttgctactctatatcttatttataaggaagagaaattatatccgctccaagtgaacagggatgcatctgcacctgtattcgtagttggctcggtaaatgtattcaatgtaccgttcagcttattcttaaagttcaatgtatgggtgatactgatgctggaagcagcatttcctgcatctttactgtcattcatatcaatcaaatcgattgtaccgcctgaacctttgacaagggcattggtgatcgtagcttttgctccacgacggattttaatcacatcttgcatacggtctacattatccgttgtattggcagcattatttacgattgtcatattttcaaccgtaaaatccgactgacgtaaatgatccgaatagtcaccatccaagttaccatctgcttcaatgccgcgcggatctgcttccgtactggtataaccgctttcccaaacgccatagcagtttttcaatttaccggaatatccttgagtgaagtcgaacatatcatcatccgggttcacagccaacaagttggttacattcaccgtaccgccaaagaattcgatggcatcatccgcgctctcaagaatgtagatattctcgatcttggtaccgtttccaacaccgttcagtgtcaatccgttgtgctcgatatcggcagtagagcgggcaccggcatagcagattttcacataagtcagtgaaccggaattgtcattatcgacattaccaccgtatttatagttgttgtcgatttccgtcagacctgtatcactcttattggcgttcgaaccggaaatcggagctttaccattgataataattcctccccaatagccggatgtaggggttgttgaattggcagtgaaaacaatcggtttatcagctgtaccgtcagcataaagtttaccgccttgtgctaccagcagataactgctgaaaccttcgcgagccttaatcgttgttccggcagggatattcagacggcctccattttcaatgactaccgttccgttcagaatatattccttagcttccagtgtctgttctccggtcagcgtgccggacaggatattttcgcccacaacaatagaactaccggtcccaccgttgtttccaccatctccgttaccatcaccgtctccgtcactatcactgctacatgcagtcaatgtaagtgctgttgccataacggcaaacgtcataaagttcacaaacaatcttttcattttgctttcattattagttaataatcttatttcatcacccggcttagaatgtacacgacactcccaggcttatatttattcctttcttataatcattcaatatcaccttttccccgttttcgttcgctttgcggcttaacttataagagggattcagcaggttgcgggctttcaggttaagcgaaagatgcttgttcagtttggcttgggacacaaaatccagtgtcagtactccctgctccattatatcctgatagccctgtgtgccaatggtatatattttatcactcacataattaagtaccaatgtattgacaaaactgcgttctcctttcgtgaagttatgcgagaggtcgaaattgacaatccacagtgcagctccttccagttgcgagccggtggtaaccgttgccaaaggcatttttgcattcgtgtagatataagagccattcaatcccaaagaaagtttattcattccgtgcgcagcattactcaccggacggacaaacagattcttacgtatttctatctccactcctgccacggttgccttatccgctatattctcataagaaagataacctccggcgcttgccacttcgatgcgggatatcggattcttaatcaatttatagaaagctgtgagagaaatcaactcggtcagagtgagattaaagtcccacttcagatcaaggttataattatccgaaggtttcagattggggttaccctgactgttgaagttcacgccgacataacggtaaggagatatctccttggcctgtggaagcgtatatgtcttacttgctccgaagcgaagcgagtttttatcattcagattgtatttgagattcaagctgggcaggaaataatctttttggatggtattgtttcctttagagcctccacgattcacattgtaatccacttcaatatctaccttgtcgtatttcagtcccagattcacaatccaacggggagtaaactggtaggtagcctcggcataagcggaatggatattcttttttacggtatattcatctaagttcttttgtatcttgaaccagtcggaagcaaagttttcctgattataataatcgtcaagcgagaagtcgtccaaagaagggagggtagaaacatgtcctacggtcaggttatattccgtagctttgaagttatcatctacgaatcggcctgtatatccgaaacggatattcgaaatttcttctatattatctttcagacgatagaccaagcctgcttttacattcaagtcgtcttcatctaaagttgagaagtagcgctgttgtgagttgccccttagcaacgtatagccgtcttccgctttagtcaggttattgatacgacgatccggttcgtagcctttcaccatattataggaagcacctgcatcgagacttaatgatttggttaatccccagttagacatcagttgattaacgatcagcatattatcattcgtttgttggcgacgggtgaatccgaggttttcatagtcgtcactaaaaatcgagttcttaccgttgtaatcgcccaccgactgggtattggcatgaatcatcatcaaattataactgatgtgatgacggttctgcatatcgaaatccacattggcaagtgccagttgactgatattctccgcatacttctttccattcatatctttgtagaccgtaccgccggtagttgtattacgtatgatttcatccgtatactgatagtccgtcgtatgtccggcagtcaggaagaaagaaagcggatttttgtcttttccgacatagaatcgtttacctccggaaatactgtaactccggttgatttgcaaatgttgagcggaagggtctaacttatttctgaagttccatgagttttcatcggcaggttcggtacgattggcaaagcccatgaagttcactccatcctgtttcagaaaatcggctgctaccgtttgtgtattcaagccaccggaaatgccgaatcccagatgaccgctaccaatgagttctttggatacgatatcaatggttgcccctccgacatcgctgctgcctcccgcgttgaatgctttatttacgcctacggactgaataatgtccgtaccgaagaaatcaagagagatattcttatattccgggtcttcggaaggaagagcaaatccattaaaagtagttgcattgtaccggtcacccaatccacggacaaagacatttttcactccgtcttgtttagacactccggcaactttcgtcacagcaccttctgcatccgaaacacccttgcgggaaagctccctgacaccaacagattgtacggcaatgactgctttttgctgttcgagcaacaacatattctcattttccctattcttcttagctacaaccaccacatcggcaagttcctgtgcatcggtttccaactccagattcagtatcaccagttttccattctccacacgcactttacggcgcacttctgttttgtagcctacatatttaatctcaatatcatacataccttccaacacgcccatgctgttcaattcgaaattaccctccatatcggtcactgctccggcttgagttccgagcaaacgtatcgtagctcctatcaaaggttctttggatagtttgtctttcacagctcctttaatcttgatattggcagccaatgcaggaagtacacacaacaggcaaaagaaagccaccactgaaaatcggataagaaatagttttttcatctaactttactctacgttttaattacgctggcaaagatagagggtgagcattacaactataagacgaaataaatacaatctattgaaagagtcattgcaagatgatgacaagatgttacaaacgtattatcaattacttacgctattagtttaacttgtttataagcaaatttaagaccggaacttcactcttttatctctcattatgcataaaattaatcgtctgacagttgtgagaaggtgaaaattttggctgatagtgtatttccacccgcttgtcgtcaaagatatgtttcatcgcttttcaatgcattacgcaaagaaacaccgatagctcctttcccactaagtatatatccaacgttggactttcttaaaaaaagaacaggcataattgacttgaaactaaatatcattatctttgtgtatgtttcacgctaaaaacaaatatgcgtcatggaagagaatttcagaagatatccgataggaatacagaactttgaagatttacgcaataatgattgtgtctatgttgataaaacggaattgatttatcgtttgactcatacaaataaagtctattttctaagtcgtccccgacgctttgggaaaagtttgctggtttctacactagaggcttatttcctgggaaaaaaagaactgtttcagggcttggctatggagactctggaaaaggattggacggtttatccggtattacactttgattttagtgtgagtaaatatataaccgctgatatgctgtcagccgttattaaccgccaattgcttttatgggagaaaatttatcaacgggaagaaggagaaacgactttcagtttacgttttgaaggaattattcgtcgtgcttacaaacagacgggtaaacaggtggtggtattaatagatgagtatgactcaccaatgctggacagcaatcataatgatgaagttcaaaaggaaatacgtaatatcatgcgggatttctttagtccactgaaagcccagggacagtatcttcgcttcttattattgacaggtatcagcaaattcagccaaatgagtatcttcagtgaattgaacaacttgcagaatatcagcatgagggatgattacagtgctatctgtggcatcaccgaacaagaactgcgcacgcaattgcaaattgatattgaacaaatggcccaagccaacaaggaaacatacgaggaagcctgtgtacatttgaaacaacaatatgacggctatcatttcagtgagaacagtgaagatatttataatccattcagtttgttcaatgcattcgcacagaagaagtatgccaatttttggttttcgaccggtactcccactttcctgatagatattctgcaagaaagcgattttgatatccgggaactggataacacgaccgccaccgccgaacagtttgatgcgcccagcaatagaatcaccgatcctcttccggtgctctaccaaagcggttatctcacaattaagggatatgatccggatttccaactgtatacactggcttatcccaacaaggaagtaagaaaaggatttatcgaatcgctgatgcccgcttatgtgcatctgcctgcacgagagaatacattttatgtagtgtcctttattaaagacttgcgtatcggtcatttagaggagtgtctggaaagactgaaatctttctttgtgtctatcccgaataaactgaacaacaaggaggagaaacattaccaaactatcttttatctgtttttccggctgatgggacagtatatagatgtggaagtggatacagccatcggaagagcagacgcggttgtgaaacttcaagataccatctatgtttttgaatttaaagtaaatggtacacccgaagaagcattagcgcagattaacagcaaggggtatgctattccgtatcaggcggatcacaggaaaatagttaaagtaggtgtaaactttgacagcgccacacgaacgattggtgagtggaagatagaactcgggagttaatcaccgagttcataaaagaaaatgcgctaaatcagtttctttttcttccgatagttctcacgaaactctttaggcgaacaactctttttcttcttgaagatccggttgaaattggaaaggttattaaaaccgcactcataacaaatctcggcgatagacatcgtagaatctaccagcaaccgggaagcaaagcccagccgaatatcaatgatataatcggaaagattcttgcctgtacgcagtttgaaaaagcggctgaatgacacatccgtcatccccaccatatcggccaactgccccaggcgtatttcttcctgataatgtgtattgatgtactcctgcactttctgcacacgccggctgtccgaatgaatatctatcttggcaaaagacgaactggacaaggtacgcgcttcttcttcaaagagagaaagttcatacaggatcgtcataaacttaatgaccgcatagaatccctgtttttcggaggcaagcgtatccagcaacggatatattttgagtatggcagacatcgggaaacaaagccctttttgtgctttatccagcatccggcggatagagtcgaactgattcttattgataaagctcttgaagaaaagatcggaagaaaactgaatcgtaatctcccgtatctctttcgaatggcagtcgttctgttcccagacgtgctccaagtcttttcctgttatcaataccaaatcataatcacctatcacttcggaagagtctcccacaatccgccttactccggcagccttttcagtgaagttcaattcaaactcggagtggttgtgtataggataagtgaattccgttttataacgctccgcaatgtaaaagcaatccttatctgataaaggagtgatttcacggataatctggttggataacggtgtagtcatagtaatagcaatttataagcgttttatcgtttgattagttttctatctttactcctatccgatgcaggtctgcccccgacgggttttggaagacacgcaagtcgaattcgggaataatggcaagcacatgatcgaaaacatctgcctgtataccttcgtaggcaacccatgctttattggcagaaaagaaataaagttccaacgggataccggtttcggtaggctgaagctgacgtaccatgcaggtcaggtcttggttgacggtaggcagattcttcagatagttagtcagataggcacggaaaactcccaggtttgtttgccggcgtccattcactaacacagagttgtcgatatgatgttccttattatattcttccactaccttttctgtttcatccacatagtctttcaagatttgtatcttccggtattttgccaacatttccggcgtacagaaatgcacactggtcatatctatattgatggaacgttttacacgacgtccgccggattcctgcattccctgccagttttggaaagaatcactaatcaataggtaaggaggaatggtggtgatggtattatcgaagttacgtatttttacggtattcaatgttacttctatcaccgtaccgtccgcaccgtatttcggcatcgtgatccaatcgcccaccttcagcatattattggcggaaagctggataccggagacaaatcccatgatactgtccttgaaaactaacatcagaaccgcagcggaagctcccaatccggtcagcaacaccaccggactttgctttatcagaatactgataatgatgatagctcctataaagaagagaatgacttgcgctgtctgcaaaagccccttcaaaggtttgtctttatattgttcacgcgcgctatataccagatacacagccgtaaacaaagcactgacgaagcgaagaaagactgcaaggatataaatcatgcaaagtcttcgaagaaaatcaagcaaagcagagtctgcatgttcgggaaaagcaataggaatagatatataaatcaatataggcgccaccatcctgctgatgttcaccattactttatcattaaatacaatatcatcccaagtagcttttgtctgtctcaccaatttagccacggtacgcagaataatcttgcggcaaatcagattggccagtaatgctattccaataataaacaataagatgataaagttatcaatcttatcagccatagcttcatccactcccatcgagagcaaagcatgattcacttcttgcatcaccacattacctgcttcttccggttgcccgtttgccaatgccacactcactgtatcaaccacttcttttacttctttcataagcaatcgtctctctcttttttagtttttcttttatttatgatctctgtttcttttcttctttattctttccttcttccaaatattcactgatatcctgccgtagccaatcataatggaagagtcttttgtaggctacattcttcttgagcatgatttctacgttcacctggctgttctgataacaagtcagttcgtttctgaactgttcattgtgttcggccagccgcttgatttcctgttcccgttcacggcgcaatacggtgcagaccggaatcagtagtttcattaccacattatccatcacatggtgtccctgcatatacaagtaagtagtttccggcaccaagcccagttctttaaattcagtccgcaatccattcacctgattgatgttatgggggaatttctttttcaactctaccaacttctgattaacccgttgttgaagggattccaagctcttttccggatgccggagattaatctcgcgcaaagaagtataagtatggaaatcgtacatagggaaagtataagtatcccgttggcgatagaaccatacgttccagaggaaaagcggatacacaatttcggagtacttcttcaggtagaagttgaaatctaaaatggaacggtcattcaacgtagcctgcacacatacttcgtgaaggctttcggcaaaacaatgatagttttcaatggcataggtataagtctggaaaatatacctgttccggttgattttacgggaggtattggtagctccctgcaacaggaaatcatagtcactgtccacacaggcaatcagacttctccccaattcggctgtattcagcgtgttcatgagtaccatcttttttccttttgccagggaagtggccgaaggaagcatcacttggaaatagtgttcgtcgtcttcaaactcttcaagcaatgtgcgccagaaagcgatgtcgtcatagctttctacgtaagcgatgatacgtcggcgggctttcttcggataaagcttatgggcggcattgaaataagaagaagtcagattatctcgtagtgaagttgccatttgttctattacaggttacgaattacaaattacagttgggagaatccttgtcgagcttgtgccctacggtggtagatatatcgcttacttctgtcacggcatccagccagccttccataatgacggcaggcgaatgggtagtcaggataatctgcacattcggattcagttcacgtatcatagcaatcagtttctgctgccattctatatgaagggaggcttccggctcatccataaacaatacacaatggctgttgtcctgcacaagtacggtcagcagaataaccagcatttgcttttcaccggacgacagtttataagggaataatagttcgccatcctgatagaaagcgatatcgttccgtttcctgtctatctttttgcgtgtatagctgaacagttcgtcaatcatatcctgaaaacgacgtttggctacagataatgtagctgctttacgacgctcttcttcatcaatgctggaaagcatttcaatcatcttattaccaatgttgacttgataatcgaggtaacggcgttgcaagagatagagttgccagtccagttcagactttacattcttgtcggccatgcgggctgtgaagtcacccataatcaggggacggtcgtagctccggatgacgtcataaggaatataggttgcctggggattgtcgaaaaagagacgcactccgttcttctcgtcacttttcatttcaccggaaagttcttcgaggtatcccaccgaacggttcagaatggtagtcttccccactccgttgatgccggagaggatgttcacatcgggacgcaaatcccatcctatattaaagcgttcccatagtccgtgtatctcgatacgacggatataattggcttgttgttccataatattcaagtttaatcaaggcaaatataaacaaatcatacgataaaagactacctttgcaaccgttttctctatttgattgttaatgatatcagagatatggtaaaataaatagtatcaacatggacaaaagtaagaacctgtatggtcatttgtttgcgcttacagcaaacgttatgtggggattaatgtctcccatcggtaagtcggctcttcaagagttttccccgatttctgttactacattccgcatggtgggggcagcagccgctttctggatcctttccatgttttgcaaacaggaacatgtgaatcatcaagatatgctgaaaatcttctttgcttcactgtttgcgctagtattcaatcaaggagtgttcatcttcgggctttctatgacttctcctattgacgcttctatcgtaactaccactctaccgattgtaacaatggttgtagcggccatttacttaaaagaacctattaccaataagaaagtactggggatttttataggtgcgatgggagcgctcattctcattatgagtagccaggcaggaagcaacggaaatggaagcctgattggtgacttgctttgtctcgttgcacaaatcagtttctccatatacctgactgtattcaaaggattgtctcaacgatattcggcagtaacgattaataaatggatgttcatatatgcttcaatgtgttacattccgttctcctattatgatatttctacgattcaatggacttctgtttccactgtcgccattctacaggtactttatgtcgtattaggaggtagtttcctcgcgtatctctgcattatgactgcacagaggctgctccgtcctacggtagtcagtatgtacaattatatgcaacccatcgtggctacgattgcggcaatcgcgatgggcatcggaagtttcggctgggagaaagggattgctatcgcacttgtattcctgggagtatatattgtgactcaaagtaaatcgagagctgacttcgaaaagataggaaaagaagtataag

SEQ ID NO: 8095 - DNA, 46834 bp, Unknown
  gut microbiota DNA sequence
acccccaagaaattgcgggtgagccggggctgtttttaaggacggataaaagataacctcttctcttcttccgcaaataggatagcagtattcactaatgccaaatgtgataccaatagcttttgttatttaatcttgtattaatatcctgtttgtcgctttcaatatatatttgttttcaaatatcttttggattccttatatttgttttccggtttgaaaaatccggaaatgtgtcatttagtaataggaaaagggcaaaagtggaacaaaataggtgtaggtctgtgatttttttgcaaacgaatcttttttcttttcttctttctcttttttatcaaattgatttttgtaaatttggcgagaatctgagaaaggacacatagttaatatagtaataatactaaatactcctgttaatatggaaaacaaaattcaagagttgaccgataagatttatcgtgaaggcgtggaaaaaggaaacgaggaagcgcaaagacttatcgcgaatgctcaggaagaagctaagaaaatcattgaggatgcccgtaaagaggcagaatcaattgtaaactcctctcgtaaatctgctgatgagttagcagaaaatactaaatcagagttaaaactatttgccggtcaggctgtgaatgcgctcaaatctgaagtcgctacaatggtaactgacaagttgataaccgcttccgtgaaagatttcgctcaggataaagattatctgaacgcgtttatcgtagcattggcatccaaatggagcatagacgaacctatcgtcatctcaacagccgatgcggaatcactgaaaaagtattttgcagctcatgcaaaagctttattagacaagggagtgactatccagcaagtaaatggtatcaagactctgtttaccgtttctccggcggacggttcgtataaggtgaacttcggagaagaagaattcatgaattacttcaaagcgttcttgcgtcctcaattagtagaaatgctattttaaaagaagcgactatgagtagtaagtactattacttggtagcaggtttgccggaactttcactggaagacagtaagctgagctatacagtagccgattttaaaactgaaatctacaatggattgtctgcttcagaccggaagttgatcgacttgttttatctgaagtttgataatgcaaatgtgctgaaacttctcaaagataaagaagcggaaatcgacaaacggggaaactactctgctgaagagctcacagaatatatttctattctgagagaaggcggagaaatcagtcctaaagaatttccggtttatctctccacttttataactgattatttgaatactccggctgaaagtacgactttgcacgaagatcatctggctgctttgtattatgagtatgccatgaagtgtggaaataagtttgtttctgcctggtttgaattcaatctgaacatcaataatattcttgttgcatttaccagccgtaaattcaagtgggatattgcttccaatgttgtgggaaatacggaagtatgcgaagcattgcgtacatcaagtgcccgcgatttcggactgtccggtgaagtggatgtttttgaatcgttagtgaaaatcagtgagattacagaactggtggagcgtgagaagaagttggatgccctgcggtggaactggatggaggatgctattttcttcgactatttcactattgagcgtatttttgctttcctgctgaagctggaaatgattgaaaggtggatttcactggataaggaaagaggtaatcagttgttcagaagcattattgagtcgctgaagaacgaagtgcagattcctgcagaattcagataataaaataaaaaaaatatatggcaacaaaaggaactgttagtggcgttattgccaacatggtgaccctcgtcgttgacggaccggtagctcaaaatgagatttgttatatctcgaccggtggcgataagttgatggcggaggtgattaaggttgtaggttcacatgtatatgtccaggtgtttgaaagtacccgtggactgaaagtgggcgccgaagccgaatttacaggacacatgcttgaggtgacattaggtccgggtatgttatcgaaaaactatgatggtctgcaaaatgacctcgacaagatggacggagttttcctgaagagaggacaatatacgtatccgttggataaagagcgtatatggcatttcgtaccattggtgaatgtaggtgacaaagtgcaggcttctgcatggttgggacaggtggatgaaaactttcagccgttgaaaataatggccccgttcactatgaagggaacggctaccgtaaaaacaatcatgccggaaggtgattataagatagaagataccatcgcaattctgacagacgaagaaggtaatgatattcctgtaactatgattcagagatggcccgtaaaacgtgcgatgacgaattataaggaaaaaccgcgtcctttcaaattgttggagactggtgtacgtgtgattgatacgctgaatccgattgtggaaggtggtacgggatttattcccggtccgttcggtacaggtaaaacggtgcttcagcatgctatttctaagcaggcggaagcggatatcgttatcattgcagcttgcggtgaacgtgcgaatgaggtggtggaaatctttaccgagttccccgaactggtagacccgcacacaggacgtaagttgatggagcgtactattattattgccaatacttccaacatgccggttgctgcccgtgaagcatctgtatatacagcgatgacactggcggaatattaccgttcaatgggattgaaagtcttgttgatggctgactctacttcccgctgggcacaggctttgcgtgagatgtccaaccgtatggaagagttgcctggaccagatgctttcccgatggatatttcggctattatctctaacttctacggtcgtgcgggatatgtaaaactgagcaatgacgaaacaggttctattacatttatcggtacggtatctcctgccggtggtaacttgaaggagccggtaactgaaaatacgaaaaaggtagcccgttgtttctatgcattggaacaggaccgtgccgataagaaacgttatccggctgtgaatccgattgattcttattcaaaatatatcgaatatccggaatttgaagagtatatcaagggtcatatcaatgatgaatggatcggaaaggtaaatgaacttaagacccgtttacagcgtggtaaggaaattgccgaacagatcaatatcctcggtgacgatggtgtgccggtagaatatcacgtgatcttctggaaatctgaattgattgactttgtaatcctgcaacaggatgcttttgacgaaattgacgcggtaactccgatggaacgtcaggaagacattctgaatatgataatcgacatctgtcatacggaatttgaatttgataacttcaacgaagtaatggactacttcaagaagatgattaatatctgtaagcagatgaactattcgaagttcaaatcagaacagtatgaaggattccagaaacaactgaaggaattgattgaagagaggaaacttcaatcgtaaatcgtaaattgttaaatcgtaaataagtaagatggcaacaaaagcttttcaaaagatatataccaagattactcagattaccaaggctacttgttcgttgaaagcgacaggagtagggtatgatgagcttgccaccgtggacggtaaactggcacaggtggtaaagattgccggtgacgatgtcactttgcaggtatttgaaggtacggaaggtattccgaccaatgccgaagtagtatttctcggcaaatcgcctacattgaaagtgagtgagcagctggccggacgtttcttcaatgctttcggtgacccgattgatggaggtccggacattgaaggacaggaagtggaaattggtggtccgtctgtgaatccggttcggcgtaaacaaccgtcggaactgattgcaacgggtattgccggtattgacttgaacaatacattggtatccggtcagaagattccgttctttgccgacccggaccaaccgttcaaccaggtaatggcaaacgtggccttacgtgctgaaacggataagattatcctcggcggtatgggtatgacgaatgatgactacctgtattttaagaatgtgttctctaatgccggtgcgctcgaccgtatcgtgagtttcatgaatacgaccgaaaacccgccggtagaacgtttgctgattccggatatggcattaactgctgctgaatattttgcagtaaataataatgagaaagtgctggtactgctgaccgatatgacgagctacgctgatgcgttggcaatcgtatccaaccgtatggaccagattccgtctaaagactctatgccgggatcactttactcggacttggcgaagatttacgaaaaggcggtgcagttcccttccggtggttcaatcacaattattgcggtgactactttgtccggtggagatattactcacgctgtgcctgataacacgggttacatcacagagggtcagttgttcctgcgtcgtgatagtgatattggtaaggttattgttgacccgttccgttcgttgtctcgtttgaaacagctggttaccggtaagaagacgcgtaaagaccatccgcaggtgatgaatgctgccgtacgtctttatgccgatgcagctaacgctaagacgaagatggaaaatggtttcgacctgacaaactacgacgaacgtacgttggcttttgcgaaggactattccaatcagttattggctattgatgttaaccttgatacaactgaaatgctggacgttgcttggggcttgttcggtaaatacttccgtccggaagaagtgaatatcaagaaagacttggtggatcaatactggccaaaacaaaataattagacgattagacgatttaccatttacggttgaagtttgtggattatttatgtttataagaagtaatttcaatcgcctgattgtaaatcgttaaattagtaaatcaacgagatggctataaagtttcaatataacaaaacctctcttcagcagctcgaaaagcaactgaaagtgcgggtgcgtacgcttcctatcattaagaataaggaaagcgccctccgcatggaagtgaaacgctgtaaaacggaagctgccgatctggaggataggctcgaacaacaaattcaagcctatgaagccatgttcgccctttggaatgagtttgacgcttcattaataaaggtgaatgatgttcatcttggcgtgaaaaagattgcgggtgtgcgcgtaccgttgctcgagaatgtagaattcgagatacgtccgtacagtatgtttaatgctcccaagtggtatgccgacggtatccacctgttggaagagctggctcatacggcaattgaacgtgaatttatgctcgccaagctgaacttgttagaacatgcaaggaaaaagaccactcaaaaggtgaacctttttgagaaggtgcagataccgggctatcaggatgcattgcgaaagatcaagcgatttatggaagatgaagaaaacctgtcgaaatcttcgcaaaagatcatgaagtcccatcaagaaaaaaggaaggaggtagaggcatgattacaaaaatgaagaaactcacctttctggtgtatcacaaagaatatgaagaattcctgaacagtctgcgggaacttggggtagtccacattgtggagaaacaacagggggctgccgataacacggagttgcaggataatattcgtctttccaaccgtttggcggctaccttgaagttgcttcagaaccagaagcatgaaaagaatgccgtgattgctacggaaggaggaacggctgcccgtggaatgcaagtgctggacgaagtggatgctttacagacagagcatggaaagttgtcgcagcagttgcaaagctatgccaaagaaaaagaagctctggaagcctggggcaactttgaaccggcaaatgttcagaagctgaaagatgccggttatgtaatcggtttctatagctgttcggaaggaaattacaaagaagagtgggaaacggaatacaatgcaatgattgtgaaccgcatttcttctaaagtattcttcgtgactgtaacgaaaggcggagaggaagtggacttggatgtagagcaggctaaattacctgcatactctttggtacatcttgaaacgctttacaatacaacagaacaggccgttgaagagaatgaaaaaagactggttgcactttccgaaacagatattccttcattgaaggttgctctgaaagagttgcaaagtcagattgaattctctaaagttgtgttaagttccgagcagactgccggtgacaaactgatgttgattgaaggatgggtgcctgcattcagtcaagtggagatagaggcttatctgaatgacgcacatgtatattatgagattaccgatccgatgccgggcgataatgttcctattcgattgaataataagggattctttgcttggttcgaaccgatctgtaagctgtatatgcttccgaaatataatgaattggacttgacaccgttctttgccccattctttatggtatttttcggactttgtctgggagattccggatatggtttgttcctgtttctgggagctacggcctatcggttgatggcgaagaaagtaaccccgtcaatgaagtcaatcatctcattgatacaggtattggcggtatcaacgttcttctgcggtttgctgactggtacgttcttcggagcgaatatttacaatttggattggccgattgttcaacgtttgaaacatgctgtcatgatggataataatgatatgttccaattatcgttgatattgggagctatccagattttattcggtatggtgctgaaagctgtgaatcagacgattcagtttggtttcaaatatgcagtggcaactatcggatggatcatcctgctggtttcaatggcagtttcagctttgttaccggacgtaatgccgatgggaagcacggtgcacttgataatcctgggtgtttcagctgctatgattttcctttataacagtccgggaaagaacatattcctgaatatcggattgggattgtgggattcatacaacatggttactggtttgcttggagatgttttgtcctacgttcgtctgtttgccctcggactttccggaggtattctggcgggagtgttcaacagtctggcagtaggtatgagtccggataatgtaatagcaggcccgattgtaatggtgctgattttcgtgatcggtcatgcaatcaatattttcatgaatgtgctgggtgcaatggttcacccaatgcgtctgacgttcgttgagttcttcaagaactccggatatgaaggaggcggtaaagagtacaaaccgttcagaaattgaaaaaactgaagattaaaaattagaaatagagaattaatattttaagaattaaacaataaaaaatagaataagattatggaaatgaatttgtttatcgcctacattggcatcgcgattatggttggtttgtctggcatcggtagtgcttacggagtaactattgcaggtaatgctgccatcggagcattgaagaagaatgatagtgcattcggtaacttcctggtattgacagcccttccgggtacacaggggctttatggttttgccggttatttcatgtttcagactatcttcggcattttgactcctgaaattacagctatccaggcatcagcagttcttggtgcaggtattgctttaggattggttgccttattctccgctatccgtcagggacaagtttgtgcaaacggtattgcagctatcggacagggacacaatgtatttagtaatacgttgattcttgccgtattccccgagctttatgcaatcgttgctttggctgcaaccttcttgatcggtagtgcactcgttgcataatttttagcaagaatatttcctataaaggagtttcaatccccttgtacatgcagctttgcatgtgcaaggggatattcttttttcattatagggcaacgtttctttcctcttcttaactcatatttttcgcataaagtattatttttcaaagaataatgtgtacttttgcactcgcatactaaaaagagttttaatatattatatggtaaaagatttattaacccccgattatatcttcgagtccagctgggaagtatgtaataaagtgggaggaatatacaccgtcttgtcgacacgggcaaatacattgcaggaaaagttccgcgacagaattttcttcataggtcctgatgtatggcaaggaaaagaaaaccctctattcatcgagtcggataacctatgtgctgcctggaaaaagcatgcacttgagaaagacgaactttctgtccgtataggacgatggaatatccccggtgaacccatagtcattcttgttgatttccaacctttttttgaaaagaaagacgatatatacacagaaatgtggaatcgttatcaagtagattcgttgcacgcttatggcgattacgacgaagcttctatgttttcatacgctgcgggaagagtggtagagagtttctatcgctacaacctgacagaaacggataaggtggtatatcaggcgcatgaatggatgactggaatgggagcactttatgtacaggaagctgtgccggaggtggctactatttttacgacccatgctacttctatcggtcgttctattgccggtaatcataaaccgttgtacgactatctgtttgcttataatggcgaccagatggcgcaagaactgaacatgcaatcgaaacactcgattgaaaaacagactgcacattacgtagactgttttacgacggtgagcgaaataaccaataatgagtgtaaggaattactggataaaccggcagatgttgttctgatgaacggttttgaagatgattttgtaccgaaaggaagcacatttaccggaaaacgtaaacgtgcgcgtgccttgatgctcaatgtagcgaataaattattgggaacaaatctgggtgacgatacgttaattgtcggaaccagtggacgatatgagtttaagaataaaggtattgatgtatttttggaatcattaaaccgcttgaacagggataagaatttgcataagaatgttttggcattcatcaatgtacccggttgggtaggagacccccgtgaggatttgcagggacgtttgaagagcaaggagaagttcgacactccgctcgaagtaccatttatcactcattggctgcataatatgactcatgaccaggtgttggatatgttgaaatatctgggaatgggcaatcgtccggaagataaggtaaaagtgatttttgtaccttgttatctgaatggtcgtgatggcatcatgaataaagaatattatgatatattgttgggacaggatttgagtgtctatgcttcttattacgaaccgtggggatatactccgttggaaagtgtagcattccatgtgccgacaatcactactgatctggcaggattcggactttgggtaaacagcctgaagaaccagcatggcattaatgatggagtagaagtgctgcatcgttcggactataattattcggaagtagcggatggtattaaagatacgattacgttatttgcggataagacggagaaagaagtgaaggaaatccgtaagcgtgctgccgaagtggcagaacaggctttatggaagcactttatacaatattactatgaggcttatgacattgccttgcgcaatgctatgaagcgtcagttgagttaagaaagaattatttatcaataagtaaacgtaaacattatgaaaatcaaagttagtaatgtgaatactcccaactggaaagaggttactgtaaaatcacgtataccggaagagttggagaagttgtctgaaatcgcacgcaacatttggtgggcatggaattttgaagcgactgaactgtttagagatctagatccggaactttggaaagaatgtggacagaatccagtactgttgttggaacgtatgagctatgaaaagctggaagcgctggcaaaagacaaagtgattctaagaagaatgaatgaagtttatacgaaattcagagattacatggatgtgaagccggatgagcaacgcccatctattgcttatttcagtatggaatatggcttgagcagcgtcctgaaaatatattccggtggtctgggtgtattggctggtgactatctgaaagaggcttccgacagcaatgttgatttgtgtgcggtaggctttttgtatcgttatggctactttactcaaacgttgtctatggatggacagcagattgccaactacgaagcacaaaacttcggtcaacttcctattgaacgtgtaatggatgccaatggtcagccgttgatagttgacgttccttatcttgattattttgttcatgcaaacgtatggcgtgtaaacgttggacgtatttctttgtatctgcttgatacggataatgaaatgaacagtgaattcgaccgtcctatcactcaccagctttatggtggcgactgggaaaaccgtttgaaacaagaaatcttgttgggtatcggtggtatcctgactttgaaagcactgggcatcaagaaagatgtttatcactgtaatgaaggacatgctgcattaatcaatgttcagcgtatctgcgactatgtagctacaggattgactttcgatcaagctatcgagttggttcgtgcttcttctctttacactgttcatactccggttcctgcaggtcacgactattttgatgaaggcctgttcggcaaatatatgggtggttatccttccagaatgggtatcacttgggatgacttgatggatctcggacgtaacaatccgggtgacaagggcgaacgtttctgtatgtctgtttttgcttgtaacacttcacaggaagtgaacggtgtgagctggctgcacggaaaggtttctcaagaaatgttctcttctatctggaaaggttatttcccggaagaaagccacgtaggatacgtaacgaatggagttcacttcccgacttggagtgcaactgaatggaaagaactgtactttaaatatttcaacgaaaatttctggttcgatcaatctaatcctaagatttgggaagctatctacaatgtgcccgatgaagagatttggaagactcgtatgactatgaagaataagttggttgactatatccgtaagtcattccgcgatacatggttgaagaaccagggagacccttcccgtatcgtttcattgatggataagatcaatccgaatgcattactgattggtttcggtcgtcgttttgctacttacaaacgtgcacacttgttgttcaccgatttggatcgtctttctaagattgtgaataatcctgattacccggtacaattcctgtttacaggtaaagctcacccgcacgatggtgcaggtcagggtttgattaagcgtattatcgagatctctcgccgtccggaattcctgggtaagattatcttccttgaaaattatgatatgcaattggctcgtcgtctggtttcaggcgttgatatctggttgaatactccgactcgtccgttggaagcatccggtacatcgggcgaaaaggctttgatgaacggtgttgttaacttctctgtattagacggatggtggctggaaggttaccgtgaaggtgcaggttgggcattgacagaaaaacgtacttatcagaaccaggaacatcaggatcagttggatgctgctactatttacagtattcttgaaactgaaatcttgccgttgtattatgcacgtaataagaaaggatattctgaaggctggatcaaagtggtgaagaattctatcgcacagatcgctcctcattatacaatgaagcgtcagttggatgattactatagcaaattctattgcaaactggcgaaacgcttccagactttggctgctaatgataatgcaaaagcaaaagaaatcgcagcttggaaagaagaagtggttgctaaatgggatgctattgaaatcgtatcttgcgacaaggtagaagacctgaagaacggtgacatcgaaagcggaaaagaatatactattacttacgtgatcgatgaaaaaggcttgaatgatgcagtgggacttgaattggttactacttacacaactgcagacggcaaacaacatgtttactctgtagaaccgtttagtgtcatcaagaaagaaggtaacttgtatacattccaagttaaacacagcttgtcaaatgcaggtagcttcaaggtgtcttaccgtatgttcccgaagaatccggagcttccacaccgtcaagacttctgctacgtacgttggtttatctaatttgtttgaaataaaagtaggggagtccttctcccttactttcatatatagattcagcccctgtgttctttcgagaattacaggggctgaattttatctgtttggttgctgacttgtgaagtttttaataagcaagaaaccatctgaaaagtctctaaaaagaaaaatcacgcttactgcaacatgtcgtagtaagcgtgattttataggatcaaggcttttcgaacagccccttgtttgaactttaaagcctttgaaaaactttctctttcgatctgttattttacagcttctgcaattttagcctgaagttcttctccatgcaaaccgcgagcgataattttaccactgccatcgatcaatacagtgtgaggaatactgtttactgcataaagctgtgcaccttcactttgccagaatttcaggtcggacatttgtggccaagtcatattcatcttcttgattgcttctttccatgcagctccatcctggtcgagagatacgcctacaatttcgaagttcttacctttatacttagcgtaagtttctaccagattaggcatttcgcgacggcaaggaccgcaccagctagcccagaagtcaaccaataccactttacccttaccaacgtagtcagacaacttcacaatctttccttccggagtctgcatttcgaaatcaacaaattgagtacctacggcagtctttttctgcttgtcggtcatctctttgattcttacgattgtttcgtcattctggaaattcgcaggaatttgttgcaacaaagcttcattttcgtcagtagagttattgtagaacgtttgtttaaacaagaaaactccgaccggattggcgatgttcttcttaacaccttctttgattactttgtcatactgttcttccagctgggcaccctctttttgtttggcttctttctgctcatcacttaaagaagtgtcgcccattgcttcataaatggtattcattttcttgctgatgtcattgatttgagctctgatttcctggtatgcatcattgttaggagtaccggtcacagcgtcgttatccttggtcagggcaacgttgatttttccgttttcgaggaagaaatcaatcatcaatggctctccgttcacttcgcaagtgacatagcggctaaccacagaatcttgtgtaccttcaaaggtaaaagtacctttggtgataacggctgtatctagtttggtcaaatttctgccagtagcttcctgaagataaacggtgtcaccatcgcttgcaccttctaccgtacctgtgacaacgtatccggctttgtttccgcccgtacaagctaccatgcctaacgctgccgttgcaataactaaataagttaactttttcatgcttttgtaaaattagtgaataaatatttatgcaaagatagattttttttctgtcgggcatcgaaaaacactgttatattagattaacacctaggtgaaaaccgcagaaatgtgtacctttgcagcccaaactttagtatgaatatgcaagaagataaatccatcattgaggtgagccacgtatcgaagtattttggcgataaaacagcattggatgatgtgactctaaacgtgaaaaagggcgagtttgtcactatacttggtccttccggttgcggtaaaaccacgttgttgcgtctcattgccggttttcagacggcttcggaaggcgagatccgaatttcggggatggaaataacacaaactcctccccacaagcgtcccgtgaatacggtatttcagaaatatgccttattcccgcacttgaatgtatatgataacattgctttcggcctgaagctgaaaaagacaccgaaacaaaccattgagaagaaagtgaaagcagctttaaagatggtaggtatgacagattatgaataccgcgatgtggattctctttccggtggtcagcaacaacgtgtagccattgcccgtgccattgtgaatgagccggaagtgttgctattggatgagccgctggcagcgctcgacctgaaaatgcgtaaggatatgcaaatggaactcaaagaaatgcataaatctttgggtataacgtttgtttacgtcactcacgatcaggaagaggcattgacgttgagtgatacgattgttgtgatgagtgaaggaaagattcagcagatcggtacaccgattgatatttataatgaacccatcaacgcttttgttgccgactttatcggagaaagcaatatcctcaatggtaccatgattcatgataagctggtacgcttctgcggcacggagtttgaatgtgtggatgaaggatttggtgaaaatgttccggtagacgtagtcatccgtccggaagatctttatattttccccgtttcggatatggcgcagttggtaggcgtggtagagacttctattttcaaaggcgtgcattatgaaatgacggtgatgtgcggcggatatgaattcctggtgcaggattaccatcattttgaagtaggagcggaagtcggactgctggtgaagccgtttgatattcacatcatgaagaaagagcgtatctgcaatacgtttgaaggaaaattgctggatgccactcatgtggaattcctgggctgtaactttgaatgtactccggtggaagatatagctgccgatacgaatgtcaaagtggaggtagactttgaaaaagtgattcttcaggataatgaagaagacggaacgctcacaggtgaggtgaaattcatcctttacaagggcgaccattatcatctgaccgtattgtcagactgggacgagaatgtatttgtagatacgaacgatgtatgggacgacggagaccgtgtaggtattaccatccctccagatgccattcgtataattaaaataaccgattaacaggaaaggaagtgaataagaagtttatagtctttttgtcatcacgtaagagttggactctcccttacattattttttcggcgatctttgtgattataccgctgtttttaattgttgtatatgcctttaccgatgatagcggtcatttgacactcgccaattttcagaagttcttcgaacatcccgaagcaatcaatacctttgtatattctatcggtattgctatcattaccacccttgtttgtattttgctgggttatcctgcagcatggatattgagtaacagtaagctgaaccgttccaagacgatggtcgtactgtttatcctgccgatgtgggtaaatattcttgtgcgtacccttgctacggttgccttgttcgacttttttagtgtaccgttgggcgagggagcattgatattcggtatggtatacaactttatcccctttatgatttatcctatttacaacacgttgcagaagatggatcatagttatattgaagccgcacaagatttgggagccaatccgctgcaagtctttctgaaagcagtccttccgctttctatgccgggtgtgatgagtgggattatgatggtgttcatgccgactatatctacatttgccattgccgagttgctgacgatgaataacatcaaactctttggtacaacgattcaggaaaatatcaataacagcatgtggaactatggagcggcactttcgcttattatgttgctgctgattgctgctacttctttgtttagcacagacgataaggacaattcaaacgaaggaggcgggctatggtaaagaaaatatttgcgcaggcttacttgtggatattgctgttgttgctttattctcctatcgtgattatcgtcatctattctttcacagaagcgaaagtgctgggcaactggactggtttctccacaaaactttatacttcgcttttcactacaggcacgcatcattctttgatgaatgcattgattaacacgattactattgctctgctggctgcaacggcatctactttgctgggtagtgtggctgctatcggcatctttaatctgaaatcccgttcgcgtaaagcgattagttttgtgaatagtattcctattctgaacggagatatcatcacgggtatttcgcttttccttttgtttgtttctttaggaatcacacaaggatacacaaccgtagtgcttgctcatattactttttgtacgccatacgttgttttgagcgttctgcctcgtttgaagcagatgaacccgaatatttatgaggccgctcttgacttgggagcgactcccatgcaagctttgtggaaagttattgttccggagattcgtccgggaatgattagtggttttatgcttgcattgactctatccattgatgattttgccgtaactgtctttaccatcggtaatcaaggtctggagacactctctacttatatctatgccgatgcccgcaagggagggctgacccctgaacttcgtccgctttcggctatcatttttgtcgtggtgctggcgttgctgattggcatcaattatcgggcaggaaaagcgaagaaaaaagattaatagaccatcaaatgtgctactacataaataatatgaaaagaataattcccgtaatcctgctcttactgaccttgaccggatgctataattccggtgaacctcgtgagcgggtccttaaaatctataactgggcagattacatcggcgaaggtgtactcgaggatttccaggcatattataaagaacagaccggtgagaatatccgtatcgtttaccagacattcgacatcaacgagatcatgctgacgaagattgaaaaggggcatgaagattttgatgtggtctgtccttcggaatacatcatcgagcgtatgctgaagaaacatttgctgctgcccatcgatacgaattttgcacattctcccaactacatgaataatgtagctccgtttatccgcgaacaaatcaataaattgagccaaccgggtgagcaggcgagccgctatgctgtatgttatatgtggggaacggctggaattctgtataaccgggcttatgtacccgattcggtagcgctgtcctgggattgtctttggaataaaaagtacgccggaaaaattctgatgaaggatagttatcgtgatgcttacggaacagctgtcatttatgcgcatgcgaaggagctgaaagaaggaacggtgacagtggaagagctgatgaacgactattctccacgtgcgatggaactggccgaaaaatacttgaaagccttgaaaccgaatattgccggttgggaggcggatttcggcaaggagatgatgacgaagaataaagcctggctgaatatgacttggagcggtgacgcgatttgggcgattgaagaggcaaatgcggtaggagtggacttggattatgaagttcccgaggaagggagcaatatctggtatgacggttgggtaatcccgaaatacgccagaaatccggaagcagccagttatttcatcaattttatgtgccgtccggacattgctttgcggaatatggatttctgcggatatgtaagttccatagctacgcccgaaatactggaagagaaaacagacacgaccctccattattatgccgatttaagttactttttcggaccgggtgcagacagcatacaaattgataagatacaatacccggatcgcaaagtggtagaacgatgtgccatgattcgtgactttggcgatcagacaaaagaagttcttgatatttggtcgcgtattaagggcgataatttgggggttggcataactattcttatctttgtcgttgttgcattgatgagtggctggatgatttataaaagatggcagcgttacagccgccagaaacaacagaggcgcagaagcagaaggaaaaaggtgaggaggaattagtatttctccgtattacaaacaaaaaataaataggcgcgaagatagaagtggtatctatagaaagaataagaagcacggtgaacggaatgctaatggcgggatgttcaccgtgttttgtttttatcgtcttttcatattccgaagtatatctttggtatccttgtctacccggaaagactcgattgttttttgcagtgctttgttgtaagtccagttatccaatgtactatgtttcagatattccattgtcttttggggaaatttgatgaaacacaatgatagcatccatgccatacccatacgtgcataataagcatcatgattgaataaatcggcatattccagtaacgaatcgatatgttcgtcatccacatagtggaaaagcatcacaatcccgaagcgtatttcaaattctttagaggatttcagataaggttggataaattgccatacggtttcttttcctttttttacggcagttttcagttcactgcagaaaatgtcgcatacagcccaattatctatacggggaatgaacatcgttacatagttcattcgttcttcaagttccatttttgccagtccgataatcattccctgaagcattgtttcttcataatagttcgtatcggttgactctacaaacgtacgccagtcctctttttttataatttctttggtcatgattcgcagttgggggatacgtacaccgagaatattgttcgctcccggaaggagggaagagtgaaattccttatatttggcatctactaatgcttgtaactctttccgtatgttttcagttgtagtcattttgatatagttggttatttcacaaaggtataaaaaaaagagcatgcgtatcatgtgacggcatactcttttgggagataattcccatcataatgaaaatactttgggaaagtttatacggttagtcacttcttgtccatgtcgaaactgaatgtagtaggtgagaagtcttcaaacggctgtccttctacttccactttggttgctttgatttcaaatgtaagtttttggtctttatatgtatattggcccttttcttccgcttctatggttacttttatcgtaatttgaggagcttcttccccgtctgcttgtgcttgagtcgggatagtatattttatttccaaaggttcaggttttaattgaagtagaatagagcctttactgtcatcattaaaggcagcggtataaggaatgttgtaattgatatcgtccagattttcgatgataattccggcagcttcttcaccaacgatacttttgatgagatcgtctaccgggagttttttaatcatgacctgattgtcttttacttcagcggtaacggtggctccttccggctgttcttcttttggggaattagtttgtgggttaacgggcggatcagactctgtcaacatggtaccggaataatttccatccacatctttaagagaatatacgggaatgtctgaatcatcatcattgctacatgctgtaaaagtggttatcaggcccaatgccactacaaataaaactaagcgattaaaacaacgaactttttttatttcagttaaagttttcatactgtttaaaattagattattaattttcaaaattaaggtgtacgtacatagggtaaatgccggtaattgtaaaatactgcacaaggaaataaaaaacagaatattttttttgcaagaatgctgtgcagaggtcccgatggatgggacctttaagcaaatagcagattttgtatattattgttttttcattatagattcgcttggcgttattccaaaatattctttgtatttgtggcggaagtttttcagattcctcaatccgatcatttccggaaccacattaacagagtatcttccactctccaacagttcacgggctttttccatacgaatccggtatataaaatatttaggtgcttctcctgtcagcgatttccatttattaaagaatgtggttctgctcatgcacaattcggatgcgacttcatctatagtcaaattttcctgatctatattttttagaatgaaatcctttacaaggttgataaatatgtaatttttttcactcaaagtatcctcctcctcttctatttttagaaattgttctccgaatactttttgcaggaatgattttcggagaaaacggctgtttttaatcaggacgttcatctctatttttaagtcttctatatgaaaaggtgtatttataaagacatcggccaaagaagtttctctggtattgcgttgtcttccattcagatatgagccgtagaggataatgggaatgattgaagtttcacaggacgttttcaatcttgatgaaagctcattgccgtacataccatgcagcatggtgtcacagactacaatgtctggatattcttcctttatgtatgttagggcttccagaccgtttccgaagctttttacaataaaatgatcagataaacgcgtttctaggtaagatctgaaatcgatattgctgtcagcaagtagtacagtgggtttaacagactttcttttatgagactttttacagaataaagagtctatttttgtttcttcctgattggctatgatttgtatgggagtgtatttggatatacttttatgtgtatatccttttgaaagatttttttctttttgtataagaatgatatagaagtaaatacaataaatagaaaatcctcctacaatgaacagtgggataaagtttaattgataaataagagttatagccatgatgacaggaacgaggggcgacgttgttattgaatatttcatatgaatttgtttttaatagcgccacttggatgagatacaccaatttcctttgttggggataaaagaggaaattcactgtaactatgatctcatagttgtacattcataaactcaaaatataaactcgtaattatttatatcttgagggggaatagttgaaggtgaagtctatatatagagtctgaattctaacagtttgaatcattctttcggaaatggtgaatttcctccaagtgacaataatagatctatttcttgtttattgaatgttttatatactgtatgaaaatacaggtggggggagagcgtgtggcatattcggtactatcgataaatatctcgatgagtaccattttatattttctcatatatgggtagaaaggaagtacgatttattcctgcgaagtaaaaataatgataagttgtaacaagtggatgatgttatgaatgttgtctaatcgtttgttattgtttggtgttcttatagcgataaacggtgacatataattatggtttgttaggattgtgttgttgtgaggtgacaaaagagtgaaagaggtgtaccgtttttccatttgatatttctatttctgattgaagaattatcaatatcggattgtaatgtcttcaatggggataaaaaaagagtcgcatgattttcttatgcgactctagattatatgcattattgtgtaatgtctggttatttataacttttgaatttcttccaatgaaagtccggtagccttttggatagctgttatgtctactccctgtgatttcagattgctggcaatttcgagccgttcttccatgcgtccttccatgcgtccctccatacgtccttccatgcgtccttctgtacgcccttccagttttgctccatctaatacatcattttgtatcatgatggcactaaggtgctcgtcgtaggcatgtctttcttccttggacatattgtaataaataagtttccggcgtgcttcttccagaccgggagctgttgtatcggggcgaatgcaaccggttttcaagtattcaatccattcttccaatggagtgacggccactttatcgaattcattcacacgaattagaaaatattccggaaagatttctgccggaatcttatggacgatggcatctttttctttagtagttacttccagtctgtctcctgtatgtactccgataaagtggttttgtccatgatacaaataatcttctcccttaccgatatcgaagtatagaatactgatagagtatatttttttcactgcatagtagcgttctcctaaagaaatatgttcagtgatagcttttgccactccgtacaagatgcgttccagataatagagctcccgtgtattttggatctctacaataatgatttcgtccttactgtttctggctttaatatctaccctgttgaatttatcatcgattgtttgttggttgctttcactttccaatatctctatgattttcacgttttcaccgagaaggacagtcaagaaaccttccagtacgccgaaatttgccttttggcggagaagccttttcacagcccagtcaaagcgtatatatttgtcttgttgttccatatcaatttaatttttaggttattgcaaagctacgacttttttttagataatggctactctttgactttatattttcagtgaatgaatctgtgcatatttggcaaattcatcaggggcaatttaaattattccatagtagagagttaattattaacgctgtcacattttactattcccttttatgtaacttaaagtaggagtaaaaatgtggcagcgttttagattgaaaattttaggtcgttattattctttatttttctgtgtcacttcaatgccttccggccaaatagctttagcgtatgcttttgcatcattaccgttttctgtatagtctttcgctatatcccctttgccttcattaaacttccaataggcttttaaacctgtagtttgaggatcgacatcatacatatttttgtaaatttcttcttgtgagcgtatcacgttccatattcgtacttcgcagatttcaccatctaattgacgagtcatatcctctggctcaccataggagtgtcctattttaaacataaagtcctttcctcgggtttgcttgcccaaattaatgggctcaccagttccgtagtcctcaatagtactctgcagtttgccatccacgtagatagcggcagtctttgcttcggtgtcataagtcacggctacatgataccattcgcttggttgcaacaattttccttcgtctgccttggggaatttaatctcgttggcggcaaactgcaattgctgtttggggaatcctgaatcgcccaaacggaataaacagtattgctctatacccattatagttgagatctcatttttaggatcgaatctatttacccggataatggcttcgaaggttagttgtgttagcccatttaccacattagccgtagggctgtctttttcgaatccgggaacttcaaagtagttgtttgaaaggctcactgctgtagtaatggcgctggaacgacgtactatgtaacaaatagtttttgatcccttcaataatcccatacctcctgacgcttgctgaatagtgacaggtagcaggaaattagtgtcaatgtccaaatccgtgaggtcggagaaaccgatcgttacgacttccgagtttacgtctcctttggggatgacgacatgttgtgtagaaaacttataatatttagtgtccagcattgcataattggtgccgagacgcgcattataataacctatcaacgaaggatctacctgaaaattaacatcaatatcttgttcggcagggtatgccaacacagcagaaagctcttgctgccctgtctgtttgagattattaaatgtgaagttagctacatccttcacttttgccgcatctatatatacggcattgtcaaaaggagacgctttactataatccttgttgtcacatgccgctactaacagaagtaggattatgacagaacctgcaaaagagacgaataatggaatgtctcgatgaatatgttttgttttcataatattctctttttatgtttttctttttattgatctcgaccgctagttctaccaatctttggcgaggtaaagataacctgaatgaaatttttgtctatgttcatctgttacagtttcggatataccatagctgtattctccattttcttctctctccatgaatggagggcgtggatttttaccccactctagaccatcttctgctattgctccaataaaagatagatatccattttccatgcgatactcatactcattttgttcattactaatcatatcactgccaaatacgataatattgttcttttttcgattttcttcttttttccacattatcgcctttttctttgaggcatttaatattccctctgcactcttaggatacagaggcatatttacgcttccatagcgttcagctgtcagtcctgctatgggtttacgagtatagtcgctgtaagggtgttcggtttcccacggttctataatctgcacttcttcttcctctgaaacataaccatgccatgcgtaatcaatgtattttcccacttctataccttcgcataaagcaggatcatagaaggatgcagtaggctcgtctttatctactaaagtcagcattttcccaggcattgcgtcacgcaaacttttgataagtttgggatatgaggtggtattcactggtggcattcccgatttatcatatccactgccttcgtcccaaaggttcacaccatctaactggtaaaattctactgcatcttttacttgtttggtaaaatctgctatctgggcatcattcatgttacagaaacctaagcctttaccaccgccttcgatgcacagacacactttgcgttcgtgatcttgaagagggcggatgtaagtggctgcgttctctaatacatagcgtagatcattattcaatgttagtatggcgcgaccggattctttatcataacctaccgttgcaatacgcaagttgacaatattccccatactgtacgcttccgcttcccgggtttcagtatttgttctcacatatataaaaatatcagcaagtataggttgataagtggatgtattgagatagaatacagaaaggaaacgggtatccaatgttgcgatattaacgccatcttcagaaattatttcacctgccttttggcgtacattgactctgtatctaagatattgcttctctgtttcaccgtccgcattagtttgctctatggcaaagagtaattcgtaagcatcataatctgcaggcagattatgtgtagaaagcgtaagtttgatacttgatgacttctcttttccggcaggtatagtcagcacgccttcgcccgagattatattccctttggggaacactgctgattttaacaagggtttttgtctccaatgtgctgcaaccatactttcattaaaagcttcaatcttcgcattatctgcctttatttcagcttcaaactccatactcatctcgctttctaatttgactgtaacctttacatcgcttgtcgcaggtcggcttaactgatagaatatttcatcgacaactatttcatcctcactgtcattcgtcagttcaataactgcttttccggagaaggacgaattgctacgcagcgtactgccaatacttcccattgtcgtttcatccggcaacttacctgcatccgccaaaatagtatcttcggtgcaagctgacattccaaccgctagtatcaggagcgggaacagtatatatatgataaatttctttttcataatcgtacgtttttatttcgacggattcatctgttgaatagccgtacgagtggtttcataattcatattcgcactataataatcgctgccgatattgtgaatggcaaggcctccaagtggccccattgcagctacacaatctgtcatcagaggcactacactttgtttttcattcttttcgtctactatttggtcgcctatacgggcagataatagaactttctcacgaggtagtatattgctatccggtaatccggcaatcaatagatttagttcgctcacattagtgaggtcagcagtatttaacacaatgtagtttagcttttcaaggtcggtagactctataaagtcgggattaccttcaaatactaataacttgccaccacccgttgcagcggatagcttagagacgataagctgtgcggcctccttacgggctaccatttcagcatctgtcccgctatatagacggacgcctgtaaaggcaaaaccatccaggttcaattctgtggctgcggcaactgctttatcaagccaagttcccaaagctgcggcatcagtaaaggtagctgcctgtgcagcataatctacaagatagattatccgggtactcttttcatgtaatagaagaatgtcttcacggtcattatcgctgatattgcctggattgcataaggcaacaatgtccagtgagtcgggcagtgaacgaaggaaactcccttcatttacaggtttctccggagaattgtcaaatcgtgtataagctatataatgcttactttgcttgtaggtattcaatacctgcatgtagcttgcccaaagttccggattctgatcttttggactatttatgttcacatccaccggctccggttcgttccagtcactacatgccgtaggcagaacgcacgctaagagtaatagagtgcaggtaaatatgttatatattattgctttcattttttcttatttttcattcgtattaatcatactcattcatttctcatggattggcataaggtttcttatcccaccacaaccgtgtgcctccgttgtcagggcctcctaacatgcctgtcgctagcttaatattagaaagattttcggagtactcgataggagggtaccataaccggcgtatcatgtgatcggtatcaatggcaccaccgcttttgttctttattacgggtaacagatgcggatatcccgtgcgccggtattcgctccatgcttccactcccaaagggaagttagcaatccacttttgggtgatgatacgttcaaggttccgctcaaaataattatccccttcttcccatgctatggtgatagtactgcgcggaccttcataatctgtatattcatattgggggtcgtcatatgcctgtggcatatcggttgtatttgcggtatatgtatctgcacccgtcactccatattgttcaaaagagagagctatggcttggttatacaaatctttggcttcacctcccatattccatccccataaagcaccctcggcacgtaagaaagtgatctctgcagcgttcatccacatataggggctggtgcttgtgatgatcggcttactgtatgctcctatcttttcatctttagtgcgcacatcaataccgatgcgtattccggcatatccatccacttccatccatgtttcttggtcagtaacctttactgtggtaaacattttctcccgtctcgggtctttataaccgttcatatatgagatgatatcaccgcccacacgctggtcattccagttgttgaacaccattgctgcacgattttcctctactttcaagaaagcgttgtctgcattttgggtaatgacgccagcggttacggcttcttcggctattcgccgggcttcctctttcatctccggtacgtatgtcaaacgcattgccatacgtagtttgagcgaatttgtgaatttgagccatttggagagatccccctgatagacatcatcaaatttgcggaaggcttctgtacttaaattaagattctctttaagcacatcactcacttcgtctaactccttaaacatttgcttgtatacctcttcctgtgaatcgtatggtacagtaagggaaacctcaccggttttagaaatgattttggaatagggaataggcccatacatgtctgtcacccggtgcatgatggtaacacgcagtagttttcctaatgctaatgcgaccggatcttctgtttcgtcgagcaagtcacgatagaacgggtaagtacgtgtgataagatcagagaaaggtgcttcctgccagtctgttggcggattgtatgtctcaaatttggctgtccactccacagtacagccgatatatccggagaaagctccggcggcaagtgcttcgacaaattggtaaagatgctcctccgtaggaataaccaatccctgtaatcctttgagactggcaccaacattgtatccttcacggcccaactcttccttgtccacctgatagtccttctggtttattttgtcaaagttgtctatacacgcagttccgacaagaacaaatagtgcaagtgagaacaactttataatagatgtagtatgtttcattatagctgttttttatccgttaaaagtttattttcacgttaaaaccgatattgcgcgtactcggtagcataaagtagtcgattccttgataataattgccggttgtggcaaccgcttcagggtcgaagggagctttgttatatatcatacagaggttgcgtcctacaacggacacctgtatgtcacatacatcatgtaaccatttgcgggggagggtatatcctatagctgcttcctgtaggcgtacgttggtggcgctgtaggtataatattgtggcaatcccagctgggaaccaatggcggtgaaccatgtctgtgcatccaccctgttacgtccgtttatcaatacgccaccgttgtcccgggcaatcgccgagctttcggacacaccgtattgatccatggctgctgctgtggcagaataaacaataccgccaatacgtgcggtcaacagagcactgacattaaatcctttccatgagaattgattgctccatgccagattacacttggggaagacgcttcccaacttgatatcaggttgattattgactgttatcaatgcgcctgcaggggaaatttccaccattccgttatcatcccgttttaggtcggcttgagtgtagaggtcaccgagtgaccctcccgttttcaggatgaaccgtgcctttccaagtccgcctacgtccaaccggtctttattgataggctcacctgtttccgggtgtatgtaatcctttaccagttcgataattttgtttttattgtggctaagcgtaaagttcgtttgccagcggaagtcttttttccatgtgtgtccataaccaagagagagctcgactccttggttacgtacataacctgtttgcaagtaaatggtagtatatcccgaagatacggaaattttcgggtcgaaggtctggttgaacgtgttagccagataccatgacacgccaaggttgaagtccttgaagagacgcatgtccagtcctaattcccatgaattggttcgctctggcttgaggtcgccgataggataatgcgttttgggtttccacgtctgtgtcgtttcatcgtactcaaaggtaggtgaagtcaggttacgtgggtagggcataccgacggaactgaatgaaccgcgtattttcaggtaatcgattgcagaaggtagttttaccatttcggagatgatcgccgaaagtcccactgacggataaaagaaacaggtggaagatgagtttgccagttgtgatgcccagtcattacgtccggtcaaagtaaggtaaagcatacttttccagcccagttccgcactcgcgaaaatggattgagtttgttcctcccattcatcctgacgagctttcttttgcgtattgtcgagatcgaagacattaaacacattaggaataccattggcacgtatcggtccgcgataactaagttcgtcatacttattatccacgatgctcgctccgacattcactacaagtgagtagtccccaaagcgtttattaatgtttgccagtacatcggcgtacacctgtgattcatccggcttggcaatggcgtagaatccctgggtactaccttcggtgagagtagtattcgaactggcgtacaacttttgctcatatttggtattggagttatctacccggacacgtcccgagacgttcagccagtccgtgatgtcgtagcttaacgaggcggacagcatgtaacgcttcttattgttggtccgtagattacgatatgctatccaataagggttttgcatacgcaggtctccttcgccttgtggccagtacatggtcttgatcttgcgggccgggtcccaacgttcgaatacttttatcaagttgaaatcgtctccacgcggaaacaggtaaacaggaactatcgggtttgagtaagcgccttgattagtcatgttgcgatcattctgaataatatagctcgctccgatgtccagtttcagtttatcattcaggaatgaagtagtattacggaaagtaaaattaaaacggttgtagcggttattcggtacaatcccctccgagtttactgcggctgcggaaaagaaggtctggttcttttctgtacctgtcgataaggtgacggaattggtataagtcattcctgtgtcgaaaaagtcacgtggttcgtaccccctgcgggatgcatcgttcagtaacggtccccaactcaaatttgtagaagaaccgtccgattttcctttactgcctgtaccataacggttctgaaagcgcggcatcacaaatggtttagaaaaatcagtgttactggatacagaaacctgcattttgcctactttaccccgtttcgtgttaatgacgatagctccgttggcagcgttacttccgtatagtgcggcggctgccgctcctgtcaagaccgagatgctttcaatatcgtccgggttgatgtcggcaatgctttcggtaactccctgggaaccattttccgtaccgccgccaccaccgaagttaaacatcgggatgccgtcaatcacatacagggcattgctggattgctcaatagacttcgtaccacgcattatcactttgctggctccacctacaccggaagaactgctgttgatattgacacctgccactttgccattcaggctgttgatgaagttagcgtctttaatttctgtcagttgatccgatttcacctgttgcacattgtagctcaaggctttctgctcgcgcttgataccgagggcagtcacgactacttcattgagttgtttcgtgtcgcttactaattttactgcatagatgtttttgtctgttattctcacagttttggatgtatatcccacataggtaaagcttaatatattaccttggcggaccacgattgtgaaattgccatctatgtcggtgatagctccttcggagtttccttccactttgatattaactccaattagaggttcattattctcatcaacaacttttccagtcacattcttagttggatttacttctgtttttttgtcaggaacaatcattatatatttccctttgaactcataagtgaatccactgtctttgagaatttgtgtaagggcgttctctactgttacagctctaagatcaagatttaatacaggcttgttctttaattgggagtcgttgtaacctacagataggccggattgtttttctacttctttaagtgcttcaatgacagatatatttttcttttgaatggtgattgaggcatctgtttgcgcaaaggagcttgttgtaatgagcaacaagcagaaaaaaagtaaaaaacttcttccctttgctgtatggtctactataaattcataaatttgtagcattttcttagtattaggttataaactaaattatttcacggtgattaatagagtagaactctaatattgagaaatttgatttcatatccgggatagagttcgccctctgttccggatacttttttgcatgggcgtataaggttaactaaattaataatattgttatctgtttcttcctgttatcaggatatttttctatttggggattaaatagcagcggtcaccttgtattttataatccatctgacctactacatttactattacatccattacttcggacagcggtgctttatctttaaaacggaagctatatttatcttctttcagattcttcaggcgatactcaaaggtatatggatatttacgttctaatatagttataatctcttttacattcatttctctgaataccagttcgccacgttgccaggctgtgatgtcattcatatcgggagtgtccagctggtattgtcgggtgtgtttatgataggccaactgctcgtttggtttcagaatcatttgagaattcaaatcattatattcaacgagtacacttcctgaaatcaaggttgccgctatgatcggattctcggggtatgcagctacgttaaattccgttccgagtgctgttacctgaaaatcgttcgacttgacgataaacggatgcttcttgtccggtttcactttgaaattggcttcaccaatcagaaatacgctacggtctttaccagtaaattcctgtggatataaaagggtgctttgtgagttcagttgtactttggttccgtcaggcaaggtgagagtatgtacctctgctgtcggaatatattgctgcaataaattgggttccaccttttttcctatggtagaaagatagatggaagaagctgctactataaagaatacggcagcggctatttgccagatatggatcgggcggattctccgtttttctcgtacggaaggaatgcctgcatttcttcttaatagctcgtatgattgatgcaagttaggagctgttcctgatttgtatccttcttcccacagagtttgtaatgcttcatccttttcggaaacatgttcttcgtctaccaaccatttgtagaattcctgtcgggtagatcccggatagtcatttccggtaaataaggctagtattttctgaaaataattcttcattttgagatattaattagatctgttacattaatacctcaattaactaagacagactacttaaggaaaagtgcgaaaaaaaacaaaaaagatatttttttcatttcaagtagagttaaatagatatgatgctctactgttcggactgaaatgttcagcttttcagcgatttcgttattgctcatattttcgaaacggctcatctcaaaaatctttctgcgttgttcgggaagacggtcgagggttaattggatgataagtttaacttctttatagtatatggcattgagaggatcttctgtttgagaaagttcctcaataaggcttttttctatcactttctcctgataggctaattctatctttttgtgtttgataaaattgagggtcgtgcttttggtaagagtatagacatagggttttaaattgggtacttttgtccatatttcgggctgggtccataatttcgtgaaaacgtcttgagcaatatcttctgcgtcttcttcggatttaagcaacataaaagcgaaatattttactaccgaataatactctgtgaatatcattccgaattgttttgctagtaatatgttgtcttggcttgtggtcattgagttaacaaattattggaaatcgaatggcaaatgtaggcaaataaaattaagacgcgaagaaaatgggaattgtttatgaaaaaaagataaataaaaatagtgacgctatccgctgcggataccgtcactatatgggtgggatggtgacggtatcatgatgggatagcgtcactatttttaagtttgttttttaccagtttcttttcactgtacggtaaccataaccgatgattacaaggaagcagatgaagggtagaatgaatgaaacattgacagccggcaaccaggctatttgtttcaggtcaatgatacttgcctgtagcggtggaagaacagagcctcccaagatagccataataaggcctgcagctccaaacttagcatcatctcccatgcctttcaaggcaataccgtagatggtggggaacattagtgacatacaggcggaaactgctactagacagtaaagtccgaagatattctggaggaagatagttcctagagtgaaaacacctccgaagatagcgagaatcatcaataatttgcctgcattgagatagcgcagaatgaatgtacagatgaaacggctgatacagaatatcaccattgccacaatattatattgctgtgataacacttccgcacttttctcgtccataccttgcgacatgaataaacgggttccatactgaatgataaatgtccagcacataatttgcgcgcctacatagaagaattgagcaattaccccttcacgataacgtgtttgggtaaaaatgcgtttcagtgtaggaaagaaatctattctatgattctgatctccgtttttcggcatcttgacgaatcgtatcagaagcaacatcgctacgataaccagtccgatgataagataaggagcaatcagaacactaaggtcgctttctttgatcgcctgaaattcactgtcgttaagcaatgcgcggtcttcagtacacatcggatgcaatttcgcttgaatgaattgcatggctacatacattccgagaagtgaccccatcggattgaaagactgtgcaaggttcaaacgccgggtagctgtttcttccgttcccatagaaagaatatacgggttacagcttgtctcgaggaaggacaatccgcaggtcaggatgaaataggcaatcaaaaacggataatattctcccgtcattttggcggggaagaataaaaatgctccgaaagcatacattcccagtcctaacaaaacaccggctttgtaggaatatttgcggatgaatatggcagccgggaaagccattgcaaagtaccctccatagaaggcaacctgtaccaatgctccgtcggtagcactcatccggaaaatcttggagaatgcctttaccatcggattggtaatatcattggcaaatccccataatgcaaaacatgaggtaatgagaacaaaaggtataagataactgatgccatctttcgagaggatggactgtttggggtatttcatggttgtttctggtattttttaagtgttatacaaatggaacattctctccatcggtttccatttctctgcggaactcattccgggagcggcttgttggaagatggccatatattcttcccactcctgttggcggggaagcgtgttcaggcgttccattgctgtgtcccagtcaaaatcaaggggagtttcgacaatcataaacagtcgtgttcccaagatataaatttccatttccagaataccgacttcccggatcccggctaggatttcgggccatgcttccgcctggctatgtcttttccgatattcagcgatcagttccggagaatcgcgtaaatcgagggtttggcaatatcgtttgacgggaacgtcataagattgaacctgataaccggttttgggtgtttccatatacttttattttttagggtaatatacttgtggggtaacgctacgagttacaatctctctcaattcacggagatcggctatttctccttttgccatagcctgtgtcagaatgtttcccattgcagtagcttctaccggacctgcataaacgggaataccgagttcgtcagctgtcagttggttgagtaattggttttgtgatcctccgccgatgatgtttagctgacggatcggagaggggagacaacggttgagctgttccaccgcctgccgatatttgaaagctaatgactggagtacacatcgcacggtttctgctttgtttttcggcacttgcaaagcatgatgccgacaataatgaataagagcgttttccatattttccggattcatgaatgttgcgtcatccacagggataatggtcgcaatctgtgcttcggcagcttgcgggatgattatatcataattttgttcttcgccacatgctttccattcactcatcaagcgttgcaaaatccataatcctgttatattctgtaggaaacggattttgccgtctacgcctccttcattggtgaattgagcttttcttgcttcttccgtcaatatgggttcatccacttccactcccagtagtgaccaagtgccggaactaaggaaagcgataggattttctacggcaggaacagcggcgacggcactggctgtgtcgtgtgagccgacagcaataacgtctacgatacccagtcccgtttcgcgggcaatatcctctttcagagtccccctgattgttccggggagaataatctcgccgaacagatgttcgggaagacctaaggcgcgtatggtatccactgaccagttccgcgattgggcatcgagtaattcggaggtggaggcaatgcaatattcattattggctactcctgtcaggaaatagctgaagaggtcgggcatgaataacagttgccgggcaactttcaactgtgcatcttgatgctgtttcatgctgtaaagttgaaacagcgtattgatagccatcacctgaataccggtgtcggcatagtgttggcgttcatccaatagcttgaatacttcttccggtattccttctgttcttgcatcccgataacagactggatttcctaacaggtttccatgtttgtcaatcagtccgaaatccactccccaggtgtcaataccaatactttttacggcatatcctttttgtgcagccagtttcagtccggttttcatatcttcgaacagggccgggaaatcccagtagatatgatttcctagtttgacctgtcgattggagaaacggtatacctcttccaactccagtttgccatggtgaaggaagccggcgataatccgtccacttccgcctccgaagtctgctgctaaataagtgtgtttgatggtatctttcatggtatattgcccggatattagttggttttctttcctaatacgtagatttccaggtcttcaatttctgccggtgtgagtactgaataatcaccgccggattgaacgatgatgcggcaagccatttcaaagaaggtagcccgttcgtatacttgatcgaagtcttttccgcataccacttgcccgtggttggtcagtaaaaccgagttatgctttagcatggcttctaccacggcttttgccagttccggtgagccgggacgataatacggaatcacaggtatttccgaacctacatgacagggaatttctgctgttacattgaagtttgtcggtttgttcttcatgcaggagacagccgtggcatattccgattgaaagtggagaacaacattgacgtccggacgttcgcggagaatccctaaatggaatgtactttccatagaaggttttacaccattggtaggagtgccgttggcaatatggcagatagatactttctctttgccaagtgtgggaacccaggaacccgtaccggaaatcaatgcttcttcgccgattctccaggaaaggttaccgctgctgcaaagcattaactttgcatctccgtaacggtgtgcttgttcgatgaactgttcgatatgttcgttggtaatcataattgcaaagataaaaaaattagaattaagtgagtcgaaattgcttttatttagacataagaacaaaagaacataaggtctgcgctaatagaattatttatagctatttattgaagttgttttatcttttgtccttatgttcttttgtctgaattaaaattatttgtagataggaccgtaagtggtacaagctctgtaatcccctccttccttatccatgccgaaggcgttccaagctgccggacggaatatttcgttgtcttctacattgtgcatgcataccgggatgcggagcatggaagcaagagtgattaagtcctgaccgatgtgtccatagctgatggctccatgattggctccccagttattcattactgaatatacatctttgaaagcaggtttttcacacagacgcggtacaaaccaggtggtaggccatgtcggatctgtacgcatattgagtttctggtggatttccgggtctatttctactgtccatccttctgcgatttgcaggacagggcctaagcctttaatcaggttgaggcgcatcatggttacgggcatgccaccttttgacaggaagttggaagagaaaccgccgccacggaagtagtcacggtctgccggataccaggtagttgctttcaggcagttttctacatcagcgtctgtcaggttccatggttctttcataaccggattgcctgccgcgtctaatgattggccggaaccgtcgagagttgttgcgccggaattgataagatgaatgataccatttgctgccaatccgctcaattctttgccggttacacgtttcacggcttcaggactccagtaagtacgtacgtcagagaatatttgggcgcggttggtcaataaatgtccgaacagcatagctacgccgttgcaggcatcgttctcggtagctacgacaaatgcttcacgaataccgttccagtcaaaagaagtattgagcagagcttccggatagtcaccattaggatagaagtctgtccattggcgttgtccctggaaaccggctgcaatggcattgtgtcccaaggcttcttccttgaatcccatttctttcaatttgggatttccggtcatcaagtcgcgcatgataatcgtcatctttacaatgaattcccaatcagcatctttctgttcacgggttttacgtttttcaggacggttcttgaagtcttcaccttcatttgtcttgcaatttttttcagtccaggccatggctttggcgtattcttcgtggtcatagatgccttcgtccattcgacggatgatttctgtgaggtctattgactcattacgcattcccagatactcttggaagaaatcaggattaacgatggaaccggcgatacccatagatacactacccattgacaggtaagatttgcctctcattgtagctactgcctgtgcggcacgtgcaaagcgaagaatcttttctgatacatcttcagggattgtgttgtcgtccaaatcttgaacgtcgcgtccgtagataccgaatgcgggaaggcctttttgtgcgtgtccggcaagtacggcagcaaggtatacagctcccggacgttctgtgccgttgaagccccagacagctttcggataatgcgggttcatatccatcgtttcagcaccgtagcaccagcaagaagtaacagtaatggtagaaccgaccccttctctttcgaacttctccgcacaagcggcactttcggctacgcgtccgatcgtgctatcggctataacacattccaccggactgccatcaccgtttttcaggttgctgctgattaactcggctactgcttttgccaaattcattgttttctcttcaaggctttcgcgaacgccaccctggcgaccatcgattgtgggacgaatcccgattttcggatactttttcatggtttctatctattaaaggattaattaatatctgtgctgaactgtgctgatgtcttcgcaaaaaaaattaaagcgactttcgaagtcttacttccgtcggcaagaacttctgcaccggtacattattgagaacaaaattggccgcttcatttcccatcatttcccaatcaatactcaatgaggttattccttcgtcaatcacttcataggaaggaatatcattgtaagccaataggccaaaatcttttccgcatttcagcccttccaatcttccttgtttcaccacctttactacgtcttgttgtttgatggcgatataggcaactcccttacgtacaatcaggttctcaatatcctcctgtatttcacagagaaatccctgttcctggcagaaacgggtaaaatacaccttactgctttgggggtgcttcaggcttttgggaaacagaaaaacgagctggcgataattcttcaacttttccttgagctgattcaatgcctgaaagaaagattcatcaaaatcctggcagatatatgaatacttttctttttcaaatttgccgaaatcgagaagtaataatcttgaaggattaattttattgagaacagtgctgaatttctcgttatcgaaattcatcacgatgtatttgttgtatttcccgatggattcccggaggatcgtattgaacaaccgttcgttgtattgatgaaacaataagtctaccttatagttaataggcagatgtctgacgaaactattgtataaggcttctttgaaaggagtatattggtcgagcagcaataaaacattggtcacctggctcgttacataatagcccttgccgggagtggagtcaatcaagcctcgttcgcgtaaatcaaggaaagccttgaaaactgtatcacgtgatactccgtattgagcgcttaactgattgatggaaggcaaagaatctccttcaagaaattctttcctggaaatcgcttggctaagtgcgtccgctagttgcgtaaccttgcttgcctgttgtccgaatgttgcctttttatcagttcgtttcatattcgaaaaataagtaatactatgctgaactatgctgatgcaaagaaaggcattttattctgaacggaataaataatttgatatgttttatagcagaaagtaataaaaaaatcccctccggcggaccggagaggatttattgctttttcctaatttcttgttcggaatctgctgaaaattattcagcagcagcttctgttgcaggagcttcttcagccggagctgcggcagcttcttctgcaggtgcttcagcagcagctttttcagcagcttcagctgctttcttttcagcgagtgcttttgctttcacttcgttgattttcttttctgcttccagacgtgctttagcttcagctttcttagcttcatcttgtttagctttcaaagtagccaaacctgactgtttgttgtttttccaagcttcgaatttagcttctgcttctgcttctccgaatgcgccttttgctacaccgcccagaagatgtttcttcatgtaaactccttcacgagaaaggatgttacgtacagtgtcacttggttgtgcacctttcagtacccatgccaatgcagcgtcgaaattcaaatctactgtagcaggattggtgttagggttgtaagtaccaatcttctcaataaatttaccatcacgtggtgctctgctgtctgcaattacaattgaatagaacgcgtaacttttacgtccgtgtctctgcaatctgattctagttgccattttaaataattgtttttaatgattgatttgaattatgctattatctcgtaatagcgggcacaaagatacggcttttcttttgattgacaaacatttcgtatcttttttatgaataccgtttcggatagcggaacaagattgctagtaaggcgcatgctcccattgtaaacggataatagagattgccgatgatactgatgggggagatactggcgagtcccgctgcaatcagcatctgcgctccgtatggaataatcccttgtatcaggcaggagaaagtatcgaggatactggctgtttttcttcggtcaagatggaatttcacggcaatatctttggcaatcggtcctgttgtaataatggcaatcgtgttgttggcagtacataagttggcgatacttaccagggctgcgatgcttaattcggctcctcttttaccattgacgtggcgggtgagtttccggataatgaaatcgataccaccgttataacggattgtttcgagcatccctccggccaacagggtgataataatcagttctcccattcctgtaattcctgttcccatggcaccaaaccagtcgaagatcccgaagctgccggtcgcgatgccaatgatgccacttgtcaatatacctattatgagtacgagcatcacgttcattccggcaatggctgttcctaatactattatataaggtataactttgatccattcaatggtctgtgtttgggtgggggctgtaatggatagtccttgaaatatgtaaattcccaacacaatgatggctgccgggacgacaatcatagaatttacacggaatttatcacgcattacacattcctgggtttttgtcgaagcgatggtggtgtcggagataaaagataagttgtctccgaaaaaagaaccgcctactacgacggctaccataaaggggagagctatttcagttttttctgccagtcctacggcaacgggagtaagggcgacaatagttcccacactggttccgatggataaagagatgaaacaggcggcaataaagatacctgccagcaataaattgtcaggaagaatatgcagcgtcagattgacggtggcatcgattgcacccatttgctttgcgctttgggcaaaagctccggcaaggatgaatatccatatcatcaggaggatattcttattggcagctcctaccgagaattgatagatacgctggtccagtttcaagccgcgtgtaatggcgatggcataacaggaagagacgaggaaagccactgtgataggtactttataaaagtcgttgacgaggatggaagttaccagatagaggcaaaggaatacgagtaacgggcttaatgcccaccagtttccgggacggtctttatgtattttttcttcagtcataaatgaacgttgggtatttgttttattctaaaatcaaaatagcgatgcaaaagtagtgtttttcacaggaagtggcaaaaaggaagtcgaaagaaggcattatttcattgatctttctatagatgagggagacactccatagaaaaaaagtataacctgttcctactattgataagtagggcaggttctttttattatttcttattgatttaagcgcaagggatgtgtgaaccagaaacggctgccgactcctatttcggattcggcaccgatagtgccgccaagatgttcgatgatacttctgcaaatagatagacctaagcccgtgccttttgaaaaagagttgagttttacaaatcggtcgaacacctgatctactttatcgggtgcaatccccatacctgtgtctgtgacagcgaattctatctcattactttctgctttatggcgatattccaacataatctgcccttcatttgtaaatttgagagcattatttatgaaattggtaataacctgcattaaacgttttttgtctgtgtaaatataatattcaggtaaatccggagccagcaaaacgggtacgggtttatcttcttttatatcataattgcgcattatatcttcgcagaagctcttgatatccaggtgatccatggtgaagtcgagtgttccggcttctattttcgataaatcgagaatatcggaaatcaactgcaaaagaagttctgtgttttcctgcataatgtcaacataatcctgacgttcttttttgtcgtccgattcaaccaacagacttgcaaaaccaacaatcgcatttagcggagtgcggatttcgtgactcatgttagcgagaaaggctgattttaagcggtccagattttctgctttttctttggctactcttagttcttcttcaatcgttttttgatggttgatatcgacactggttataacatgtgctatttgtccgtcaatccaggcaaatgctgcgctgaatacccggaaccaacatttgtcaaacgggcgttggtagtcccaggagtagactttggtaggttgcccgttttcgtcaatcaaatgttttttaggacaaaattcacattctccggttttatctttataaagagcctgccagcatttttttccttcaaaatgttcgatgcctccataaggagcggccatagattcattgacatatagcatatcatgagaatcaaaagagttcacataaatgtcaactcccatattattcatgatgctgcttaatgtcttgcttgcccgcacttctctttctttatattcccgcactgctatttccttggagagggagcctaaaatgagatgaatcacttgaagttcttcatcggtgaaggatattgcatgttctctgtctccaaatccgatgaatccgataattttcccttcggagtcttggatttgccggattagtaatgagtcgactttataaaaatccacgatgtctacatcattccaagaagtattttggtttctgcaagcataaaaaggtttgttctttccatttatgcgcgcagcatgttgattggtcatttcgctgatttcaaaacgttgtcgcaggatgttgtcgctatttccgacagtttcctttaggtaaaagtagcgaaatccatcagtttggtaaatgaatcctcttttaaaaccatagtattcgcaaatatccgtaagtgattctgtgattttgttttcaatagattcacagccattcaatctttctaaaaaatgaagtaaaaatgcattataattttctttttctctggtcatattgttttaggcatcttgtttggttatttaaattcgaaaggagtatgctgtttatctctttcaaatcttcaagctgctaatatacggacttttttaaaaatgatgaacgctgtttcggatttttgtaatgttccgtttttctttttcttggtgcgaaaagataatgtaatatatgatatttccgttggattttagttaactaacaacagtattttgagaaataaagaggtagaattgtacggatttattaaataaaacgttgtttggggaagttagtcagtcttagaatttttcgaacttgtaagtaattgattactaatgcataataaatggtgtgtttttcctttaaaaccaatgggtcgctcctttaaaagaaacgacccgttgcacaccgagaaacacaccgttccttttaaacgaacgtgctttttcatcttcggatacgtgaatttaaataataatgtttatatttattgttttatatctgcgcagccggcattattttaatgcttcggtaacctgcggcatcattgtccaaatagtattttcattttgagcggtgaagaagttaccatctatctctgatttctcatcggtagctgttccgttttgaatagctgacttggctaatgggtgaactgctactttttttcctttggttataccggtaaagtcaaacatcattgcaccggcacaatgtccgatcatcattttccctttatccccgaacgttttaatgacttgcatcaaatctacattataaggcttatcggcattctgctgaaatacaggcactgcatcgccacaagagaaaacgagtgcgtcaaactcatcttcgtgtcccttcaaattagcaatcacatcatccactgttaggttgattcctgaatttgttttaatctccttcgtatccgatacggcaaatactttatatgaaatgccattctcgaaaaatgcttccaaatattggaataatccacaaccatttaccggattcactgctaaaactgcaactttctttgccataatcataattatttaaatgaaacaatagttattattagtaagtttattacttttgtgatgcaaatgtatctttcttgtttgagaaatgcaataacgtacttgaaaataaggaagttacatagaggtaactattgctgaaactcaataaaatacaaaacgttaaagaatgaaaaactttcatccgacggggaattgtccgataagagatgtgcttagccgcttgggagataagtggtcgatgttggtgcttattacgctgaacgcaaatggaactatgcgttttagtgatatccataaaacgatagaagacgtctctcaaagaatgttgactgttacattgcgtactttggaatcagatggattggttgaacggaaagtatatgctgaagtacctcctcgtgtggagtattgcctgacagatacaggtggtaccttgattcctcatattgaaggactggtgggatgggctttggagaatatgaatattattttggaccataggaaaatgagtcggtaacatttttattttgtgacaaaatagaaaatatggagataaaactagtaacttcagataaaaaagaattccttgatttattactcttggctgatgaacaagaaagtatgattgaccgatatttggaacgcggtgatatgtttgttctttatgatgacgggttgaaagctctttgtgtggtgacacgtgagggagaaggtgtttatgaaatcaagaatattgctactgttcctttcttccaacgacaggggtacggaaaacgtttaatagagtttttatttgaatattatcaggggaagtgctctgaaatgttggtgggcacaggagatgtgccttcttccagatcattctatgaacattgtggttttgcgatttctcaccggataaagaatttctttactgacaactacgatcatccgatgtatgaggatggtgtgcagttggtggatatgatatatttgaagaaaacattttagtgtgta

SEQ ID NO: 8096 - DNA, 23747 bp, Unknown
  gut microbiota DNA sequence
aagaagggcagactgtttgagcgtagcgagtttctgccctttagcgaagtgaaggaagcgagtaggagaaaaaagtcagccttgaatttttctttgcttctttcttttgtttcaagacaaaagaaagatgattgtaatacaattgtaacatgtatgacacctccctgcaacgtcaaatcccgtcctttgcaactggaaacaacatacacatattatttatggagactatttatttatgcattatcatcttcctcttcgtccttgccgtcttcgatttgatagtcggagtcagcaatgacgcagtcaacttcttaaactccgcggtaggtgccaaagccgcttcgtttaaaaccatccttttcatagccggcgtcggcatatttattggcgcctccctatccaatggcatgatggacatagcccggcacggcatctaccagcccgagcacttctactttgccgaaatcatgtgcatcctgttagccgtcatgctgaccgacgtagtactgctggacgtattcaactccatgggtatgcccacctccactaccgtttcattagtctttgaactactcggaggaaccttcgccctctcacttatcaaagtacataatagcgacaccctcggtttgggcgacctcataaacaccgacaaagccctttccgtcatcatggccattttcgtatccgtcgccatcgccttcttcttcggaatgatcgtacaatggctggcccgtgtgatattcaccttcaactatacgaaaaagatgaaatacagcattgccctcttcggaggtgtagccgctaccgccatcatctatttcatgcttatcaaaggactgaaagacagctccttcatgacccccgaaaacaaacactggatacaagacaacacattgatgttaatcgccgtcttcttcgtgttcttcaccgtactgatgcaaatccttcactggatgaaaattaacgttttcaaagtcattgtattgatgggcaccttcgctctcgccctcgcttttgccggcaacgaccttgtcaacttcatcggtgttcccctcgcaggcttctcctcttttatggactataccgccaacggaggaggaaatccgaacggattcctgatgacctccctgctggggcccgccaaaaccccgtggtatttccttatcggagccggagccgttatggtctacgccctctgtacttctaaaaaggcacatgccgtaattaaaacatccgtcgacctttcccgtcaagatgaaggagaagaaacattcggaagtaccccgattgcccgtacagtagttcgcatcagtatgacacttgccaacggaatctcccgcattatgccaagtggcagcaaagaatggtttgactcccgcttccgcaaagacgaagctatcattgccgacggagcagctttcgaccttgtccgcgcttctgtcaacctagtattagcgggtctgctcatcgccttgggaacttccctgaaacttcctctttctaccacctacgtaaccttcatggtagctatgggtacctccttggccgaccgtgcctggggacgtgattctgccgtttatcgtattaccggcgtattaagcgtcatcggtggctggttcatcactgccggagctgccttcaccatctgtttcttcgtagccctcgtacttcattatggaggaaatatctctatcatcgcactcatcggtatagctgtattcattctgatccgtagccaagtgatgtacaaaaaacgcaaagcgaaagaacaaggtaacgaaactctgaagcaacttatgcaagccacagacagcacagaagccctgcaactgatgcgtaagcacacccgcgaagaactttccaaagtgctggaatatgcagaaaccaacttcgaactgaccgtcacttctttcctccacgaaaatcttcgaggactgcgtcgtgctatgggttccacaaaatttgaaaaacagctcatcaaacagatgaaacgttccggcaccgtagccatgtgccgcctcgacaacaacaccgtactcgaaaagggactttattactatcaaggcaacgactttgccagcgaactggtttacagtatttctcgtctctgcgaaccttgcctggaacataccgacaacaacttcaacccattggatgccattcagaaaggtgaatttagcgatgttgcagaagatattacatatctgattcagcaatgccgtaagaaaatggaaaacaacgagtataacaatctggaagaagaaatccgtcgtgccaacgacctcaacggacagctttcgctattgaaacgtaaggaactgcaacgcatccaaagccaatctggaagcatccgggttagcatggtatatctcacgatggttcaggaagcacagaacgtagtcacttacaccatcaacttaatgaaagtaagccgtaaattccaaatggagactgaaatgccgtaaaggctgaaaacgataacgttcttcactggaaaaaacgaatgataactcgaaaggaaaggactgtttgataaaccctatttatataagtgagggcatgtcaaacagtctttatctttttagaaagtggttggataaaaaagctctgttctttagcatttgatttgataaaattgtatatttatagtcggtaagatatttgagacgatttaaaatgcaatggtataaaaatgaaatgaatgaaatatcaattagaaataaccactttactggttcctgtcaatgtgcatcagttgtttgagaaatgtgaatggcccgaactaaacagttttgacaaagaaatggttgagaactatttctctgatttggtaaatggcattcaaaccgatgaggctttggacgattggaagctgacggttgtcctttatatcggtacttatttgggagccaatcatatcagtatccggaaacatggaatcaccgatacgacaacaaaagaaaaagtgttgacgatcggtatacctctcccttgcagtaaaaccgttcgttggggagtgaagaagaaagaacgttttaccggtaaaataccggatgaaaactataggagaaataacaggctgcttcccgtcaactttgcgaaatatgatactataggaacctatattgaagataacatccagatagcccttttgaatttgtttgaagtaggttttaccttgaaaggatataaagtaaagaaacggtgatagtaactgaatcgtaatcaaacttccttttcatagggattaaacttgcttatcccggcaggaaaacgtatctttgttggtaagaaaactataaccgcaagttctgattataaaaccggaacttttgattatgtaatcagaagtttcagttataaaaccagaacttgcggttttagtttgccctaagagaaaaagaacttttcttctaggggagaacaagttttctacctatagcaaggatgttttctattagtaatcaatatttcaaataaactttagtactatggcaatgtatgtaatggaagaaatgcccgatatccatggaacgggcgaacaagtactttatccgcggtttgcaatgatggatcaggtttctaccgaggagctgatacgtcagatagcatccagcagtggttttaatgtcggagatgtggaaggcgtaattacacaaataggtattgagatggcacatcagatggcagaaggcaagtctgtgaagctggatggcattggaacattctctccttcgttggcgttatgcaaagataaagagcgtgaaaaggccggagaaggcgaaactcatcgtaacgcacgaagcattgtggtgggaaacgtgaactttcgtgtagacaggaagatgataaggcgtatcaatggaagatgtctgctggaaagagccccgtggaagtcgcaacgttcttcacagaagtatactccggagcaacggcttgcattggctgtcagatatttggaggaacatccttttttgacagtctacgaataccggaagctgacaggtctgctgcgcacagcggctaccaatgaattgcgccaatgggcgtatacgcctggttccggtatcgggattgatggcagaggaacacatcgggtgtatataaagaaaacataattcatcatatttgtatgatgatactttgagattttgaattaagagcattggggggaattgcggtgagggcgcttttcttcagggacgtgcttgagtgataactaaaattaataaaaatggggaatttgatttcatttatgaaggaagtagctgaagggcttcgaaaaagtgggaattatggaactgctcatgtttacaggagtagcatgaatgctatcattgcatttaacgggagcaggaatctgtcattcaagaaagtgaatcaggagtttcttaaaagttttgaaacgtatttgcgggaaaaggattgtagttggaacacggtttcaacctatatgcgtacattgagggcggtgtacaaccgcgcggttgaccgtcgtatggcatcttatataccgcatcatttccggtatgtttatacaggaacgcgtgctgacagaaagcgtgcactggaaaaggaggatatggaacgattgatgaaagagcttcccaaacaaattcatcagggaagggaagaattacaacgtacgcgcgcgtacttcttcttaatgttcatgcttcgtggtatgccgttcgtagatcttgcgtatcttaaaaagcaggatatggtggggaatgtgcttacttatcgtcgtagaaaaaccggacggcttctgaccgtgacgcttctgccggaaactatgaaactgataaaaaagtatatgaacaccgattctgcttctccttatctttttcccatactgactggcggagagagtaccgaagctacctacagggaatatcagatagctttgcgtaattttaactatcagcttctgttgttgaaacaagtacttgcattgacttctgatttaagctcatatacggctcggcatacttgggctacaatggcatattattgcgagatacatccaggcattatttcagaggcgatgggacattcatccattatcgtcacagagacttatctaaaaccttttaagaataagaaaatagatgaagcaaatgtgacgattctatcttcgctgaaaaggagctatgtttgtggcaagtagctgattgatagtgctgttactttgtaggtaacgggaagaaaagacgctgcaaatatgagcatatttcttaaaacatccaaacaaaatcgtacattttttctaataaactactcaaaataggaataaacacagaagaacacgtggattctttgtcttagagctttgttaacgtctaaattttgcaatagatttcccgcccctctactttttctcataagcaggggtaagaagattcgtcatatatcgtattattttctagtatagactactctaaaagagcaggcacaagggttttcccgttacctacaaagtaacgggaagagggggagtgaagcgaaataaatcatgaattagtacaaacaaattttttatttattaattgtataacatttaatttacttttatgagaaaatggacgtatttagtcgcaaccttgctcatggcaggtacgacggcgacattcacgggatgtattgataccgatgaaccggaaggcattgcagaacttaggggagcaaagtctgattttatcaaagctcaagctgcagttgagcttgtagaggctgaattgagaaaagcacaggttgcggagcaagagttagttaatgcaggtttggcacttcagaataaatctgcagaaattgatttgcagttgcatgaactggatattcagttgaagcaactcctgattgaaaaggaagaagctgctactgcacaagcaaaagcagaagcggaagctgccattgcaaaagcggaagctgacaaaactaagtgggaaaatgaaaaggcattgattgttgagcagtataaggaaaaaatgcttcttgccgaaactgccactgctaaagcacaggaagcttacaaacaagctatggaacagattgaagcttccaagttgttgctgacagatgaagaacaattacgtttaaatgttgtagaggcaaaggttgcttatgctaagatagctatggataaggctatgtatggatattcaacgacagaagttgagactgaacaaagacttgtatctaaatcaacaagttcacagacaagtgttggcgaaggagctggaacaacaactactactggtactgatgaaaagtatattacatattatgtaattacacaaaatccggataatgcaaataacggatatgcagaaggcagcttgaagaaacttcaggaacagttggcggactatcctaattgggtagctgatggaaacatcgaggctaaattgaagaatgctgtggaaatcgctgaatccaatttgaatatagcacaaaaaacagctgatggatataaggctattttggataatgaatatactacattagctgattgggaaacagaggttaaaaagctgaaggatgaaatggcaacattggatgttcagaaacgacaatatgaacttaaaaaagaagaattaaaagttgctaatcctaacttagaaaagaacaaaactactgcagagaaaaaattagccgatgctacgggtgctcttgataaagttaatactactactaatgtagcttctgcttattctaagaaagcagatcagagcattcttaaaggcttgaatgatgcttttgatggtatttctggtggagtagctggctataataaatcaacaggtgaattcagctatgcaaaaactgtactagttactaaggcgcaagaacagattgatggctggaataaacttattgatgcagctactcaagggattgatttagaagatcttgcatggtctaaacttgaagtcgtgaaagcagatgctgaagcaacaaaagcgaatgaaacttacgatgctgactataaggcgtgggagaaagctcgcgataaatatattgaagttgaagctattgatataaatgcttcaaaaaaagctgccgaaactgcaatagctgcttataataaactgggcgatgctgctagaacacaggatgctaatatcagtatattagctactgccttggctgaatactatcaggatgctttggataaagagcttaaaagtacaaaagcagaagcaacagaggcttctaccaatactaaaaaagcaatttctgcttggataatagctaatcctttggcaaacttcaagtcaattgtagggctagaattaaatttaatagaatggacagccggtgctgtgacaaaagctaataaaatagaacaagctaatgcaaacaagcttcttgaacttggagcatctgctggtgatgttccatatgactcatggaaaaaagcttcaacaaaagtgtttggtgataactttaatcgtgataatgaacctagaagggttgctgtgtcagctgatatggttcttaaggaagttgatggcaatagactggcaacagaattgcaaaatggtgactatggaactcttggtatctctatttatgctacggcagaagctgcacgtctgacagctgtgataaatcaggctgatacctataaagctttgaaagcagagtttactgctcaaaaagctaaagaacaaactacgctggataagaaaaaaacagaattggctgcaaatgtaacgaaagcagagactgctttggctgatgctaaaactgcttatgataaaatatttaaggaagtagaggcaaatattaagaaagttagtgaggattatgactataaagatgctataaaagataagattgagtctacaatttctgaatatattgctagccttgatgagttgggtgatgattataaagatatgactttggaggaaatcaaagaagctattaatgctgaatatttaaaagctgttactagccttcttgataaaaaagcagctttggctactgctgaaagaaatttagaaaagttggccgaaggtacttatactgataatgattatatcaaggatacatttgcaaatatccaggaaaagatcaaagtaaaacaggctgaatatgatgctgccaaggcagactatgatgctgcaagcgctcaattgaaagcacttcttgctatcttcttgaaataattccctaactacgtaaaagtaacaagatgataaaaaaactatgcacattacttttgctgacctgtatgacagctgcgccttcaatggcgcagcattacagcagcagtgatgatgcgtcgtttgccccgaagaaaggacagtggcaggtttcagtcctgcttggtagcggaaagttctttaacgagaacacttcttatctgcttcccaagttctccaatgacggaggagtagtcggacttcccaatggagggaaggataactccggcgatctgaaccgctatctgaacatcgggagtctgaataataatagtctggtcaatatagccggaattgaaggtaagtattttgtgtctgacaattgggatgtaaatttccagttcagcatgaacgttagcctcactcctaagaaagactatgtagaaggagacaacagtgtacctgacatgattatccctgcgcaaagttatatcaatgcgcagatgaccaacaactggtatgtatctgtcggttccaactactatttcaagactcgcaacgaacgtattcatccatatctcggaggcgcactcggcttccagatggcacgcattgaaacgatcgaaccatacaccggagacacctacaaggatagtgacgactcggaagaacttccgtcacaggtctatgtttccggaagtaaagccggtcagatgtacggtttcaaagtagctgccgtagcaggtattgagtatagcattgccaaaggttttgttttcggtttcgaaatgcaccctctggcttaccgctatgacttgatacagatttgcccgaaaggatttgataaatataacgccagtcaccacaatatcaaaatatttgaaatgcctgtggtgaaactgggattcagattctaaggatgaatgattatacaaatgtatgaatgaaaagagaaagccgttcagctgatagtgcggacggcttttcttttttaaagaagaatgaagagcttaatgaacagatatgtgaaacttttatcttttcttccgggaatatgtctgatagtggcttgcaccgggcatcagataaaaggttacgagattaacggcagtgcacctttgcccgaattcgaaggaaaaatggtttatatgaaagatgtttcgagcgggcagccggtagatagtgcagaaataatccacggaaagtttgatttttccgatacggtgactattgtgtcgcccgtagtaaaagtgctttctattcgtgccagcaaatcgggactggaataccgcctccctgttgtgatagaaaatggtagtatccaagcctatatttccgatgtggtttgcacaggaggaacaatgctgaatgaacgaatgcaggattttctcatggctgttgatgaatattctacagcctgcgagaacaagcaaacggaacagataaaatccggatttgcggatttattgaaaaaatacatagaaatcaatgatgacaatgcagtaggagaatatattcggactgcctatcgttcatcactttgatgcaatcagattgcttttaagactataaactaaatttcccacataataatatcctctccagatatttcctccatatttttatagaagggaatgttgcataagagagacagaaatgcgcccttgtgaaagtccatatttctgtattgttatgttttgaggacgttcccgtatttcccattccctttttcccccgggaacgtccttttcaatgaccttttgttgtatatctcatataacttacactgtatggaagaatctagtggatctgtactattggtaacttttcatacaaagatagtgttttttacaaatactttatatctttgcaaaacaatggcatatgccgggatttaaccataccactgaaaatatgaaaacaaaaactttattaggcttctttcttctttctgttatggctttttgtgtatcagcctgtcaagatgatgcagagattatcttatttagtggttccgaactggttgacgaaacaggaacttgtacaaacactgtttcttctacagtcttgtatcttaacggatgggaagcggagaatatcgggatagccaatggaaaaggtggctactctgcacaaagctccgatgaaacaattgtgacagcaacagtcatcgacaaccgattatggcttagttcgcatggtaaaaaagggaaagtaacggttaccgttactgataaggatggtaattatgtcaccctgcctgtgactgtttcttatggcgtattgacatttatgtgcgtcgaccaacctgaatttcaggtttccagacccagtgaagatatgttgtcattggattcggaaagcgagttgcaggaaaaagtaaatgtggcaatggctccttattcttttataaataaaggagatatctgtattttgcggccggatgatgtatatcatttatctgaagaaggaacaggagggaaattcatttataagacagaggatgagcaaattcttgttgaaggaacataccagatagagtgggcttcattgggtggaaaacagaaaaaggcttttgtctttacatatatagataaaaataatgtagagcaacaacacacgttttttaattttagtccgtatttaggaactcaaagttctacaagagaaagaggaccgattactacggcatggttggaggaggtatccgattcaccttatctggaaggagttctgccagcggatagaacagttgtatattgggtggatacagtgatttccagtttgtctgccgaggatttataatcatccggaaggatttatcggttcacatttgaaatgattctcttcgaaattaactttctttttgtggtaaataaaaaggcacggaaaatctttcattcccgtgccttctctttgtatttgatacctttacggtattgttatgcgttcaaagcctgttcgatatcagcaatgatatcatccgcattttcgatacctaccgataggcggatcaggtccggacgtacaccggcttccatcagttgctcatccgtcaactggcggtgagtatggcttgccggatggagcacgcaactgcgtgcatcagctacgtgagtaacgatagcgatgaattccagtgaatccataaacttgatagacacatcacgtccgcctttcagaccaaaggagatgactccgcaagaaccgttcggcatatatttctgtgccaggttgtaatatttgttgtccggcagaccacaatagtttacccaagcgactttctcatttttagaaagatattcggccactttctgtgcgttacggcagtgttgaggcatacgcaggtgcagtgtctcaagtcccagattcaataagaaagagttttgcgggctttggatgctgccgaggtcacgcatcagttgcgcggttgctttggtgatataggcacctttgccaaatgctttcgtgtaagtcagtccgtggtaagactcgtccggcgtacaaagtcccgggaatttttctgcgtgagcatcccagtcaaaattaccgctatctacgatacagccacctacgcttgtagcgtgtccgtccatatatttggtagtagaatgaactacgatgtcagctccccattcaaacgggcgacagttgataggagtggggaaggtgttgtcaacaatcaaggggaccccgtgactgtgtgcgatacgtgcgaacttttcaatatccagcacttccaaagaaggattggaaattgtttcgccaaacaaagcctttgtgttcggtttgaaagctgcagaaatttctttttcactggcatccggatttacgaaagtcacatcgatgcctagtttcttcattgtcactccgaacaggttgaacgtacctccataaatagcggaagaacaaacgaagtgatctcctgcctggcagatattaaaaatggcatagaagttggcagcctgaccgctggaagtcagcatagcggctacaccaccttcaagagcggcgattttggcggcaacggcgtcattcgttggattttgcaggcgggtataaaagtaaccactgtcttccaaatcgaacaggcgggccatctgctcgctggtatcgtatttgaaagttgtactttgatagatgggcaatacgcgtggttcgccttttttaggcgtccatccagcctgtacacacagggtttccggtttgaattgttttgccataatgttatcgggttttaatgttttatttcaaaaaatgttttaatgctgcaaaagtagggaaaataattgtatttttgccctgtttatgagtgaaatgataactcttgcgaaggagatagttaatgtagttatgaaaaataaactctatattcttttattcttagcttttcttttttcgggcacaactctttgggcgcagcagaaggcaactccgaaggcgggtgagggcatctcttcttttctgttgaggcacaaccgttctccgaagaagtattacgacgattttatagagttgaataagcagaagctgggaaagaataatgtgcttaaagtaggcgtgacttatgttattcctccggtaaagaaatcgacaactacttctgccaagactactcctgccaaaaacacgggtgccaagaacacaacttccgaaggcgccgggacaaagcaagcatcttcaaaagctaaatcgacaaaaataggaaccaccatcaacgaacctctgtttggaaagcaactggctaatgtgaaagtcacttccaaccgtcttgccggtgcttgtttctatgtggtcagcggacacggaggtcccgatccgggagctattggaaaagtgggtagatacgaactgcatgaagatgaatacgcttatgatattgcactccgtctggcacgtaacctgatgcaggaaggagccgaagtgcatatcatcattcaagatgccaaagatggtattcgggatgattcgtatctgtcgaacagtaaacgtgagacttgtatgggggatgcaattcctttaaatcaagtgcaacgccttcagcaacgttgtgataaaataaacgccctttaccggaaagatcgtaagaatcattcttattgcagggcgatttttattcatatcgatagtcgtagtaagggaaaacaaacggatgtctttttctattattcgaataaaaaaggagacagcaaacgactggcgaataatatgaaagatacgtttgagtcaaaatatgataagcatcagcctaatcggggtttttccggcacagtgagcgggcgcaacttgtacgtgctttcccataccactcccgcttccgtttttgtggagttgggcaatatccagaatacgttcgatcagcgtcggttggtgataaactccaatcgtcaggcactcgcaaaatggctgatggaaggcttcctgaaagattacaaggagaagaaataacatttttgtttctcctttcgtgaacaaaataaaaatctgaatgttttatatatgcaaatcgcctgatggctacttgtaggtatgcgaatatatataggctagtgaatatgcctccccggcataacaggaagattgcatagtagttttgtcgtgttttattttgtgtttgtgttgtgacggtgctgcgatgtgaatcggggtgccgttttttttcgtttctcttgaattcgttaagagcacgttatttcattttcttctcattttatgatataaaatcttctcaattcaatgaacaaaatccggaagtgtatgttatttattgtgcaaatcgcctgataaagcttcttgtgtgtatgcgaatatagataagtcaagcaaggtatgcctccccggcatgacaggaagattgcatagtagttttgtcgtgttttattttgtgtttgtgttgtgacggtgctgcgatgtgaatcgaggtgccgttttttatgtatataaaaagacttactcataaaaagagggcttacaaagattctaaagtatatcgtagaatctatgtaagcccgtcttgatgggagggtgctttatgcacaccttatctagttgttataaaggcatattaccgtgcttcttaggcgggtttgtctgcatcttgttttccgtcatttctagtgcctgaatcagacgtttgcgagtctgtctcggataaatgatttcgtcaatatatcccagttcggcagcctgatatggagtagcaaacttatctttgtaggcttccagttccttagtctttgttgcttcgtcagctttgcggaacagaatattgattgcaccgtctgcacccatcacagcaatttctgcgctggggtaagcgaagttcacgtcagctccggtctgcttggagttcattacgatataagcgccgccgtaagctttgcgggtaataacggtcagtttgggaacagtagcttctgcgaacgcataaactatttttgcgccgtggcggatgataccgttgttttcctgcgtatatcccggaaggaatcccggcacatcttcgaatgtaatcaatggaatattgaaacagtcgcagaaacggataaaacgacttgctttgtcgctggcgtcgatgtcaagaacaccggcaagataagccggctgattggctacgatacctaccgaacgacctgccatgcgggcaaagccgatgatgatattctttgcaaagttcggcatgacttcgaagaaataaccgttgtctatcacgcgttcgataatgtctttcatatcatacggtacgttcggatctgccggaacgattgtatccagagaagcgtcttcgcggttgttttcgtcggcgcaaggttgtttcctggcttcatccatattattctgcggtaagaaagacaacagttcgcggatactcatcaacagttcttcttcggagttgcacataaaatgcgttacaccgctcttgctgctatgtgtcattgcgccacccagctcttctttgcttacttcttcatgaatcacggtttttactacatccggaccagtcacgaacatgtgacttttttctttcaccataaagatgaaatcggtaagggcaggagagtagcaagcgcctccggcacaaggacccaggatggccgaaatctgtggaatcacaccgctggccattgtgttctgatagaaaatatccgcataaccggaaaggctttcgataccttcctgaatacgtgcgccacccgaatcattcagagcgataatcggggcaccgttcttcaacgcaagttgttgtacttttacaatctttttggcattggaagcagacagtgaaccgccatatacggtaaagtcataagcgtaaacaaatacctggcgaccgtctacttttccgtaacctgaaacaataccgtctcctggaattttgtttttatccatgccatagttcgtacaacggtgaaccatcaatttatccagttcaacgaaagtacctttatcgagcaacatgtcaatacgctcgcgagcagtcattttgccgctttcgtgttgcttctctattttatcaacgcctccaccaagagaagcgatgcggtcacgttcctcgaacgtggcgtatgctttattcatttcttccataatgcaatccgttcttatattatgcaatcggttctaatgttattaacgtctggtcgccggttatgttatcaccttcctgaaccagaatttctttaatgcggcagtctgaagtcactttgtagttactctgcatcttcatggcttcaataacgatagcggtgtctcccgccttcatttcctggccgactgcaacaggtattttcactactttgcccggcatcggagaaatgatacagtcattctgttcttcttcccctttcttgcgcatacgcagatattttgcctggctgtccactatttctacattgaaactgctataatgcgtattcactttatagctttttccgttatcacggcgaatcagctgtgcgttcgaactgcgtccgtccatcaatatgttgcaagtaccgttttctgccatcactacgtctgcttcaaacgtttttccatcaatggtgagcactaccttgttatcttccttgctgaccagttctacttcggccacacggtttcctatatgaatttccataattgaattctctttgttaaaatttagattctcaacacacccttatgcaatccgaactctttccacttgctgatagggcggttgtcggcagccataccgctgttgttctcttcgagattcatcaaatagtctatataagcagcgatcagggcaatattttcggaatattcgctggtgcgcgtaatccgttgttgcagaaactcgctgttcttggcgatgaatcctgtgtcataatgaccttctacaaaatcaggagtatccatgatggcacgcagataactgatgttgtttttcactccggtcaatttatattcgtggagaacacgacgcatccgctcaatcgcatattcgcgattggtagcccacacaatcagtttaccgatcatcgggtcatagtagatcggaatttcatatccttcatatacataactgtcaatacgcacaccgatactgttcggctctgtaatttgtttgatgatacccggacttggcatgaaattcatttcagtgtcttcggcacagatacgacattcgatagcgtgcccgcgttgctggatattctcttgtttcagttgaagcacttgtccgtcagcaactttaatttgctcttttaccaaatctactccaatcacttcttccgtaatcggatgttccacctgcaagcgggtgttcatctcaaggaaataatagttgcggtgtttatcaacaaggaattcgatagtacccgcaccgatgtagttcacagctttagctgccgccactgctttttcacccatgtcttttcgcagttcgggagtgacgaaaaccgaaggagtctcttccacgattttctggttacggcgttgcacggaacattcgcgttcgcacagatgaatgacgtttccatgcttgtcaccaagaatctggaactcgatgtgatgaggctcttcaacgaacttctccagataaaccgtgtcgtcgccaaaggaagacaatgattcgctcttggcagtggtatatgcttcttccacttcttcggcactgtggatgaggcgcataccctttccaccaccgcccatagaggccttcagcatcaccggatagccaattttattgcaaagctctacggcttcttctacgcttttcaggttgtcttgtgtgccgggaactacgggtactcccgcctcaatcattttgatacgggcagcaattttatctcccatagcttccattgtttccggattgggtccgataaagatgattccttcttcctgacatcgacgggcgaatgtggcattctcggacaagaagccgtaacccggatggatggcgtctgcatgagctgcttttgccacttcgatgattttttctatattcagataactctctttggatgctgccggccctacgcaataagcttcgtctgcataaagcacgtgcttcgcggtccggtctgcttcggagaagatagcgatactcgttatctccatttcccggcaggaacgcatcacccttacggcaatttcaccgcgattggctactaagattttttttatcatacttttttcaattaagtacatacttattaatgtcttcccgtctaatggacatactccacccgacgaaaaacagtatttttttgatttggggcttaacaagtgatactctttctcctaatccacgaggagaggggcgtcttacacaaaatggcaggtcttctgactgactcttgtcttatttgccttcccgaataacatcagtggcgttaaattagttcaattataagacattgaacagagtttcacagcagcgggactgtccgggatttacacccggttccctattaatcatcgtccgttggatacggattctgaaccattttggggggcaaagataaataaatattgaataggatgttccttttttgcacgaaagtttcaattttgtgcaatgcttgtccttagtccggaagataaagtgataggagcaaagtatgatgcggagaagtcttttcgccgtacggagattatttgcctggatattaattgctggtcgggtaaatacaaacgggtttgattctttaatttgtgtgtaaccttgcttcttttctaaaccatctttctcctgatattgttaggttgatagttattaattaaaaggagatattcattatgaaagaaaagaaaatagctcgtgaagaaagaaaccaggagaagctggctaacggtgattgggtaatggcagagttttacgcaacgtggtgtcctcactgccagcgcatgaaaccggttgttgaagagttcaagaaactgatggtaggaacattggaagtggtggaagtggacatcgaccaagagcctgcccttactgatttttatacggtggagtcgactcctacctttattctttttagaaaagggcaacagctttggcggcaatccggcgaattacctttggaaagattggaaaaagcagtgaaaggattcaaattctgaaaaagattttaatctaactccacggatatggattttgtcacttttgtcacagatagtataaagaaagcacatgtatactgtgctgcttggatacagttattttaataaggtgatagcagtttttatctaatacttcttggttttaactaagtttgatagaactgctatcattatatccacttttttagtgtattcttggaaaaactactatctttgtactgtcgtaataattagagaaatggttattgagtttgaaaaggagtatctttcagaactttattatgaaggtaaatgtaacgataagaagcatcgttttcaacctcaagtaataaggaattatgtgaagcgaattgtcactttggctgaagcattgaatgtagaagcgctttatcctttaaattcgttgaattatgaagtattgacagggagtaaaaaagatatttcctctattcggattgataaacaatatcgactggaatttaaaatatcgactacggactctgaaccaatcataactatttgttctattattgacataacaaatcattataaataagaatagtatgtctaacttagggtattcttttattccggtgcatccgggagagattataaaagaagaattacaatctcgtggtatatcgcagaaacgatttgcggaagtggtaggcgtgtcttatacgatgttgaatgatatattgaatgggcgtcgccctgtatctacggattttgccttattgattgaagctgctaccaatataaatgcggaaatgctgatgaatatgcagacaagatataatatgcagattgcccgaaaagataagaatgttatagcgcatttggagaacttacggaaaatatgtgccacattgttataatttagttcaacctcaactcatacaagcatgcctgcacttcttcaagactgccggtatgttttccttcatcatccgacagtttgatacattccctccactcctgattgatattcatcttgcattgcgtcagtttcatcacgatgttcgaaggttcgaacccggtatcgttggtgagattggtgccgattccgaaagagcagcggattttgtttttgcagtattcttgaatgtctaatgcttttgtaaagtcgagggcattgctgaatacgatggttttggttgtcgcatcgattcccaactctttgtagcgggcaaccagtctgtcgataaactcaaattcattgccggaatcgcagcgcacaccgtcgaaaagtttagcttgtttacggctaagattactaaggaagatgccggatgtatatgtatcggaaagtgcgatacctaaatcaccgtcataaacattcacccagttttcgagtgccatataattggcatgtttatatccgaactgtgctccatgaaacataaaccattcatgagggtgagtccccatcattttcattccatatttcattgcgaagttgcagttggaagtcccggtgcaatattgcgctgtctcgttcagtcttttgataaccgtttcctgcacatcaatagagaatcttctccgtgtaccaaattctgaaaagcggagctgatgttggttcgataactctattttctccgacagcttgcaaagaatcccgttcatgtctgctacatggccgaagaaccggtttttgatttcagaaacaatagcgagcaaaggcacttcatataaagtcactttataaagcaagtcagtcacttcgatgtggagatgacaggcttcatccagatgaatatcaatcttattcgggtcgaaacgaaaagaagacaaccactcccagtagactctcgggagaaatctgcaattcttcgtcatgtattccaactcctcttccgtgaatctcaactgactaagattcttgatctctgccttgagtgtttccagaaaagcttcggtatactttgtttcgttccggtcattgaaactaaaagtacccattgcataggggaacagtttgatataagcgtacgaggtggtaaacttatagaggtctgtatctagtagtgttttaacaatcatgacgttcgttcttttctattaataacgttgtaaagttagtatttgttgaacgaaataatagcctgctgacagataattattccatttttgggatcgatttatacctgattatctgatattatcattaattttgccgtaattatgtattaaataaaagatatttggtatgaaaaacgctttggtatatagctgcgtattactgttgttatcatgtggcggaaaaaccggaggaacttcgcaatcttcttccacgaatcaggaaacacaggaaaacgctttaagcgaaaaaactactgctatttccgaagctttctctatggatttttataaaggaagtgattggattattcctgatacgctttccgaatcattgctaaaagaaccggaagcatcttctttgaaggtctatgactccgacagtatttgccggaaacaagtagatggcgtggaacgttgtttttacaaggactcattgatgaacggtgcttataagcacttttattttcgctcgactgattcttttgtgtcggaaccctattattcggtagttgtttataaagacggaataaagaacgatacggtgcgtcattacagtatctcttcccattgtatgacaagtcgtataatcactcttgacagtatttgtgaactttatcaatcttattattccaacggatatccccatatcttttaccaggctacacgaggtaaacttaatggagtacgtcagagatggtattatgatggaaagccggactggtttgaacactataaagatgggaagctaaacggagaggaaatgagatggcatgccaacggacatctatggcaggttaatcattatattgacgatcaggaagtgttaccgaccgaatgttggtattatagccattcggaatacgcttataatgaccctgacggggtagcggaggctcccgactggtatgagtataaatatcaggcatcagaagggactcccttttattacattcaagaaatttatgcattggagaacggcaaaaagtatcttctgaaacgaaaatattttgaaaaggattccgatgagccgatatacttcatggatgataagtgtgattctgtaaaacgaagcattgtgacggtcggaactcaaaagcggctggatataaggaattattctggcgggcggctacgtcgtttcgagagttatccgtactcggagaaaggcgtgccgggtgtcatgactgaaatttattctgaagaaggcaaccggattgaaaagagtatgtatgactatcatagtggaagaatgatctccttgcgtatgtatagcaatacaggggcagacgtgaaaaaacttgaatttgctgaatatacgaatatgaaggcggatagttgtaataaacagcttgattctggtaaagggcgttatacagacaatcagaataaactgtccgtgcgctggaaaaagggggaactcgcactgctgaattctccggcgaaagaagatgaagatggatttataaaatggtactatgatgggtatcagtctgattacggtctgcatttttttcactattcagggtttgagagctggggctattttgtgatgagtgatgttacaggagaagtttacgaatatcgtagtatagatacccctttattctgtggaaaatccggtcttttccttgtcgtagatgaaaatccgtataaggaagaatgttatgtccgcgtttacaagatgcttcccgaaggacgtttggcggaagttgccgcactcaatcggggaggaggggattattttgaggttgatttggacgattttgtctgggtgggtgaaagttcattcattgccaataaaaaaacgtcggaagatgaacttcaatgtgacttttatggaggatgctctgacagttgcctggaagagtacaggaagtgtggctatctgcaaatcgacgaagacggctgggggtatgtgcgcgtcgatcttcgtcctgatgctttgcagactaagcaggagcttccgtcttcactagaagctattaacgaaatgaatgcatgggtaaagtcattgtgaaacccagaaacaatggaaaatcatgcatccactcttcccccttttcgatagatattttaagatcattactgtctattctactaattcccggttgcatccgctattgataaatagcgaaagaagccatattcccattattgtcattttattcattgtattaaagttatgttctatgataacgctactgtcgggttatgagcagtcaggccaccatctacgacgattgtttgtcccgtgatgtaccttgcatcgttcgaagccagaaaagcgatggcagctgcgacgtcttccggttctcctaaataaggagtggcacattggccgaggaagatgttgcgtacatcttcattcaggttatccaatgccgcgggggtaagtaccaatcccggggctacggcattgcagcggatatttttctttcccatttgggtagcgatgtatttcgtcaggttgatgacgcccgctttgctggcaccatataatgtaccgttagcatcagcagtaagtccgcttatggaagctacgttgacaatgtttccgccgccattggtagtcatgatagggatgacctgttgagaaaggtacatagtgcagcagagattcaggtggaatgcctcgtcaaagtaattgatatccagcttctcgatgttaaggtcacgtttgggatcggttcctcctacattattaatcagtacatctattcgttgatattcattcatagaaaaatcaatcagctctttgcaactctggagttcggtggcggagaaatagacatggcgcacgtcggcccctgcatgagtaagttcgttggcaagctgttccgcctttttttcagaatggtcagcgatgactactttgcccccttcggagacaatgcggcgtgtggttgcttcgcc

SEQ ID NO: 8097 - DNA, 37666 bp, Unknown
  gut microbiota DNA sequence
tcattcgcatcataatttcaaaagtattggttttgagcgtaaaagtaacattaacgagtaaacgaaaagattaatacagaccttaacaaaagattaatattgcaaataaagcgcctttttttgtattttcttctctctactgatgaatataactctaaaaatgggaaaatactccgcttgttgcccaaattattatctacctttgcagcgattatcatatcaagaaaaagaagatggaaacgtccagcaaaaaaagaattattattctatccgctaccggtatcttgcttaccggcctcatttgtctctttatatcccgcaatattattttatgccatatcgttgacaaacggactacacgtatcgaacagacatacggactgcagattcattatcagaagttacaaatggaaggctgcaatgaggtggtcttacaaggactttctattattcccaaccgaagggataccctgctgacattgcaatctgtcaacgtaaaactaagtttttggaagttgctaaaaggagaagtcgaagtacgcaatgttcttatggatgggctggcaataaactttatcaaatatgattccctagccaactatgacttcctgttccttaaacgacaacaagagacagagccaaagcctgccatagagagcaactatgccaaccgcatcgaccgggtattgaacctcatttacggctttctgcccgaaaacggccaactcaaccaaataaaaataaccgaacgcaaagatagtaacttcgttgcggtcaacatcccctcctttgttattaaggataatcattttcaatcaaccattcagataaaagaagatacactgcctcaacaacaatggaaagcatcgggtgaactgaacagaagagactatacattaaaagcagctctctttgctccggagaaaaagaaaatctcactaccttatattacccgccgttttggagcagaagtcactttcgacacattatcttatagcatgactaaagataaacgtgcgaccgatcaactgctcctcaaaggaaaagcgagagtgaacggactggacgtatttcataaagccctctctcctgaaatcattcatctcgatcgcggacaactctgttacgagatgaatataaacggacactcacttgaattggacagtaccaccattgttgacttcaacaaactccagtttcatccttatttacgtgccgagaaggagaagggaaactggcatttcactgcagcagtcaacaaatcctggtttccggcagatgatctgttcagctctctgccgaaaggattattcagtaacctggaaggtataaagacaagtggtgagctggcttatcattttctgttagacattgattttgcgcaactggatagtctcaaactggaatctgaattgaaagaaaaagatttccatatcataagctacggagctacttcactctccaagatgtccggtgaattcatttatacagcttatgagaacggagtgccggtacgaaccttccctatcggcccttcatgcaatcactttacacccttagacagcatttcccccattctaaggatgtctgtcatgcaaagcgaagacggagcattcttttatcatcgcggtttcctgcccgacgccttacgggaagcactgatttacgacctgcaagtgaaacgctttgcacgcggaggaagtacgatcaccatgcaactggtaaagaatgtattcctgaaccgtaacaagaactttgcgcgtaaactggaagaagcattgattgtgtggttgatagagaatgaaagattgacttccaaagaacgtatgtacgaagtatatctgaatattgtagaatggggaccactcgtttatggtattcaggaagcgtctgcttattatttcaaaaaacgcccttcgcaactgaccacggaagaaagtattttcctggcttccattatcccgaaacccaagcatttccgcagttcttttgcagaaggcggacaattaaaggagaatatggaaggttactacaaactgattgcaaaacgtcttgcacagcaaggagtaataagtgaaatcgaggcggatagtatccgccccgagatccaagttacgggcgacgcccggaatagtctagccggtgaaaaaccggagtctagttctcctaccgctgaggagcaatgagattgatataaataataaaggaataggttatcttcttgaactgctgtttctttcagaagaacgggaagagctttgagtgctattacttctcgtacttccggaagaagagcgtctttctgtttgtccgctggaaacattgctccgggtagagctaccgctgcttcgagtagaactcgaactaccgctactacggctagaggtagtactactgcgacggctggtagtattttcactactgcgactggaattactacgactggagctagaactgccacgattggaactagaactgccacgaccggagctaccacgactggaagaactattgtttctatcagaactgttatttctattataggaaccactactatcgtttcgcctacttgaactttcccttgaactactacttgtttttccactttcacggttggaaccgctacttgtcgaacttccgcttgtcggtctgcgattagagcttgaagaaccggaacttgtttccggacggggacgagtcgacgtaccaggtcgcgttgtcgttccgggacgagacgtatcaggacgagtagatgtgcttggacgagatgttccaggtcgtgttgccaatgaacccggacgggaagaattacccggacgtgtcggtgcattatgcggacgagtggaagtattcggacggaaccggacagaaccgaagtccgaacgacgataagagtgatatactctctgatctctcactcggtgcggtgcagagtaatggttgaaattagtatatcttccccgatagtagcttgtatggtgaaagtgcggacgataatgcgctccacaataagtacggtaatgataaggcacaccaaaatagaataagctacggttcggataattgatgtacaccctgaaactccatttccctccggttacataaatcggccgatagaaatactcggcaccgagaaaccggcgatactgcgcatcactcaatacccagcgaagatcatcgttacggatatccaaagcttcataataatcatccaatgcccattcgtaaccacgtgctacgtaatccattatattacggacagaataaataaagtcgtaattaatctcatacgcatcattatattgctgtgtactcaaactcaattcatacgccatcttatcggtaagaaaacgtgtctccttacgtaccttgctggtgctcattccagccattacggtcatattggcagtcagaccgaccgcaaagagtaaaaaaagtattcgtttcataattcaatctcctatcatttattattccgataatattcctcaataaacatgcgtaacatatctctataaccgtacagttaatagtatcaacgccgaccataccctatcacaaaatcattcatcttgtccttgctggaagtaaatgtcagggtattaatcactgtaaagaaagcttctttatctacaatgcggggatacattatcttcataatttccatccggtcatcgtcaaatgtataaagtttggtcagttggagacattgggcagaagtaaaatcagaaccggccaatgcagcattaagcaactttatacgatcatctttaaaaggctccttcttcatctcattataaaacgtttgaaagagctgatcgttcatgaccctgttgtaaccatatcccgggcggtgttctccttgtcccggacgatgtcccccctgtccggggcggtcgggtctttccggatgcatgttatcacgtccgtctacccatatctctttcactcccctaccatcgaaataaacatagtctttatacaatttttctcctttccatactcgctctcccggacgggtaaagcgggtggcatatacttcaacagtataatgtccgggattcaaattggctataaagcaggtagtagtaggcaaactgatttggtttcctcccaagtaaacaagtatcggagtgttcccaccgtcgatacggattccgttaacagactgcgcttgtaaggaaagggcagcgaacaggatgcagaaacttattataatcttacgcataacttatctcgtttttattatttatatctttaatctgataccacaaaaatagggtgaggaaactccccaccccaatgattctctctattcgtatgtagggaaatccctattctgtttaggaatccgccaaaacaatgccatcctcgtgcaaggtaatcagacgtttcttatacaagtcgcccactcctttcttaaaggttttcttgctgacaccaaacgtatcgtagatatcttccgcaggacttttatcattcaagttaatttgtcccccgtgctctttgatatagtctagcagcgttttcgaaaaatcgtcaatcttttcaaaaccgggtttctgaagaatcaaatctactttaccatcttcacgcacctgtttcacaaaagctttcatttccatccctgtctccaacggacagaatatttcattttcatacaacaaaccgctatacatatcatctataattgccttaaagcctaagtccgtcttctgccagataagaatattcacctctgctcccggagcatattccggcttttctttcgacagataacgttccacttttgctgaagccacaatacggtaactctcttcatccacatgtgcatgaaccacgtatttccgtccaacctgcattttcatcttctgctcacggaacggcacaaataggtctttcatcaatccccagttcaggaaagctccgtattgatttacccaggagacttccagacaagcaaactgtccgacctgcactaacggggtcagtgtcgtagcaatcagcctctcatccatatccaggtaaagaaacacattcaaaaaatctcctatcttacaatcctcgggcacatagcgggtaggcaacaaaatctcaccttcttccccaccatcgagatatacgccgaaatcgacttccttcacgacttcaagctggttgaactttcctaattcgatgctcatattcttatctatttattatatagaatacaaagataatctattttgaatagatctctcaatcagtcagctataacttttcgttatcgagaaaaactatttgcaatgaacaatctgcgttctaatatgttaactttgtagcgacaaaaagaaagagtaaattattcacctttttaaacatataaaattatggaatttctaaccaacgagaaacttacgattgtgggagctgccggaatgatcggctccaacatggcacaaacagccatgatgatgaaactcactccgaatatttgtctctatgatccattcgcaccagctttggaaggagtagctgaagaactgtatcattgcggttttgaaggtgtcaaccttacctatacttccgatatcaaggaagcgctgaccggagcttcttatattgtttcttccggtggagcagcccgtaaggcaggtatgacccgcgaagatctgttgaaaggaaatgcagagattgccgctcaattcggaaaagacgttcgtcaatattgcccgaacgtaaaacatatcgttgtcatctttaatcctgcagacatcaccggcttgattactttgttgtattcaggtttgaaaccttcacaagtttctacattggctgcgttggatagcacccgcctgcaaaacgaactggtgaaatacttccatatccccgcttccgacattcagaattgccgtacgtatggcggtcatggagaacaaatggctgtatttgcatctaccaccaaaataaaaggagaacccctgaccgatttcatcggtactacccgccttccgttgacggaatgggaagcactgaaagtacgtgtcatccagggtggaaaacatatcatcgacctgcgcggccgttcttctttccaaagcccggcttatctgtctatcgaaatgattgctgctgctatgggcggacagccattccgctggcctgccggaacgtatgtttccaatggcaaattcgaccatatcatgatggcgatggaaacttcaattactaaagacggcgttacttataaagaaatagccggaactcctgccgaacaggaagaattagaaaagagctacgaacacttatgtaaacttcgtgacgaagtgattgaaatgggaatcatcccagccatcaaggactggcatgctttgaatcccaatattgactaatcaaacaatattagcgaaagcagaaggccgaaacctgacgatctttttatcgttccgggtttcggccttttttatttcattgccaatgtcattcccacggaagaacattcctgacaaatccctttaaggacataattaatgctatgcaaagtaaatccttcaggcaaatcaatcaccgggatatgggtaccttccaggcagaatgtacgatgacatttctcacaataaaaatgcgaatgtaaatcctgtaccacacaattgcaagagttgtcgcaaacggcatacttcaacgagccgcttccatcgtctatgctatgtatgaggtgatgagacaagaagagagcgatggtacgggatatggtcgatttatcaactgtgtcgagcaatgtttcgaggtcaagcaatgacactgcacgctctgcctgcatcatctcttttatcaccaagagccttattgcagttggcttaatgtctcttctgaccagcttatccaaataaatatcttcttccatctttctcctattttatcattttctgtattctgacggcgttcataatagcaagcaacgcaacgcctacgtctgcgaagacagcttcccaaagagtagcgattccaccggctcccaaaatcaatacaagcaatttcactccaaatgccagtgatacattctgccaaatgattcttcgtgtcaactttcctactttgatagcttcggctactttcgacggctgatctgtctgtatcacgacatcggctgtttcaatggctgcatcactgcccaatcctcccatagcaataccgacatgactcaaagcaagcaccggtgcgtcattcattccatcgccgacaaatgcaatccggtttgcctcatcctgacgcaattcttccaggtgtttcactttcccttccggcagcaagtcgccataggctttcgatatgccgagcttctccgcaaagttagtaacaatactctgtttatcaccggataatatctgtatgttttcaatatttaaagcttttaagcggtcaatagctacctttgcatcttctttcaaggcatcagccaacaacagataaccggcataacggtttccaacagcacagactacaatggtatctgttatcttcaacaattcttgcggaaaggatatatcaaacttggacagtaaccggcaattaccaaccagaaccggtattccgcctaccgttgcttccaatccgaagccggcatattctttcgtatcggtaacggttacgcgttctatgttttgttcttttgcgtagtttacaacagccttggcaatcggatgtgtgctatcactttctaccgaagcaatcagtttcactaattcttcttccgaaatatcgcctgcacttttacaagcctgcacatcaaaggttccttttgtcagggttcctgttttatcgaataccaccgtattgattttggtgctagcatccagataattaccgcctttgaataaaatacccaatcgggatgccgctccgataccaccaaaatagcctaatggaatactaaccaccaatgcgcatggacatgaaatcaccaaaaagaccaaagctctgtataaccaatcattaaatgtgaatacaaatgcaggattgataagtgaatagaccaatggagacaatacaattaatacggccagtatgataacaatcggtgtgtaaacacgggcaaacttgcgaataaacaattctgccggagctttacgttcggcggcattctgaacaagttccaatattcgggcgagtgcgctcttgtcaaaaggtctcgtcacttcaagtcggattaccttgtcggttacaatcattccggcaagcacttcctcccctttccgaatattacgaggcgcgctttcgcccgttaatgcagctgtattaaaagcggcaacctcattctgcatggttccatcgagtggtactcgctcacctgcctttatttctatgatttcaccgacttttatctttttaggactttcaagaacaagattaccctctctaagtaccagtgctttctcgggtcttacatccaataaggctccgatattacgtttggccttatctaccgctttatcctgaaacagttctcctactgtataaaataacatcacggccactccttccggatattcgccaatatagaaagcccccagagtagcaataaccattagagtaaactcactgaaatagtctttttccctgatactttcccaggcttctttcatcaccggaatccctaccggaagataggctacgatataccatatcaaagaaacatatccttcacggaagaatgctaaatcgagagcattcattattattccacctgccagcagcaggagagagaatatcactttcccatattcatggaataccgaaacctttacatcaacctttttttctgctgcgcatgagtgagcgccacaactacaatgtcccataacattcatcatttagttgatgcaaaggtagcaaatgatttatgcaacaaagttgcataaatcggttttagcacctttcaatgtcagcaatatcgcaacagccatttccaaaccggcacgacttctatatccaactcattccctgaaattgtcctttcttcatcccaagtaatgatatcggtctttcaaccagctgaatcttactaatttcttgctgacgctcggctataattgcctttattattcgtttttccataaaatatgctctttatattgcacaaatatagcaaaaacatgcttaatatattaagcaagacttctttttctttccaactgtagctactattttctttagttgtcaactgctacttatcctttacaggacgaactttgacaggacagaagaagattacatataaatttgatgattcttattgtcaaccaaagttttttcccgatagtataatgattatcaccggtttacatgctgacaataagccatgacaataggctgacaataaaaaatcagaacttttattgtcagcctgttccattttataagcacctgaaggacatcatcgcctgcagtaaccataccatccacatagaaagcagctttttaaaatgaatccccctattaaatgaatgttatatagccggtatctttcacttaacaagtaggtattgttccattaaagcatcagtattgttaactctccacggctgtgacgagatctttccacagccgtggtaggaactcgtcacggctgtgggaagaagttaccacggccgtgacaaagtaaagatagcggtactttagtagaactatactggcactctagggcaactacataggcacgttaatggaactatataggtagatatcactttgggaggctgttactaaaatgcgacgttacttcagaacatgcttctaaagctattatttatcaagtcataaaaggatcataagagataaaaataaggctgacagtaaaagtagatatattttattgtcagcctattatcagcatctattgtcaggtgatatagtattgatattcatatacttgaatatcaccctgacagtttgacaataaaattggtataaatcaatagaaacgatcataaaatttttaattgggaagggtaaagaatttataaaaagaaagaaaaagtttgccgttcccctaagaataaatatctttgtaaccgtggttacagtaaccacagttactaatataattcactgactatgaggttttataatagagaagaagaactaaaagagctaaaacgaattcagcaattggcatttgaggaaagttcaagaatgacagtcgttaccggtcgccgtagaattgggaagacaagcctcattatgaaagccgttgaacagactcccactgtctacttatttatagggcgcaaaaatgaagcaaccttgtgcgaagaattcatcccacttatcgcacaagccctgcaaatctttgttccgacagaaatccgaagtttccgaaacttattccaatacctaatgcagctttcgacacaacggactttcaacctggttattgatgaatttcaggaattctatactattaatgaatccatattcagcgatatgcaaaatatttgggaccaatatcggaagtcctctcacatgaatttgattgtcagtggttccatctattcccttatgcaaaaaattttccaagacaacaaagagccactcttcggaagagctgataacataatcaagctgtcagcctttagtctctctgttctaaaagaaatcatgcatgaatatgccccgacacattcgaatgatgatcttttagcactttatacttttactggcggggtgcctaaatacgtggaacttttttgcgacaaccatacgcttcacgtggaaagcatgatccattttatggctcgcgataattctccctttaccgaagaaggaaaaaatttgttgatagaagaatttggaaaaaattacggaacctacttttctattttaagtgcaattgccggaggcagaaatacacaagcagaaattgaggcagcactaggagaaaaaagcgcaggtggctacctgaaacgtctgatagacgattataatattatcatacgccaacgtcccattttagctaaagagagctcaacaactgtccgatatgaaatatgtgataattttattaggttttggttcaattacttcgatcgtaaccgttcattgatagaaattaaaaactttgtagggctgcgtaatatcataaaagctgattatccaacctacagcggaaagatattagaactttacttcaaacagaaattcgcagaaagttatcaattccgtgccatcgggtcatggtgggaaaacaaagggaaccaaaacgaaatagatattgttgcactcggtcttgaaaaaaacaaagcagtagttgctgaagtaaaacgccaacgtaaaaactttaagccagagttgctggaacagaaagttgaacatttgaagaaaaagctattgcctcgttatactattgaaacaatgtgtttgtcattggaagatatgtagtacatagttaggcacggatgacagtttttctatgagatcagtccccatcacctgtattccgtgcccaattatcattgttggttttcttcccgatctgttcggataaactccaggagtcgttctaccgcctcttcttcaggaatattcttttctacacacaccttgcctttataaagactgattttgcctcgtcctgctcctacataaccgtagtcagcatccgccatctcgccgggaccattcacgatacagcccataatgccgatcttcaagcctttcaaatgtgaagtggctgccttgatacgggcaattgtcttctccaagtcgtaaagcgtacggccacaaccgggacaggatatatattctgtcttagaggtacgggtacgtccggcctgcaagattccgaaagcagtggcgtcgacaacggcatggctcaaactgccctgattgaacaggaagataccatcgcaaagaccgtcaaagatcaaggctcccatatcggctgcggattttatctgcaaattctccgcatcatcttccgcataatgctggaagaagacaaccggattctgcaaaccttccgtcattagctgatgcaccaatgcacggtgctcacccaaacggttcggatggttgctttgagagatgattaccacttccgggtggtacttcaaacaggctatcacttcatctgtttgggccatatagggtataaacaggaatttaagcgctgcatcacattcacccatcaatggtagttgcgcatgattgaaagcaggccaggttccggcctctccttgccatacgtccgcatcaagaatatattccacgccttcttcccgttgttcgggcaaggctcttccggcataaatatagtccggagtgaattgcggatttacttctgtctttccgtccatgcggtcggcaatgactacgggcacatgttcgcctccgatattacggaccgcttttgtcttccggcgttcaggagacagatagttaaattcaggcgcctccaatcccggaatataaggatgctcctgcctcaatagaacataatccaccaatttacgggccaccggaatttcagcttcgggtgcttcactcaaagatacgcggatggtatcgcccaacccgtcgctcaacaatgctccgatgccgagagccgacttgatacgcccgtcctctccgtctccggcttctgtcactccgaggtgtaatgggaaagccatcccctctttttccatgacgtccaccaacagacgaacggttttcaccattaccacggtattggaggctttgatagaaatcaccacatctgtgaagttctccgctacacagatacgaaggaattccatacaggattccaccattccttcgggagtatcaccatagcgtgacatgatgcgatcggacaaagagccatgattcacaccgatccggatcgcagtgtgattctccttacagatattcaggaacgggacaaaccggtcatggattttctgtatttcctgcgcatactcctcgtctgtatattccagtttcttaaaagtacgcgcagcatctacatagtttcccggattgatgcgcaccttttccgcatattgagcagctacatccgccactttcggattgaaatgcacatcggcaaccaatggaaccatatatccctgactgcgtagtccgatattgatattcatcagattctccgcttccttgataccctgcgttgtgaggcggacatactcgccacctgcatcaacaatacgtttcgcctgttccacacaagcctgtgtgtcctgcgtagacgtgtttgtcatcgactggacacgaatagaattggggccgcccaacggcacagccccaatatttacttctgtggtttctcttcgaaaataattgaatagatcaaccattttgatttatgatttatgatttacgatatatgatttgatgactgaaaacactttctgcgcaatatgcaaagacaacgtgcaaagacaacatacgatttacgaagatatttcaatcgccaatcgtaaattgtcaaatcgtaaatcacattagtttgttttatattcaaacttaacttctttcagttcttcgtttgcttttacgattttctttttcagtccttctttgtaagcagcaaaagcttctgccaatttctcgtcactcaatgccaacatctgaatggcaaggatagcggcattcatcgctccgtttatagcaaccgttgccacaggaatgcccggaggcatctggatgatagaataaagcgcgtctacaccatcgagcacggagccttttacgggtaccccgatcaccggcagtgtagtgttggctgcaattacaccgggaagggcggcagccattccggcagcggcgataataactttaatgccacggttgcgggcattctttgcaaactcttccacagcttcaggcgtgcggtgagcagaaagcgcgttcatttcgaacggtacatgcatatcattcagcagttgcgcagccttctccataacaggaaggtcggacgtgctacccatgataatacttacaattggagtcattttgatttactattttacgatttactatttacaatttaaagtgaggtaagaattatccgtttaccacagctttgtatgcttcggcatccagcaggtcctcaacggctttcaggtctgtcggtttcactttaatcaaccaaccttcgccatacggatctttattaaccagttccggattttcttccaatgcttcattttgttccatcacttcacctgctacaggcaggaaaagatcggaaattgttttcactacttcgatggttccgaatgtctcaccggcttccaacgtttcaccaacagtcggtatgtctacgaacacgatatcacccaattgttcttgagcataatcagtgatacctacgtatgcaatgtctccttcaacgcgaatccattcgtgttcgttcgtgtacttcaaattctgtggaaagttcataataattagtttttaggatttatactgttttaaaataaaaatactcgaaataagatgttgctcacgggatgaagtaccaaaagggcacatatcaagccaaccgcaaaaccggaaagcacctcacccaacgtgtgatgtcccaatacaattcgtgcagaacctaatataccggcaatcaatataaacaggcataaccatccgaccggattgtaaccgaacaaagcactgaaagaaaccagtccgccgatcactccgcctattcctgccatgtgttcactcaatttccatttcaaattcactgcaatgcagataatagatactaccaaagaaacgaggatgatacctgtcatataccaaggtatattcagccggcgcatcatcaacaggcagaacacatacgagatgatagtcagcagaatcggtacataacgtttcttgcgctcactcaactcctgacgggcaaagccattgattttacgaaacaggaaaatggtaatggtaggtgtcagtatggtaaagcagtaaacaattcccaacacgatcaacttatattgtatcggcatgatacgaagataagaaaacaggaataacaccagaaacgataaaaacggaatagaaaatggagtaaagaccatcgaagtagctctcgccacctgcaacattgtcttatccgctatgatatgttctctctctctgtccatcagcactaatacttaatactttttatacttaatactttatattcgttctcattttcgaagtcgcgcaaccggaatattcaactgctgacggtatttggctaccgttctacgagcaatgggataacctttctctttcaagatgtccgccaattcatcatctgtcagcggtttcttcttgtcctccccatcaatacactctttcagaatcttgcgtatctcgcggacagacatttcttcgccgtcctctgtggtatacccgtcgctgaaaaagaatttgagcggatagatgccgtaatttgtctgcacatatttactgttgctcacgcgggaaatcgttgaaatgtccagtccggtacgttcagccacatcttttaaaatcatcggtttcagcagagattcgtctccttccaagaaaaaaggacgttgtaagtcaatgatagcctgcatggtagtcatcagggtattctgacgctgccgcacagcatcgataaatccttgtgctgcatccattttctgcttcaggaacatcatcgcttctttggattcttttgattgattagccctgtttttggtatgctcttccaccatttccgtgaagtcgcgactcatacggagttcggggacattacggttattgaggcttatattgatggttccgtcatcatacgtttccacgataaagtcgggaactatctgttggagattcctgccgatcgcttctcccaaagaagcacccggacggggattcagcttggttatctcattaagagcttcctggaaagtctcttcatcaatgtccagtttctttataatcttctcccagtgtttacgggtgaattcttcataacactctctgatgatacgttcttccagctccagtatcgggttgggcttcttctcttcatcctttttccggcaaatctgtatcaacagacattcctgaaggctacgggcaccgataccagcaggatcaaagtcctgtaagatacagagtgcttcttccagttcttcttctgtcgattcgatgccggcataaattgccagttcatcacagatgctctccaatgacttacggagcagtccgtcatcgtccaatgaaccgatcagatactccaccaggtcacactgatgttcggtcaggttgcgttcacgcaactgttctttcaggatttcataaaaagaggtggaatcggagaacggaatatcctccgcctgttcatctttcgaacggttgttttcttgtaatttataatcggggatatcgtcttcagtcagataatcactcaaagaatcataatcgttggcatcactatccatgccatcttccgtagtgtcggaatcagcatactcatccgcagtgttttcttctttaccttcttcaagtgccggattttcaagcagttcagcatggatacggtcttccagctctactgcgggaagctccaacagtttcacgaccagaatctgctggggcgagagcgtttgtacctgctgttgcgcctgagattgtatttgacgggaaccttgtgccatattcgtttttgctttctactatttctcgctacaaaagtaactttttaacgagagattacacagattagggagataatttttaatcctataacacaaaattcgttatctttgttgcacgaacttaaaaattaggacaatatgtttgccaaagaaacgtatatgcagcgaagagccctgctaaaaaagaatttaggctccggggtattgttatttctcggaaatgacgagtgcggactgaactacgaggataacaccttccgttatcgtcaggattctactttcctttattatttcggactttcatgcgccggcctttcggctattatcgatattgatgaagacaaagaaatcattttcggagatgaactgtctatcgacgcaatcgtatggatgggatcgcaacctacattacacgaaaaatgtgaacgtgtgggcgtaaaaaatctgatgccgtctgcagaaattacaagctatctccacaagtgcatccagaaagggaaagcggttcattatctgccaccttaccgtcccgagcataaattgaaactgatggattggttgggtattccccctacacgtcaggaaggttctgttccattcatccgtgccgttatcgcccaacgtaattacaaatctgccgaagaaatagtagaaatagagaaggcttgcgatgtaactgccgatatgcacatcaccgccatgaaagtgctccgcccgggcatgtatgaatacgaagtggtagcggaaatgaaccgggtggccgaatctaacaactgccagctttcgttcgccaccattgccaccatcaacggacagactttacacaaccattatcatggaaataaagtaaaaccgggtgatttattcctaatcgatgcaggcgcagaagtagaatcaggttatgcaggcgatatgtcgtccactattcctgccgacaagaagtttacagcccgccagcgcgaagtatacgagattcagaatgcgatgcatctggaatctgtaaaagctctccgcccgggtattccttatatggacgtatacgaactgtctgcccgtgtcatggtagacggtatgaaggcactcggattgatgaaaggaaatacggaagatgcggtccgcgaaggtgctcatgcgttattttatcctcacggattaggtcacatgatgggattggatgtacacgacatggaaaatctaggagagatatgggtaggatataacggtcagccgaagagcacacagttcggtcgcaaatcgcaacgtctcgccattccgttggaaccgggatttgtacatacggtagaaccgggtatttattttattccagaactgatcgacatgtggaaaggagaaaagaaatttaccgatttcatcaattatgatgtagtggaaacttataaggacttcggtggtatccgcaatgaggaagattatctgattacagaaaccggcgcccgccgattaggtaagaagattcctttgacaccggaagaggtggaagcgttaagataaaccaatgaataacaccatgaagagactacttttatctgtatggctattgtcacttaccttgctatccgccgtagctgaaaactatccttataaaagcgatgtgctttgggtcaccgtacccaatcatgccgactggctttataaaacgggagaaaaagcaactgtggaggtacaattctataaatacggtatccccagagataacgtaaccgtcacttatgaaataggtggcgatatgatgcctgttgccgataccaaaggaagtgtaactttaaagaatggcagggctgtgattcctgtgggcacaatgaaagagccgggattccgcgactgtcgcctgaaagcaaccgtagatggaaagacctattcacatcatatcaaagtaggattttcaccggaaaaacttcgtccgtatacaaccatgccttccgatttcaaggaattttgggaaaaggctaaagcggaacaaaaggaatttcccctaacgtataccaaagaacatgtcgaaaaatattccactgataaaatagactgttatctcgtaaaattgcaactgaacaaacgtgggcaatgcgtctacggatatttattctatccgaaaaaagaaggaaagtttccggttgtcttgtgccctccgggagcaggtatcaaaaccatcaaagagcctctacgccataaatattatgcggaacaaggatgcatccgttttgaattcgagatacacggtctgaatccggaaatgactgatgaagaatttaaagaaatcagcaacgctttcaatggcagagaaaacggctatctgaccaatgggctcgacagtcgtgataattattatatgaaacgggtatatctggcctgtgtacgcggtatcgactttctaacttccctgccggaatgggatggcaaaaatgtaatcgcacaaggaggtagtcagggaggcgccttggcattaatcgctgccggactggatgaacgggtgacagcttgtgtcgccaatcatcctgcattaagcgatatggcaggctataaagctggacgtgccggtggatatcctcatttctttagaaattcggtggatatggatacccccgaaaaaataaagacaatggcctattatgatgtagtgaactttgctaaattgataaaagcagacacctatataacatggggattcaatgatgacacctgtcctccaaccaccagttatatagtatacaatgtactaaactgtccgaaagaagccctaattactcctattaatgagcattggacctctaacgatacggagtatggacatctgctttggataaagaagcatttaaaataaagaatcaatcattccatctggatacgggcaactcttttttcccgtaacctttcttccaggcatacgcttttctctttcggagataaagcgtatcaccgctatgctttatcgcctcccaattaaatattgaatggtggtagatgatcttttcaaaccaataaaggaggtcataagttatgaatggtagtatcatacaccaccatgaaaacagtaatgacaaaatcaacgctggtatcagagtcagagaaaagcattcccaatattgctttgcatgtatccgtaactccatatcttcccaaacttccagatatttataccgggtaaagaaaaaccagcctaacataaaatagtgtttctttccttttcccaagaaccactttgctaaaagactattataaaaaatcatattcacattttttttgttgcatgtagtccttttataacagcaaaagtaaccaaaggttcaatattatagtttagtataacagtcattatacagtattctcccctaaagaatcctattcaaatattgtttattttgtgttctcttgccttactacaacaaaaggtaattcatattttctgcaaagaaagtacaaataacgaatatatcctaatttttctacttaatatttaaagctactacctcccaaaaattcgcgcagtaaagacgtaggcggaatctccttatcctgtacaggaacaaaatatttgataaacttaagtaaccggtatgcttcgcaatattcaggacagttgcgcggtacacccatcagaataggttcggcatgcaaacggagtactgcaaactcaaaaagcaacgctgaattaaacattacgtcggcattctcctgatagggaaaaatccatttatcttcaccggcacgtacactcggccagcgtgatatcgtttcacgtgccgaatatccccgataattgaagtcacggataatacgacgcaacagacggttgtcagttgtcggaatccagttatggtcatccaaagagatggtggtcaatgccgaaacataaatcttgaatttccgttcagccggtatatgcggcgtcagttccgggttcagggcatgaataccttccagaatcagaatcgtattatcttctattttcagtttatcacctttatactccttcttgccaagggagaaattaaaacgaggcagttcgacctcttcaccgcgcaggagtgcctgcaactgttgattgaacagttccaaatcaagtgcatacagtgattcataatcataatttccgttttcatccagaggagtctcttcacgatccacaaagtaattatctaaagagatcgggaatggtttcagtccattggtcattagctgtatagaaagccgtttgctgaaagttgtctttcccgaagaggatggtccggcaatcaataccagttttacccggttaccgttttcaccacgatggaatatggtatcggctatctgggctattttcttctcctgcagtgcttctgcaacatttatcagatcggttgcatgtccctcttcacaggccaggttaaaatctccggcattgttaagccccatgatataactccagttcaggtattctttaaagacatccagcattttttcctgcttcaccacatcttcaagcacattcgggttttcccggctcggaatccgaaggagcaatccatcgtaatatttcacgatatcgaataatttaagatatccggtactgggtagcagattcccataataataatcaatggtatcacccaatgtataataataggtatagagcgaaccggaagtttccagtaatctcactttatcattcattccccgttcgctgaaaacacgcacagcttcagccgtatgacattcgatgcgatgataggaaatattctccgcgataatctcctgcatccgttgcttgatgcgtgtcacatcttccagttcgatgggacggccaatccgcaaattgcagaaatagccttttgaaacaggatgttctacaaacaattttccgtcgggaaacagttccgtgacagccttaaacaagacaaaacaaagcgaacggacatacgtacgcataccggactgatctctcacatccagaaactctacatctttattattataaactctgaaattcagtccctcggaacgattattgaccttggcacttactacttgataaggaaaattaagattaaaaccgtaataaatatccaaaagtgagcttccgatagggaattctttggaaatattgttatttttgcaacatatttgtaacatctgtttcatcgagttcgttaaaaggtgaataatttgggactaatatacttataatcagatagagaacaaataaccattaaaaatattatagatggaatattctttttatgattttttaaagctcataggctcattaggactcttcctttacggaatgaagattatgagcgagggtttacaaaaggtcgcgggtgacagattgcgaagtattctaacggcaatgactaccaatcgggtaacgggagttttaacaggagtgttgataacagctcttatccagtcttcttcagcaacgacagtgatggtcgtaagtttcgtaaacgccggattgctcacacttgccgaatccatcagcgtcattatgggtgctaatatcggtactaccgtgactgcctggatcatttcaattttcggatttaaggttgatatggctgctttcgctcttccgctcttagccatcgccctcccgctcatcttctccggcaaaagcaaccgcaagtccatcggtgaattcattttcggtttttctttccttttcatggggctttcttacctgaaagcaaacgcgcccgacctgaacgccaacccggaaatgcttgccttcgtacagaactacacggacatgggattcttctccatcattctgttcttactcatcggtactatattgacgatgattgtacaggcctccgccgccaccatggcaattacattgattatgtgcgccaacggatggatcagtctggaactgggagcagcacttgttttgggagaaaacatcggaaccactatcacggccaatcttgccgcacttacagccaatacacaggctaagcgggcagcattggcccattttgtttttaacgtgttcggcgttatctgggtcttgattgtcttccatcctttcatggaactggtaaactgggtagtagatacctttttccaaagtaacaatccggaagttgccatctcctacaagttatctgctttccactcaatcttcaatatctgtaatgtatgtattctgatatgggcggttaaactgattgaacgtaccgtatgtgctcttatccaccccaaagaagaagacgaagagccccgtttgcggtttatcaccggtggtatgctttctaccgctgaactttctatccttcaggcacgcaaagaaatccatctttttgcagaacgtacacaccggatgttcggcatggtgcaggatttgctacacacagaaaaggatgacgatttcaacaagctgttcagccggatcgagaagtatgagaatatcagcgacaacatggaacttgaaatagccaactacctgaatcaagtatctgaaggtcggttaagttctgaaagtaaactacagatacgtgccatgttgcgtgaagtgacggaaattgaaagtatcggtgacagctgttataacctggcacgtaccatcaaccggaaacgccaaaccaaccaggactttaccgagaaacaatatgaacatatccacctcatgatgaagctgaccaacgacgcacttgctcaaatgattgtggttgtagaaaaaccggaacatcagaacattgacatcaataagtccttcaacatcgagaatgaaattaataactaccgtaaccaactgaagaatcagaacattctggacgtaaacaacaaagaatacgattatcagatgggagtttattacatggatattatcgccgaatgtgaaaaactaggtgactatgtggtgaatgtagtagaagccagtagtgatgtaaaagagaaaaaagcttcttgatagagcttaattgaatgataaaaaaggagaatcagtctatcatagcattactgattctcctttttaatttaaatcatcctccagaaaaacaaaaaagaccgggcatatatctatacacccggccattctcctcttaaataattctctctctcttggttttatccttcgtacggttcaaaatcttctttgccgactccgcataacggacaagtccaatcatctggaatgtcttcaaaggctgttcctggttcaattccgctttccggatctccttgttcggggtcgtaaatatattcacagaccgtgcaaatgtactttttcataacgttcgtatttttaaatggttttctgaataatataacacaaatagctggatatttgttcaacactattttccaaactaaagaaaaaagctatctttgtagtcatattatcaagctaaaacaacaatattatactatgcttatagcactattgtcaactttaatagttttatgcgcagtcctactaatcagttttttatgggaacgcaggaaatgcctacggatgcaacaacgattgttccgtgaatccagaaagttggaacgtaccagccatatcgccggtgccgttttaaagaatgtacatgcttttattctgctaatagataacgattttaaagtactgaagaccaactattaccaaaaaaccggaaccagaaaaggaacagaagaaaaaagagtgggcgacctgctgcaatgccgtagcgcattggctgccgaaggaggctgcggcacacatagcttctgcggttcctgtccgatacgtactgccatacgtcaggccttcgaacagagacggaacttcacggatctcgaagcaactttatccgtagtcacatcggataatacgactgtggaatgtgacgcagtaatatccggctcctacttccttctcaatgaagaagagaatatggttatcaccgtacatgacgtcacccgacggaaacaggccgaaaatgaattgagactagccaaagaaaaagctgaaaaagcggatatttcaaaatctgcctttttagctaatatgagccatgagatccgtactcctctcaacgctattaccggatttgcagaagtgttaggcagcgcaaataccgaagaggaaaaggctcaataccaggaaatcataaaaatgaatgctgatctcctgatgcagttggtcaacgacattctggatatgtccaaaatcgaagccggaaccttggaatttgtacagacaacggtcgacgtcaatctattgctttcagatttacaacaacttttccagatgagagtcaatgacgctggagaaaagatacaaattatagcagaaccgtctcgttcttcgtgcatgattcaaacggatcgtaaccgggtggcacaggtgctttccaactttgccggtaatgccattaaattcacccatgaaggtagtatccgcatcggatatgaggcaagagataccgaactttacttttatgtaaaagataccggagccggaattccggcagaaaaactaccggatgtattcgagcgctttgtaaaactgaacaaagataagaaaggagccggactgggactctctatttctcaaaccattgtcacgaaactaggcggtcagattggtgcggattccgtagaaggtgaaggctctacattctggtttacaattccttatcgcacatgtggtaaaccacggtaacaaattcgacttcataaaaagttttaattaaacaatttatcacaattttatgttgtatttttgcggttcaaactaaacgcatgtatctgcatgagtacaaataaaaatgactattatcatttaggacttacggatgacgaagtcctacaaagcagggagaaaaatggtattaacctgttaacacctcccaagcgtccttccctctggaaactttatctggaaaaatttgaagacccggttgtacgcgtactgttagtagcagccgttttctcgttaatcatttccatcatcgagaacgaatacgctgaaacaatcggaattatagcagctatcttactggccaccggaatcggtttctttttcgagtatgatgccagcaaaaagtttgatctgctgaatgcagtcaatgaagaaacattggtaaaagtgatccgaaatggacgtgtgcaagaaattccccgcaaagacatagtggtaggtgatattgtaattctggaaacgggtgaagaaattcccgccgatggagaattactggaagccatctctttgcaagtaaacgaatctaatctgacaggcgaacccgttattaataaaacaactgtagaagctgactttgatgaagaggcaacttatgcttccaatctggtgatgcgtggaacgacagtggtggacggtcatggcaccatgcgcgtgctgcatgtgggagatgctactgaaatcgggaaagtagcccgacaaagcacggaagacaatctcgaacctactccgctgaacatacaattgaccaaactcgcaaacctcatcggaaagattggttttaccgttgccggtctcgctttccttattttctttgtcaaagacgtattgttattctttgatttcggttcactgaacggatggcacgagtggcttcctgttttcgaacggacactgaaatattttatgatggcagttacgctgattgtggtagctgtgcctgaaggattgccaatgagcgttacgcttagtctggcattgaatatgcgtcgtatgctttccaccaacaatctggtgcggaaaatgcatgcttgcgaaacaatgggagccatcaccgtgatttgtacagataaaaccggtacactgactcaaaacctgatgcaagtgcacgagcctaatttttacggcatcaaaaatggcagtgttttgtccgatgatgatatcagcacactcattgcggaaggaatcagcgctaactcaaccgctttcctcgaagagtcaacgaccggtgagaagccgaaaggagtaggaaatcccaccgaagtagctttattgctctggcttaacaaacaggaaaaaaattatctggaacttcgcgagaaagcacatatcctcgaccaactcactttctctaccgaacggaaattcatggcaacccttgttgagtcgccactgatcggaaaaaaaatactctatataaaaggagccccggaaattgttttgggcaagtgtaaagaagtagtcctggacggacgacgagtggacgccgtagaatatcgttccacagtagaagcacaactgttgggctatcagaatatggctatgcgtacacttggatttgcattcaagattgtcggagaaaatgagccaaacgattgtacggaactggtttcagccaacgacctgaatttcttgggagtagttgccatctccgacccgattcgtccggacgtacctgctgcggttgctaaatgccagtccgcaggtatcggcatcaagatcgtgaccggtgatactccgggaactgcaacggaaatcgcacgtcagataggtctttggaaccccgaaacagataccgaacgaaatcgaatcactggtgttgcatttgctgaattgagcgatgaagaagcattggatagagtgatggatttaaaaatcatgtcccgcgcccgcccgactgacaagcaacgtctggtacagctgcttcagcaaaaaggagcagtcgtagccgtaaccggagacggaaccaacgacgctccggctttgaatcatgcccaagtaggtttatcaatgggtacaggtacttctgtagccaaagaggccagcgatattaccctgctcgacgactccttcaacagtatcggaactgccgttatgtggggacgctccctgtataagaatatccagcgtttcattgttttccagctgacgatcaacttcgtagcactgctcattgtcttgttaggttctgtgatcggtacggaacttccgctgactgtaacacaaatgttatgggtgaacctgattatggacacttttgccgctttggcacttgcttccattccgcccagcgaaaccgtgatgcttgagaaaccccgtcgaagcactgattttattatcagtaaggcaatgcagtctaatatattaggtgtaggctccatcttcctcatcgtactgctcggaatgatttattatttcgaccacagcacggaaggtatggatatacacaacctgaccattttcttcaccttctttgtcatgctgcaattctggaatctgttcaatgcccgtgtattcggcactaccgattcggcattcaagggactttccaaatcgtatggtatggaacttattgtattggctattcttgccggacaattcctgatcgtacagttcggtggagctgtattccgtacggagccgctcaactggcaaacctggcttcttattataggcgtttcgtccacggtgttatgggttggagaacttattcgccttgttcaacgtattattcacaaaaaaaacagaaatgaaaagtaaaggaataaaaaaccttcttattgatttgggtggtgtacttatcaatctcgaccgccaacgttgcattgagaactttcagaaattagggctccggaacgtggaggacctactggatatccataatccgaacggactcctgatgcaacaggaaaaaggactgattacacccgccgaattccgtgacggagttcgtaaaatgataggcaaagcagtgagcgacacacaaatagatgcagcctggaatagttttttagtagacataccgacacacaaacttgatttattattaaaattacgtgagaaatatgtcgtctatttattgagcaatactaaccaaatccactgggactggacatgtattcatctgtttccctaccgcacatttagggtggaagactattttgagaaaacatatctctcttttgaaatgaaaatggccaagcccgaaccggagatcttcaaggcaatcatagaggatgccggtatcgagccgcaagaaacactcttcatcgatgattccgagatgaactgtaaggcagcgcaaaatttaggaattatcacttatacagcaaaagcaggcgaaaactggagccatcttttcaacagcaaataattttagagatatgcagattatacgtgacacatcggctattaacccggaacccagtgtagctaccatcggtttttttgatggagtacatgcaggacatcgctatctgattcagcaagtgaaagagatagccgccgccaaaggtctacgctctgcattggttactttccccgttcatccccgcaaagtgatgaacacgaattatcgtccggaacttctgactaccccggaagaaaaaataaggctgctggcaaacatcggggtagattactgtctgatgcttgatttcactccagaaatttcccggcttactgcccgagagttcatgacgcagctgttaaaagaacgttaccaggtaaaatacctggttatcggctatgaccatcgttttgggcacaaccgcagcgaaggtttcgaggattatgtacgctatgggaaagaaattggcatagaagtgatccgcgccaaagcatataccagcaatatagaaatagagaacatacccaacgttccggtaagctcttccctgatccgcaaacttcttcatcaaggagaagtggacttggctgccgattgcctgaaatatgaatacttcctggacggaatagtagtaggcggctatcaggtaggccgcaaaattggttttccaacggccaatttaagtgtggatgatcctgataaactgatccccgcggacggggtatatgccgtatgggtgacatttgataaaaagacatatatggggatgctgaacataggtgtccgcccgacgattgataatggccctaaccggaccattgaggtgaatatccttcacttccattcggacatatacgataaattcatccggcttacttttgtaaaacggacacgtcccgaactgaaattctccagtatcgacgagttaatagtgcaactccataaagatgcagaagagacagaagctattcttcttgccagcaaggcaggcagtaacagcagagaaacaaaataaataatataataaccgaacaataataatttaaaaatagattcttatgcaaaagtcatttatgagcatctctttggtggtaatagctatttcgatgttagctatgtttatctatagtttctttacaactaactaaagaccaatgaaaacggctatcaaactgatattaatagaccttctcattgcgcagattgtcgcccctatcctgattatgattccctgtacgatctatttgttagtcaccacaggagatttggataaggttgctctgacgcaaatgattatgattccggcccaattagccggtcagattatgatgggtatttatctatggaaagccggctatatcagtaaaaagaaagcgacatggtcgcctgtatcagtgccattcctaatttgtagcgggctggctattctcaccgctggctttctggtatctgcacttatgggactgctagactggatacccaacatcatggagcaatctttcgacattctccaatccggttggggcggtattcttgcaatagctatcatcggtcctgtacttgaagaaatcttgtttcgcggagcaatcacccgcgctttacttcaacaatataatccgactaaagccattctgatttccgcgcttctgttcggcgtctttcatataaatccagcccagatccttcccgcatttctgatcggtatcctgctggcatggacttattacaaaacaggcagcctgataccttgtatactcatgcacgtgctcaacaactcgctatccgtatatcttagcatcaaatatcccgaagccgagaatatggatgacctgattaacggtagcccgtatctcgtcactctggtcggttcaatcctgctacttatctgcaccatactgaccatgaacaatctgacttccagaaagcaaccataaaaaaagggaagtttttcacttcccctcttttgctttgaatgctagtgcatacattcgtatttgtttcaccatcgacagcaaaccattgctacgcgttggcgacagatgctctttcagcccaatcttgtctataaaataaagatctgtattcaagatttcatcaggagtatgtcctgaaaggactttaatcaataaggcaataattcctttgactatcaaagcatcactttccgctttaaaaacgattttaccatctacatcatccgcttgaagccacaccctactttggcatccttcaatcagattttgttccgtcttatatttttcttcaagtggttcctgctcatttcctaagtcaataagtagttgataacggtccatccaatcgtcgaagtcactgaattctgcaatcacttcgtcctgtaattcattaattgacattataaataattatttaatcctgttatttctcattatagatcacttccaataccgtctggcctactgctttcaacgtattcttatctatatgctccatattgtcattgacggtatgccatgtcggagtaaagtcaccctcctgattatatggaataatatcgattgttttaatacgtgccaagcgattaatgaacagatggtcatcggtaacaaatcctccgttaccatccatgaacgtcttcccgttgccaatcttcttcgccgctttccagactttcttatttatatcgggagcaaattcttcagaatatccctctttcataaacacgctaccttcaccgcccaccatatcgagcaggatgccaaaacgtgcattgtatccctgcacatgaggattgcgtgcccaatactgtgatccgagacaccagaattcctctttatgctgccccgtatagaactgcggcgcaccataatcctctgcatccagcaaaataatatcgatacctaactccggttgttgctgattgaccaagcgagctatttccaataaagcccctacaccactggcaccatcattggcacccaaaatcggagtattatgattcttctcgtcaggatcgttatcagcccatggacgtgtatcccagtgcgcaaacagagcgattcgttttttgctttccggcttataagaaccgataatgtttctcgctttcaacagagttccgtcataagcaatcaaatcggcatattgattagtcacttgagcaccgaaagcctccaactgaccggcaaggtaattgccacaggcaacatgttcttttgtattaggaacacgaggcccgaaatccacctgattctttacatacaaataagcactatccgcatcaaattgaggtacattcactgctgtctcttcgctttgttcactcgtactatttgccttattacctcctccgcaagagaatgctgataataacaaaaaggcactcattaatactatcatagttttctttttcatcgtcctttcatctattagggcttcaaaattagttattttcatcacagcatcgttcagatggaatggtttattaacatataaacttcagttccacatttttctttccgaccacaagttccacttttgcgccatttataagcggcagattatgagtcacgtgtcctaccggaaaattaaagcagaccggataatcatactcttttactaaatccgccaaagctgcatacaattccttacccaacgaacagtcttcttcatattccgtaaattggccgataatcagtccggacagtttttcaagcacgcctcccaatttcaaattatacatcatacgctcgatggcatgcggacgttcgctgacatcttcaataaacagtatcgtcccttctgccggaatatcgtatggagttccccgcaaaccgtatgctaccgccatattaccaccatgcaaaacgccttgtgcagtcccctgcttattcagtttgtgcttctcacacgtataagaagggatatttccaaataagatatccttcagatagttcgtacaaagatcatcttccggttctaccgtaagatgacgggccatcaacgaatgtagggaagcatatccatttttctgaaacagattgtgcaacgctgttatatcgctaaaacccagtaaccatttcggatgttcatgaaaagccgtaaaatcaattttatcaatcaaatgtaccaccccgtaccctccgcgactacacagaatagctttcacctcagggtcgtccatcgcgtcctgcaaatctttcagccgttgcctgattgttccggcatatctcccggatgaacttccggcatattttcccatagccactttcaagccccatgattctatccgtttcttggcgcctttcagaaattgttggtctatcttactcgaaggtgatacaataaccactttatcacctttctgcaaaaagggaggaaattgaatatccatatatattcttatttaattgactttcgttgataaaataccagactgcccggatgcatttgttttcatctgcaaaaatacaggaaaaaacggttccatgcacatccaacagtcaaaacaaatgaaatatagcaaaatgttacataacggatgcattttttcgggttataatcgttattttttcaatcatttttctgatatttgctaaaaatctaacgttatggaacctattctaaattttgcccagctaacggcccatctcaaaaaactaaaccatagaaaacgaattgccgtggtctgcgccaacgatcctaacacagagtatgccatctctcgtgcgctggaagagggaattgcagaatttctaatgattggagattctacaattctgaagaagtatcccacactcaaacaatatcccgaatatgtaaaaactatccatatcgaaaattcggacgaagcggcacgcgaggctgtccgtatcgttcgcgaagggggagccgatattttgatgaaagggattatcaatacagacaacttattgcacgccatacttgacaaagaaaaagggttgttgccgaaaggaaaaatcctcacgcatttggcagtgatggaaattcctacttatcataaactgcttttcttttcggatgctgcggtcattccgcgtcccacgctacaacaacgcatagagatgatttggtatgctatctgtacctgccgccactttggcatcgagcagccgcgtgtcgccttgattcactgtacggaaaaagtgagtgccaagttcccccattcattagattatgtgaatatcgtagagcttgccgaagcgggagaattcggaaatgtgattattgacggcccgctggatgtacgtactgcgtgcgaacaggcaagtggtgatattaaagggattgtatctcctatcaacggacaggcagacgtactgatattcccgaacatcgaatcgggcaatgcattctacaaatctgtctccctgtttgcaaaagcagagatggcaggattactgcaaggtcctatttgtcctgtagtacttccgtcacgtagcgattccggcttgtccaaatattatagcattgcgatggcatgcttacaagtgtcaggagattgcgagtgcagaaaacaggccagtcaggtcaccaactcatcattctaaattcaccatttaaaactcaccattcatgaaaatactggttatcaaccccggctctacttctacaaagattgcggtttacgaaaacgaaactccgttgtttatcagcaatataaaacattccgtagaagagctatctgcgtttcccgaggtaatagatcagtttgaattccggaaaaatctggtattacaagaattggagaataacaagatccctttttcctttgacgcaatcattggacgcggaggtttggtgaaaccgataccgggcggagtgtatgaggtgaacgatgccatgaaacgtgatacagtgcatgccatgcgtacccatgcctgcaacttaggaggactaattgccagcgaactggccgccaccctacccgattgcccggctttcatcgctgatccgggagtggtggatgaactggaagatatagcccgcattacaggttctccgttaatgccgaaaattaccatctggcacgccttgaaccaaaaagcaatcgcgcggcgtttcgccaaagaacaagggacgcaatatgaagatttggatttaatcatctgccatttaggaggaggtatttctgtcgcagtccatcaccatggaagagccatcgacgccaacaatgcgttggatggtgaaggccctttctcaccggaacgcgccggcacacttcctgccggtcaactgatcgacctttgttttagcggtcagcataccaaagacgaattgaagaaacgtatctccggacgtgccggattgactgctcatttaggtacgaccgatgtgcctgccatcatccaatcgatagaagaaggagataaaaaggcggaactgatactggacgccatgatttataatgttgcaaaagcgataggcgccagtgctactgtactttgcgggaaagtagatgctatcctcctgacaggaggaatcgcttattcggactatgtggtttcaaggctgaaaaaaagaatctctttcctggctcccatctatgtttatccgggagagaatgaaatggagtcgttagcttttaatgccataggagcattgaaaggagaattgccgatacaagtttataagtaacataaactattgatttatcggtttcaccttattttactttatacttttatctgttatctccttatttatcagcatttcaagaattaggtaaaatggatgaaccgcaaaccttacaataacatttatggtacttatttcttaagaaagagttacctcctccaataaaacaagctcccagctacgccaaacaatagtaattaacttcagttcacctttcgccttggcttctgccaccagctcatcttcactataacgaagtaactgttcgcgcgcctcatcagcaagggcacgtatttctttttccgaagcaccggcttttgcatatttcacctcaagcagataggtgaaaggaggaagtacgggaaccgacagactaggtttgaagaagaaatctgcaaagcctttattcaattcgtattccggataaagttgataataacgatacattcctaaataagcaagcaagaagcctttaatgtgcgcttcaccttcaatatattcacgaatacggctttgctcacgaacagcgttggcgataaaatcgaacaaaggtttccaatctcctctgaaagccatattctcaaataaagcactcatcttgttcatgtctattttaaagatatcatgcttgatgtagccttgtatcaagaagttaaaaagctgttctcttacaactaaattcggtacatgcaggatgggtcttcccaccatatctacacctttgatggaaagaagtccgaaatagaataataaagacttgaaattactggggtccgtcatctccaatgcagaaaaatgagtaacaatgtcagtaataatctctccttgctcggctatttcctttataacagaaaaattctctcccaatccatgatctaattttatcaagtatgccaacttgttaaagtcagtgcgaatgttagggtctacaatttctttaggctttttatgatgaagtacaaaagatttcagaaaataaagtgccatgtcagaattaaacatacactgttccaatgtatcttcactaaagcaataattgtcataattgggtttcatcatggcaactatttcatctatagattcttgaagtactccctgctctttataatattccagcatctcacgcaactcattctcactgaatccaaccaaatcattaaaccatgaatcatttgtgatattggttccgatgttaaagccactagttacatcatccatcgtcaccggactcactccggtaataaacaaccgttcaagagcagctccggttccggtagtggcagattttatcacgttaaagaagccacgaataaaaccttcgccatgcgttgctttcctgtaaaactccgtaccgtaagttgaaagaatggtattggtgaaattatcgtattcatcaataagtaaataaatacgaatatttttcttacgggtagcataggaattaaccgcagacagaaaagcaccgggttcttcttgtattttctcatcaagaacatcccaaatttcttttcctaacaaatcttcatacttaaagacaaaatctttaagtttgctacaacaatgtagcttaaacgatagttctacttcgttgacattggaactcacttccgaaaaattaaatcgcatgatgagaaactgattgtgaagcttcgtcggatgctgacctatgtatagctgaccaaacaactcgtcaaactgttcagcatgatttacgtcataataggcctctaacatagccaaagtcagactcttcccaaatctacgaggacgtatcagaaacagataaggcggttgcatctctattttttcaatgaacattgtcttatctacataataataattctctttctgaattcggctaaaatcagttattccgtaaggtatttgtttcatcatattgcgattcctttcaatttatctgtctcttatttctgcagacttttttcaatattctgcaaacggcgttctaatgctgcatacttttcatccttttcttttaaaagacgctcgtagagttcagtgattttgtcgataggattgaagttgttaactcgactatcattaatactatcttcggtatcagacttaactatacccatgctgatgtttgccccacctgcactttgttctgaattattcaccgtattattttcaaacaccaccgtctgtgcatcctcctccaaagtcttgagataatcgaaagggacattcaatgcacgtgcaaagcgttgcaacatctcatcatcaatcaccttcatcttctcatatttagaaacagcaggttgtgagagatgtactaattcactcaaaccctcctggttcatattcttttcaatacgggtacgacgt

SEQ ID NO: 8098 - DNA, 18861 bp, Unknown
  gut microbiota DNA sequence
atgaatggctcccatacgttgcctgaatttaatagaggcgatcataacggtgttgtccattaattccagattggtaaccccggcaaaaggtaattgttgaggaatatagaaaccggggacttcaccaccaatggcattttgtagcggataaggaaaatcccttccgatcaggatacgtccgtaaatggaaggaatgactgcaaaacggcgggttacaggaatgacgcttgcccacgaagcattcagtgctgaaaatggagcgtgttcgttgtattgtgccgtattatccgtatagagtgaataggcggctctgaagtcacttcctttagaagggaaacgtcctttatcgtatgtattatattgcacttgggcaaaataacttaggaaatgttccgattctactttcaggtcggagatttcaggtttcttaaacaggaaatccttgtatttgtaatattcaaaacgaagaccgagtccgaaacggaaattcttgtaccatacatcagagaagccgaattcggccagatgatatttgtaagttgtattataggcacggtcaccttcctcgtaaatgttgatatcgttgtattggaacatatacgagaagttgaaattacgttgctgcatgggttccagcgtatagtctatgcgggcagcatatcgtttacccaatcgaccggtaagagccaggcgggaaggaatatgagttttgaggtctgccgttgcattcaccaacaaagacgcgatttcttccgaatcgaaacggatgcccagattgattcttctttcatatttttcctgcaacaggaagttgaggtgataaccttcaggagtctctttcaacgtatagctggcactggaataggattggctaccgcgtaattgatacaaggcctgttctatttgttgagtggtaatgtcactgttttctttcagattacatttcttcatcagccattttttatcatccacctctacaccggaaaatgagatgtccgtcacataaactgtgcgtgcattggaaagagaagaataagggccatgttgcttcggagtataatcttcggctattcctatcttctttttcaaggcaagcaacgaattccattgttctttagccgcttcttcgcctcttcgcatcagagtgtcgatggctgccggggtaaaactggcagatgaatatccctccacattgacacggatataagtgtctgtgaggtctacattcttttcgtggttagactggcaggtgatgtctacaatctgccccagaatatcggggacgctgttgagcttgtcagccttcttcaaagcattctgcacgtctactccgataataatatcggctcccatggcttttacaacatctgccggatagttgtttacaatgccgccgtccactaataccatgctgtcttgccgtaccggagtgaatacacccggaatagccatgctggcacgcatagcggttgagagtattccgtcatggaatacaatttgctctccattgacaacattggccgctacacaggcaaaaggaatgggaagtttattgaagtcgatggagtcatgataccccacagtgagatctgaaaataggttagccagattttgccctttcatgagtcctccggcagcagcatccttgggagttttggtgaaagggatagagactgtatatttttcagaccgctcacgatcagtcaatgacatggcacttcgtttgatacggtcgctcaacaggaatgtccaatcttgttttcgtaccatgctgtccaattgttccgtagtataaccgatggcatacagaccacctacgatagctcccatactggtgccggctatatagtcaataggaattccggcttcctcaattactttcagtgctttgatgtgtgccattcctttggcaccgccaccgcttagaacgacacctacctttttcctttgctcttgagaatgcaaagaaaaaggcaataagatgccaattgataaaactaatgttgaaaagatttgttttttcattaggatgtggtctagtgttgatgtttaatataatacaaatgtagagcataatttgtttagttgttgaaataggaactaaaaaaaatgttccaaaagtcggaaatgtggattttttctacaccatacagtgaatttccacactttctgcaaaacgaagaaatatctaatgctttgattttaagcaaataatgcagctaacgcatttttggtatatgagttgtaaataaggatatagaacaaacataagttaaattaaataataagattcgatatgagattattcttttcgaaacatgagttgaaactgaggagaaagagaaccattgctgctattatatgtatggtagttgtgttgggtgtgtactggatactgacccgacctcagaaggctgcgccggaaatgccgacagtcattgttgaaccggtagtgaaagacgacgtagagatatacggggaatatgtggggcgtattcgtgcccaacagttcgtcgaggtacgtgcccgtgtggaaggttatctggaaaatatgctttttgccgaaggtacatatgtcaataagaatcaggttttgtttgtaatcaaccaggaccagtatcgtgccaaagcagataaagccagagcacaattgaaaaaagacgaagcgcaggctttgaaagcggaacgtgatttaaaacgtatccgtccgttgtttgaacagaacgctgcaagccagttggacttggataatgcggaagctgcatatgaaagtgccgaggcaacggtagccatgagcgaggcggatttggcacaggctgaactggaattgggttataccattgttcgttcgcccttatcgggacacattagtgaaagaaatgtggacttgggtacattagtcggtcccggaggaaaatcattgcttgctaccattgtgaagagtgatacagtgttggtggatttcagtatgacagcactcgattatttgaagagtaaagaaagaaacattaatttgggacagcaggattccacccgttcctggcagccgaatattaccattacattggcggataataccgtctatccatttaaaggatatgtggattttgccgaaccgcaagtcgatcctcaaaccggaactttctctgtacgtgcagaaatgccgaatccgaaacaagtattgttgccgggacaatttacaaaggtaaagttgttgctggatgttcgtgaaggtgcactggttgttccgatgaaagccgttaccatcgaaaagggtggagcatatatttataccatgcgcaaagataatgcggtagagaaacgttttatcgaattaggaccggaagtcgggaataatgtggtggtagaaagaggactggcagaaggagagatggtggttgtagaaggattccataagttgactccgggcatgaaagtacgggtcagtgatccggaagccgaagctggggacagtataactacgacaaaaaatgaagtgaccggagtaaaagaaaacactaccggaacgaaggataacgcgaaaggagaataaacgatgaaagttactttttttatagataggccggtcttctcggctgtaatctccatcgtgattgtgattgtcggtattattggcctgacgatgcttccggtggatcaatatccgcagattactcctccggtggtgaagatcagcgcatcctatccgggtgcgagtgcacttaccgtgtcgcaggcggtagccactccgattgagcaggaaatcaatggtacgccgggtatgctttatatggaatcaaacagttctaactccggaggtttttcggcaacggtcacttttgacgtatctgccgatccggatttggcagccgttgagattcagaaccgtgtgaaactggcggaatcccgtctgccggcggaagtcattcagaatggtatttcggtagaaaaacaggctcccagtcagttgatgacgctttgtttgacttctactgatccgaagttcgacgaaatttatttgagtaactttgctactatcaatgtgctcgatgtaattcgtcgtattcctggggttggacgtgtatctaatatcggtagccgctattatgcgatgcagatatgggcgcaacccgataagttggcaaactttggactgaccgtacaggatttacagaatgcattgaaggatcagaaccgcgaatcagcggccggtgtattgggacaacaaccggtgcagggactggatattaccattcctattacgactcaaggacgtttgtcttccgtgggacagtttgaagatattgtagtgcgtgccaatgccaacgggtctattattcgattgaaagatgtggcgcgtgtatcgttggaggcctcttcctataacacggaaagtggtatcaacggcgagaatgccgctgtgcttggtatttatatgttgccgggagcaaatgcgatggaagtagccgagagggtaaaagaggctatggatgagattagcaaaaattttccggaaggattgagctatgagattccgttcgatatgacgacctatatttccgaatctattcatgaagtatataagacgttgtttgaagcgttggtattagttgtattggtggtttatctatccttgcagagctggcgtgcaacgttgattccagtagtagcggtgcctatttcattgatcggtactttcggattcatgttgattttcggtttctcgctgaatatactgacattactcggattgattcttgccatcggtattgtggtggatgatgcgattgtggtggtggaaggcgtagagcatatcatggaaacggaacatctaagcccatacgaagcaacgaagaaagcgatgaacggacttgctagtgctttgattgccacatcactggtattggcggcagtgttcgttccggttagttttttaagtgggattacagggcagttgtatcgccagtttacggtgacgattgtggtgtccgtacttatttctacggtagtggctctgacattgagcccggtgatgtgttcattgattctgaagccggataacggaaagaaaaagaatatcgttttccggaagattaatgaatggctgggcatcggtagcaataaatatgtggctgccgtaactcgcaccatcaagcatcctcgccgagttttaagtgcttttggtatggtattgatcgctattatgctgattcaccgtattattccgaccagttttttgcctgtggaagaccagggatatttcaaaattgaattggaactgccggagggagctactttggaacgtacccgtatcgtaacagaacgtgccattgcttatttggaaaagaatccatatattgaatatatacagaacgtaacgggaagtagtccgcgtgttggaagtaaccagggacgtgctgaactgacggtgatcctgaaaccttgggaagagcggaagaacactactattgaaaagattatggatacggtggaaaaacatttgagggaatatcccgaatgtaaagtctatctgtccactcctccggttattccgggactaggtagctcgggaggttttgaaatgcaattggaagcccgtggagaagccactttcgataatttggtagacgcggcagatacattaatgtactacgcatccaagcgcaaagaactggctggtctgtcatcttctttgcagtcggaaataccacaactctatttcgatgtagaccgtgacaaagtaaagatgctgggtgtgccactggctgatgtgttctctaccatgaaggcttataccggttcggtgtatgtgaacgactttaatatgttcaaccgtatatataaggtttacattcaggcggaagctccttaccgggaacacaaagacaacatcaatctgttcttcgtgaaagcctccaatggagcgatggtaccgttgacttctttaggaaatgcctcctataccacaggaccgggaagcattaaacgtttcaatatgtttactacggccgttattcgtggagcagctgcgcaaggatatagttccggacaggcaatggagatcatggagcagattgcccgtgaccatcttcccgataatatcggtcttgaatggagtggcctttcttatcaggagaagcaggcgggaggtcagacaggtatggtgatggcattggtattcctgttcgttttccttttccttgctgcgcaatacgaaagttggacagtgcctattgccgtgttgctttctttacctgttgccgctttgggggcctatttaggagtctgggtttgcggattggagaacgacgtctatttccagattggtctggtaatgttggtgggacttgccgctaagaacgcgattttgattgtagagtttgcaaaagtacaggtagataaaggtgaagacttggtgcagtcggctatctatgcagccaaattgcgtttccgtccgattctgatgacttctctcgcattcgtactcggtatgcttccgatggtattggcaagcggtccggggtcggcaagccggcaggcaatcggtacaggtgtatttttcggaatgatatttgccattgtattcggtatcattcttgtgccgttcttctttgtgatggtgtataaaacaaagtcgaaaattttaaaacataagaaataatgaaacgaaagaaactatatattgctatcctgttacttgccggggtcttgacttcctgcaaggtagggaaaagctatgtccgccctgatcttcatttgcccgacagcttggaaagagcgcaagactcgatcagcttcggcgatcaggactggagggatatttatacggatgctaccttaagaagcctgattgaacgtgcactagatcacaacaaggatatgttgattgccgctgcccgtgtgaaagaaatggcagcacagaaacgtatttccaccgctgcgttacttccggatatcaaaggaaaagtaacggcagaacgtgaactcgaaaatcatggaggagatgctttcaagagatcagagacctttgaagcacaatttctcgtttcatgggaacttgatctttggggaaatctgcgttgggcacgttcggccagtattgccgagtatctgcaatctatcgaggcgcaacgcgcattgcggatgacgattgttgctgaagtggcacaggcttactatgaactggttgctttagatacagaactggacattgtaaagcaaacattgaaagcccgtgaagaaggagtacgtttggcacgtatccggtttgccggcggattgacttccgagacttcttatcgacaggcgcaggtggagttggcacgtacggcaactttggttcctgacctcgaacgtaaaatctccctgaaagaaaacgatattgcctatcttgcgggtgaatatcctaataagatagcccgttcccgtttgcttcaggaattcaactctccggaaacacttcctgttggattgccgtctacattattggaacgtcgtcccgacatccgtcaggcagagcagaaattgattgctgccaatgcgaaagtgggagtggcctatacaaatatgttcccgcgtcttgccctgacaggtggtttcggtagtgaaagtacttctttgtcggaacttttgaaatctccttatgcagtgatggaaggagctttgctgactccgatctttggctggggaaagaaccgtgcggcattgaaagcaaaaaaggcagcttatgaggctgaagtacatagttatgaaaaagccgtactggaagctttcaaggaaacacgcaatgcgattgtcaacttcaacaagatcaaggaagtgtacgaacttcgtgccaatctggaacgttcggccaagagctacatggacctggcacaactgcaatacatcaatggggttattaattatctggacgtattggatgcccaacgtggatattttgatgcacagattgggttgagtaatgctatccgtgacgagttgattgcggtagttcaactctataaggctcttggtggaggctgggaacaaaatccctagaattatcatatcgattcactcattgaagaaaacgtaaaggctatctcccgcaccgggaggtagccttaatttttctttcttcttccttttgtcttaaaaacaacaacagaagaattttcataattcggaaaaaagtgcgaaatttgcaacgcttttcaagtttgacaagaaacttactaacacctttaaataaaaaattaaagaaaatgactaaaagtgcattgcaaatcgcaagggctgcttaccagcccaaacttccgaaagcattggcatcaggagctgttaaggctgtagcaggtgctgctactcaatctgtagccgatcaggaagctatcaaagcattattcccgaacacgtatggaatgccgttgattacattcgaagctggtgaagctgttgctcttcccgctatgaacgtaggtgtaattctttccggtggtcaggctccgggcggacacaatgtaatctccggtttgttcgacggtatcaagaaattgaacccggaaaacaaattatatggttttattctgggtcctggtggtctggtagatcacaattatatggaactgactgctgatattatcgacgaataccgtaacactggtggtttcgatatcatcggttccggacgtacgaagctggaagcagaaagccaattcgaaaagggatatgaaatcatcaaagaacttggcatcaaagcattggttatcattggtggtgacgactctaacacaaacgcttgtgtattggctgaatactatgcagctaagaactacggtgtacaggtaatcggttgcccgaaaacaatcgacggtgacttgaagaacgatatgattgaaacttctttcggtttcgatacagcatgtaagacttatgcagaagtaatcggtaacatccaacgtgactgtaactctgcacgtaaatactggcacttcatcaagttgatgggtcgttcggcttctcacatcgcactggaatgtgctttgcaggtacagcctaacgtgtgtatcgtgtctgaagaagtagaagctaaagatatgtctttggacgatgtagtgacttacatcgctaaagtggtagctgaccgtgccgcacagggaaacaacttcggtactgtattgattccggaaggattggtagaattcattcctgccatgaaacgcctgattgctgaattgaacgacttcctggctgctaatgctgaagaattcggtcagattaagaaatctcaccaacgtgattatatcatccgtaaactttctccggaaaactctgctatctacgcaagtctgccggaaggtgttgctcgtcagttgactttggatcgtgacccgcacggaaacgttcaggtatcactgatcgaaaccgaaaaactgttgtctgaaatggtagctactaagttggctacatggaaagaagaaggcaagtatgttggtaaatttgctgctcaacaccacttcttcggttatgaaggacgttgtgctgctccgtcaaactttgacgctgactattgctactctctgggttacacagcctctatgttgattgctaacggtaagactggttatatgtcttctgtacgcaacacaactgctcctgctgccgaatggattgctggtggtgtgcctatcactatgatgatgaacatggaacgtcgccacggtgaaatgaaaccggttatccagaaagcattggtgaaactggatggtgctcctttcaaggcatttgctgcgcaacgtgatcgttgggctatcgaaacggattatgtatatccgggtccgatccagtacttcggtcctacagaagtttgcgaccaggcaactaagactttgcagctggaacaagctaaataaatacacttcagagcagttgttgatgtaacagttgcaataacagctgcaatgaaagattctttcaggcacggattacacggaatacacggtttataagaaataactaaaaaaccgtgttaattcgcgtaatccgtgcctatctctaaaaacattgatcgtttaaagtaaatgccgcaacgcaacaacccgatgtctgctgtacagaagaaaagaactgtttccactaccaagaaaaagggaacgacctcttcttccaaaacttcccgtacctcaaaaaaggaacagatgaagcatcgaactgtgatgcctgtctggattcgtaacattttggcagtgatgattgttggttgtttttccattgctttctattatttctttatccgtccttatgcttatcgatggaaaccttgtcatggtttaaaggaatacggagtttgtatccctgacggatatgatattcatggtattgacatttctcattaccagggaaagattgattggaaaagactgttgcaaaataaagagacggctactcctttgcatttcgtttttatgaaagctacagaaggaggagatcataacgacacaacctttgaggcgaacttcgccaatgcccgtaaccatggatttatccgtggtgcttatcatttttatattcctggtacggatgctttgaaacaggcggacttctttattcgtacggtgaaactggacacgggtgatttacctcccgtacttgatgtggaagtgaccgggcggaaggaaaaaaaggaattgcagcaaggcattaaacgctggctagaccgggtggaatctcattatggagtgaaacctattctttatacttcttataaatttaaaacccgttatctggacgattccatcttcaatacatacccttactggattgcccattattatgttgactctgtaaagtatcaggggaaatgggacttttggcaacatactgatgtaggaagtgttcccggtatcaaagaagacgtagacctgaacgtgttcaatggctcgttagaggaacttaaaaagctgacaattaagtaacaggtatttcttttcccaacaacttatctcttctctcatttgttataatcgtattattactaaaaaagatacgattatgaattttgatatagctattattggtggtggtcctgccgggtacacagctgccgaacgggcaggggccaacggattaaaagccgttctttttgagaaaaaggcaatgggtggagtgtgtctcaatgaggggtgtattcctactaaaactttgttatattctgctaaaatactggatagcatcaaaagtgcttccaaatatggcgtttctgccgaatctccttcgttcgatttatccaagattatgagccgcaaagacaaaacagtgaaaatgttgacgggtggcgtgaagatgactgtgaattcttacggagtgacgatcgtggagaaagaagcttttatagaaggagagaacgaggggatgatccgcatcacctgtgatggagaaacctattccgtgaaatacttgctggtatgtaccggttccgatacagtgattcctcccataccgggattgtcgggagtcagttattggacttccaaggaggcgttggagataaaagaacttcccaaaacgctggttattattggcggtggagtgatcgggatggaatttgcttctttctttaacagcatgggagtaaaggtgcatgtggtagaaatgatgccggagattttgggagcgatggataaggaaacgagcggtatgcttcgcgccgaatatgccaaacggggagtcactttctatttgaatacgaaagtagtggaagtgaacgctcatggagtcgtgatagaaaaagaaggaaaagtttccactattgaagcggagaaaatcttgcttagtgtaggccgtaaggcaaatttatccagagtggggctggacaagctgaatatagaattgcatcggaacggggtcaaagtagatgaacatctgttgacttcgcatccccgtgtatatgcttgtggggatattacaggttattctttattggcacataccgctattcgtgaggcggaagtcgctatcaatcatatcttgggagtggaagaccggatgaattacgattgtgttccgggagttgtttataccaatcccgaagtggcgggcgtgggaaagacagaagaagaactgataaaatcaggactttcttatcgtgtgtccaaattgccgatggcttattccggccggtttgtagccgagaatgaacagggaaacggcctttgtaagttgattcaggatgaagaagggaagatcatcggttgccacatattgggaaatccggcgtcagaacttattgtgatcgcaggtattgctattcagagaggctatacggtggaagaatttcagaagactgtatttccgcatcctacggtcggagagatttatcacgagattatgttttaactcttattctgtctgacctatgattcgatgtatctatactccgtttactgatatttactttcacttggctgcagaagaatatctgttgaagcagggaaatgaagacattttcatgctttggcaggacactccttctgtggtaataggaaagcatcagcggttacggtcggaagtcgatcaggaatgggcggaacgggagcaggtacatattgcccgtcgtttttccggtgggggagcagtgtaccatgatttgggcaatgtcaatctgacttttatagaaacgactccccgcttgccggagtttgtcacgtatttgcagcggacgttggatttcctgaactctatgggactgatggcaacaggaggcgaacgattggggatttatctgaatggattgaaaatatcaggaagtgcgcaatgcctgtacaaggatcgggtattgtatcattgcacgctattgtatgatacggaccttacagcgttgcatcaagcattgaatccggaaccgatggtcgatgatgaaatgttgtcgtctgtatatgctgttccttctgttcggagtgaggtgaccaatatccgcaggcatttgtcggcggggactgtcactgatttcaaagaaaaggcttttcagtatttcagtaagtcgcaatctgtcagtgctttcactaaggaggagatagaagctgtcaatcagctccgggaagagaaatatattcagaaagagtggatatatagccgttgatgcttggttgtaccgattggcgtccggttaaaatttacttaacttaaaactttctatttcagcccattgttgtaatatatctaaggttgaataataaatttactgtctatgtcaaaattcgaaataaaaatgcctaagttgggcgagagtataaccgaagggaccattgtctcttggtctgtaaaggtgggtgacatgattcaggaagacgatgtgctttttgaagtgaatactgctaaagtaagtgcagaaatcccttctcccgtagcgggaaaagtggtggagattttatataaggaaggtgacaccgttgctgtaggaacagttgttgctattattgatttggatggcgaagaagcatccggcacggagtcggcaagcgaaggtactgcaaatgaaggagccgatgctggccaggttgctgctgatgtttccggaacatcacaatcagcagcagacattgctaagagtcaatcagtgaatactgcatcaacccccgttgatacatccaaacccgttgctgttgaggaagaacgttggtattctcctgttgtgattcagttggcgcgggaggctaagattccgaaagaagagttggatactatacaaggtacgggttatgaagggcgattgagtaagaaagatataaaagactatattgaaaagaagaaaagaggcgatatggctgaaccgaagccgacctctgctgttgctgctccggctgcaaacaaaccgtcggtggttgttgctcccgaaccgataactccgaaaacgtctccggctgcatctgcccctgctgcacagtcggctgctacttcatccaaatcgtctgctcctgttgccatgcctggagttgaagtgaaagagatggatcgtgttcgccggattattgccgaccacatggttatgtctaagaaagtatctcctcatgtaaccaatgtggtagaagtagacgtcaccaaactggtgcgttggcgtgaaaagaacaaagatgctttcttccgtcgcgaaggagtgaagttgacttatatgcctgtgataaccgaggccgtagcgaaagcattggcagcctatcctcaagtgaatgtgtcggtagacggatataatatcctctttaagaaacatatcaatgtaggtattgctgtctctctgaatgatggaaatctgattgtgcctgtagtgcatgacgccgatcgtttgaatctgaacggtctggcagtagccattgactctttagccctgaaagcaagggataataaattaatgccggaagatattgatggcggtacatttaccattaccaatttcggaacgttcaagagcctgttcggtacaccgattattaatcagccgcaggttgctattttaggagtagggtatatcgagaagaaacctgctgtgatagaaacaccggaaggcgatacgattgccatccgccataaaatgtatctgtctttgtcttacgaccatcgggtagtagacggaatgttgggaggtaacttcctccactttatagccgactacctcgaaaactggcaaggctgataactgattgtttcactcattaagaacttcattcactatgaaaaagaaatatgatataaaaacgacagatgtagaaaccctgaaaaagtggtatcatctgatgacattggggcgtgctttggatgaaaaagcaccgtcatacctgctgcaatctttgggttggtcttatcatgctccttacgcggggcatgatggtattcagcttgccatcggtcaggtattcactttgggcgaagacttcctgtttccttactaccgcgatatgctgactgtactttctgccggaatgactccggaagaaatcatcttgaatggtatctcgaaagcgacagacccaggcagcggcggacgtcacatgtcgaaccatttcgccaaaccggaatggcacatcgaaaatatctcttccgctacgggaacgcatgaccttcatgctgcaggtgtggcgcgggcaatggtatattatggacataaaggagtcgccatcacttctcacggagaatctgccacttccgaaggctttgtatatgaggctatcaatggcgccagccttgaacgtcttcctatcatttttgtgattcaggacaacggatatggtatctctgtccctaaatcggaacagacagccaaccgcaaagttgcggaaaacttctccggtttcaagaacctgaaaatcatctattgcaatggaaaagatgtattcgattcgatgaatgccatgaccgaagctcacgaatatgcaagggaaacccgtaatccggtgattgtgcaggccaactgtgttcgtatcggttcccattccaactcggataaacataccctgtaccgggatgagaacgaactggaatacgtaaaagatgccgatccgttaatgaaattccgccggatgttgttgcgttacaaacgcctgacggaggaagagttgcaacagatcgaagctgacgcaaagaaagaactgtcggttgccaaccgaaaagcgttggctgctcccgatcctgatcctaagagtatctacgattttgtgatgcccgaaccttatcaaccccagaagtacaaagaaggtactcatgaagcagagggcgaaaagacctttctggtaaatgctattaacgagacattgaaagccgaattccgctacaatcccgatacgtttatctggggacaggacgtagcaaacagagagaaaggcggtgtgtttaatgtcaccaaagggatgcagcaggaattcggcgaagcccgtgtgttcagtgcgccgattgccgaagattatattgtaggcaccgccaacggaatgagccgctttgatcctaaaatccatgtcgtgatagagggagcggagtttgctgattacttctggcctgccgtagaacaatatgtagaatgtacgcatgagtattggcgcagcaatggtaagtttgccccgaatataacgctgcggttggcttccggaggttatatcggtggagggctgtatcactctcaaaatatagaaggagctttgactacattgccgggagcacgaattgtctgcccttcttttgccgatgatgcagccggattgttacgtactagtatgcgctctaagggatttactttgtttcttgaaccgaaagcattgtataattcggtagaagccgccactgtggtgccggaagactttgaagtacctttcggaaaagcacgtatccgccgtgagggtacggatttgagtattatcacctatggaaatacgacccatttctgtctgcatgctgccgaacgattggagaaagaggatggttggaaagtagaagtgatcgatattcgttctctgattccgctggataaagaggcaatatttgaatcggtcaagaagaccagcaaagcattggttgtacatgaagataaagtattctccggtttcggtgcggagcttgcagcaatgattggtgaggaaatgttccgttatcttgacggaccggtgcagcgtgtcggttctacgtttactcccgtcggtttcaatccgatattggaaaaagaaattttgccggacgaagctaagatatacgaagctgcacggaaattattggaatattaaaagagaagaattatgaaaaagataggtttgttttatgctaccaaagccgaaagaacgagttgggtggcagagaaaatacagaaagagtttggtgaagacaagatagaagtagtgcctatcgagcaggcctggcagaatgattttgcagcttatgactgcttcattgtgggtgcttccacttggtttgacggggaacttcctacttattgggacgaactgttgccggaactccggacaatgaaattgaaaggtaagaaggttgctatcttcggtttgggagatcagatacgttatccggaaaattttgcagatggaatcggtctgctggcagaagtttttgaaggggatggggctactttggtcggttttacttcttccgaaggttacactttcgaacgttccaaggctttacgtggcgagcagtggtgcgggttggttgtcgatttggataatcagtccgaacaggcggaaaagaaaatcaaagcatggtgccaacaggtcaaaaaagagttcgcgtaacgactttatttctctttataagatagtgacgctatccaatgcaaatagtgacggtatatgctatggatagcgtcactatcccaagcatataccgtcactattttttttctgcattaatctggagccttacgcttgtttatagcgtatatcgactgcgatttttgcttgcttccttatatctcttaatgataagggagctttctcttttaaagatatttgttggctcttatcctttataaataaatttcacttctgcccaacgattcttctctttataatgaacgaaagtcagtccgttcttctccgcttcttcgcggatggcggcaatgtcgtctacataaaatccactcatatagagttcggaattcgtatgcatacaggcaacatattgcttcatatcatttagtaatatattccggttgatgttggcgatgataacgtcaaaaggtccttttcctgcaagcgacgaggcatctccttctgatacggcaatatcgtctacgtggttcaattcgatgttttcgatggagtttcgtacgcaccattcatcaatgtcgatggccgtacagggacgtgcgccccgcatacgtgcgaggatggcaagaatcgaagttccgcagcccatatcgagcagggatttatctttcagttcgctgtccaataattcttcaatgatgaggctggtagtctcgtggtgtcctgttccgaaggccatttgaggattgatgacgatgtcatattccgctttggggacatcttggtggaaagtgctgtggatcacacatcggtttccgataatgatgggttggaagaaattcttttcccattcctcgttccagtccttgtcttccgcttcggtatatgtataagtaatatccgtatcgggtagggggaactcgttgatggcaatcttgatggcgttttcatcacacaatgtctgttggatatatgcggtcagtccgccttcacactcaacaaaactctcaaatccgacttcacccagtatggcagccagtacgtcattgacggtttcggtacaaggctgggtgcggaatgtgaactcaaaatacttcatagttgtttttaatgctggtgaataatgtgcaaagatacagcaatccgggtatagaaagtcaagtttgcctgaactttatgccggtgagcgttgtatcttctacaaagatagttagaaatagggatttccctattatcctttggggaaaatctcccccggacgaaaaatctcttccttatctttgtaacgtgaataagtttaagtaattacataaaccgagatgatatgaaaaagattgtttatttcttgctatttgccttgtgccttccgataggtatctttgcacaaagcgttgatgacgacctttacttcgtaccttctaaagacaaacaggagaagaaagaaactccagttaagaaggaaccgaagaaacaggtgacgactaacatctatacttcaccgggtactacagtggttgttcaggaccgtaaggggagaacacgggatgtggatgaatataaccgccgttacgatgcacgtgaaaatgaattcgtaatggataatgataccttatatataaaagaaaaatct

SEQ ID NO: 8099 - DNA, 6965 bp, Unknown
  gut microbiota DNA sequence
ctttggcatcttcataggcagatacattaaaagaagtaccgagtactttcacttccaaatcgcctacctgtacaataaaggcgcgcttttcatcatgagctactttgaaataggcttcaccattcagttgcacacgacgcacattttctccgaagttattcagatagcttaattgcgaagcagaattgagaacgacattcgttccgtccggcaattcgatggttgctttatctcctttatcagcttttactataaagggcgctcccactgtttgggaagaatctacaagatagtaggtgaagaaggcaatacaaatgggtaaaacgatggcggcagcccatttccaaggattcatacgaatagttcttgggttctcttttccctgtgtttcttcttttccctgcgtctgttctttgattcgggcaaatagtttatcgcgcagtaccggattaatgccggcatccgatttggaaaattcttcttcccaccagttctgtaaatggcggtcgttctttatccaatcggagagcttttttatttcagcatccgttatatttccatcgaaatacttttcaatcagttctttataatatatcttatccatcttctttcctgcttatttacaagtatacattttcatcctatctactatccaaaaacgtgtattacaattacatttcattaacaaaaaaggcgatcagaaacgcaattaccttatcgtaatgcttcatcaactgctcacgcataaacttcaccgccaaagataattgtgtggcgactgtactttcagaaattcccatcatttcagcgatttccttattcgtatagttctgacgcttacttaagataaagactttctttcgctgtgccggcaattcttccgctaatgagtcgatatagtcgttcaagaaatgaagatcaatagtatcttccgtctgtgaatcatggtctagtccgcttttcagcagatattcattgtaaacatattcaacggtctgacgctggtacatattcatcagtaaatttttggctatcgtacaaagaaaagaaataaatgaagcgttcgtatcgactttctcacgtacttcccatatacggataaaagtggattgcaccacttcttcagccatatattgattgccggaagaaagccgcataatgaaattgtacagtttaccgctgtacatattatacaatctttcaaatgcttgaaaagaaccgtcttttaaatcgattaataaatgtttttcatctgtaaaattcaccatagcttagaattttgcaacaaaggtatgcaaccatagaccattaacaggtgacaatattattaatattttctcaattatccgatttttatgaggaaaaagatactaatatcaggatagtgacgccatccggtcaagatagtgacgctatctaatcaggatagtgacgccatcttgaacggataccgtcactatgttcagtaaggtagttcgcattaataagtcaagcggataccagcctgtatattgaaattaaacggattctctttacgtatggtctgtatatccgaaccgtcatcaaaataataagcaacaccgggttctacatagatacccagacgtttcgttgcgttcacctgtgcacctaccgcaccagataccgagaattgcaaaggtttcaccgtttctttctcggaaccaagctttccatacacacacttctcaaccatacctccaccggaaacgtagagagtgacgagttttttatcaaggaaattccagttggcacgcagcggaatacctacataatgaagtttttgttctatctgctgctcttcacctgccagtttcgcatccgaagaaagcaatgtgtaagtcaatcccgtttcgagagagaatcctttggccagtcctttacggacggacaatccgaaagaaataggttgatggtgcttaatgtcaaccacttgttttgcctgacgcagataaggcactccatcttcaaaaaccaatgtctgatcattaggtatctccatcagaccgttggaaacagaaagcatactcacacgagacatataagcatgagagccggcaccgacttctgtggatgctccgcccgaatttccgaccgagagtcccatggaccatgttcctttttgagatgctcttttttctgccggaatatgcagcttgtctctgccggaaggacgacgcggcctgttgttcggccgtttagtatcctgtgactgtgtagcctgacccacattttcactgtcaacctgccttgcttcatttttcgtctgttccgtctcacctttgagcatctggtcttcctcaattacaggattattttcattccctgttacaggttcgttgctattttctattgcagattgatctgcatttgttttctgttctgtaagattcttatcaattttcgccaaacggtcttcacgagccactggtcgcaagacgggttctacggaagtgccctgcacatccggttgttgcacacccggcaacgcatcgggtgtagatgccaatgccggagtctttatatgacgtatttcatccgcggccggtgtccccagaaaatatagacttaccgacgaaacgacggctaacaatataacagctgcagcagccatcatccattttcgataaggatatattttcttctccacaggaggcataagttctttttccagttgttcccagccggaagcaggcaccggctcggaataatccgcgagcttctccttcaacttattcatccacaattctttctcttccatctctatctatccattatgcattatccattcttttactctttttgccaatacactcttcgcacgaaatagttgcgaagccgaagatttttcattaatacctaattcctgtgcgatttctttatgcgatttgtcttcgaatgtataaaggttaaacactgtacgatatccggcaggtagttcttctataaactgcatcaacactttctgtggaatagcttctacatcagaagcatccggttcttcatattcttcaggcaactcttctaatggtgccgactgattgattacatcatttttccggagatattgcaaagctgtgttgaccatcaccctttccatccaggcccgcagggagccttcacccctccaggtgaacttgtcgaaggaatcgaatatctttaaaaaaccgtcgtgaagcagatcctgggctgtatcacggtcgccggtataacgaagacagatgccaagcatacgtcccgcatactgctcatacagttctttgcgagcttggttattgcctagcctgcattgttccgacaactctaattcttccattctcttatacacgtgtttaacttataaatgcagcaaagatagaaatactgcatagagagaacaactcttttatcacttttgtttctttaacagattcaaatgcaatattttctatcccattgcattttcacaatacaaaggaaccattttatataatctaaaacttaaataagtatatgaagaaatttaaattcattgcctttatctttgctattatgactacaatgccgattctccagtcatgtttggacgacgatgacaacccgtccgatcttctggttgtcagtaccatcaatatgattagccaggatagcaaggaattttatttcactttggatgacgggaaaaaaatgtatcccagcaatgcgcaaggatggagtaataaagattgggtggaaggacaacgagcttttgtgatattcaacgagctggaagagcctgtgaatggatacgaccttaatattcaggtgagaggtatcaatccaatcttaactaaagacatcatcacgatgggtgaagatgacaacgacgaagaaaaagtcggagatgacaagatcaacacaacttatatgtggatcaacaaggataataaatatctaacgattgaattccaatattatggaacgcatagtgaagataaaaaacatttcctgaatctcgtaatcaacgacaaagaagagtctgctcccactgctgacgaagacagtgcggaggacgaatatatcaatctggaattccgccataacagtgaaggtgattatcctcaaagcctgggcgaaggatatgtatctttcaaactggataagattaaaggccggatggaagggaaaaaaggattaaggatccgtgtcaacactttatatggcggaccgaaaacttatgaagtaaagtttccctaagattataaatctaatgtaaacgtgcaaaacacactcttttttaatataatatattaattacgcaaaagagggcggtagttgtgaaactgccgcccttttatcttctcctttatataaagaagttattcttataaaagatttatttcttttcttccttatctcccagataattccaaactaccgcactcaacgcagctcctacaaatggagcaatgatgaacagccacaactgcgacaatgcttctcctccctggaataatgccggagcaatactacgcgccgggtttacagaagtccctgtgataggaatacatacaatatgtaccaatacaagagtcaaaccgatggcaagtcctgccagattgcctgctcccttcttcgagtcggtagagccgagcaccactaatacaaaaataaaagtaaatactgcttccgcaatgaatgcctgcaacatttctccatcgccaaaaccattggaacctgtagccgtaggtccgtcatgagcaccggtggaaactaaagcaaaaagaatagccgagccgataatagctccgattacctggaaaatcatatacatacctgcatcttttccattcatacgcccagttaagaacactcctaatgtaatagcaggattaatgtgacatcctgaaatacctccgatagcatacgccatcgctactactgaaagaccaaatgctaaagctacgccgactgttcccacgccagcacctaccgtaccggttacactaccggcaaagacggcacttccgcatcccataagaacgagcaccatcgttccaatcatttctgcaatgtactttttcataactataaataatggttaatgcatcaaatatagagaattaacccaagaaaacaaaacctacgtgcctaaattattattgccttcgcaacatttttgaataaaagacaagcaaataaaatgaaaaaaggacttttgcacaccatattagcctctaccttatgggcacatcgtaaactcttttatcaagcaaggattgagcaatgacgccactccgatgaatttctccgaaacccgctttgccactgttggaattattcttttcgcttatacccggtacaagggtatatgacaggaatcatctcaatctctattattatagcaaacactgtatggactgcaaagtaagcatttctttggggactgctgcttttatttcctctttcagaacacatagcaggctgtgacgaataaaatctctatttgtcgccagcaccacttgccgcgtcggtcgggggatagcaaacggacgtactaattgtcgctgttcttccgtcaattgagccactgccagttcgggaataaaagtgattccttttccgctttctaccattctcataaaggtttccatgcttcccaaacgataagccatctgactaaccttcaccgcttccatctgacagaaacggacaagttggtcacgaaaacaatgtccttcgtccaaaagccaaagatgttcgccggttatatcggaagtgcggataacgtcatgtttgaacgagggttctttccgtgatacataagcatagaattgctcatagaagagagtttcttccgtcaagaatgtgtcttctaatttactggcaataatccctgcatccaaatcaccggcatgcagagcctgctgaatatcctgggttttcatttccgtgacacgaatatccagttcgggatatttctccatcagttgagggaaaaagcgaggtagcaaataaggagcgatagttggtaatactcccaaacggaatacacctgataatgattgcttatcttcactgatgatttcttttacttgagctgcctgcgccagaatcacacgagcctggtctatcactttctgcccgatgggtgtcgggcagacgggttgcactgtcctatcgaacaactttactcctaattcatcttccagcttctgaatcatggcactcaaagtgggttgcgtcacacggcaatattcggctgcccgtgcgaaatgcctgaactggtctacggctaatatatattctaattgttgtatcgtcatctatcaaatcatgttaagttatagatttcatctatgcaaagatagaaattttcagtttgacaacaagcattttccgccttatctttgcagtacagaaaaaaagaaaacaagtataaatcattaaaaataaaaagaatatgaaaactttagaatttatcaaattgaatgaatcgggagcaaacaacgtagtagcatctttgcaacaactattagcagacttccaagtgtattacaccaatctccgcggtttccactggaatatcaaaggacatgatttctttgttctccacagccaattcgaaaaaatgtatgatgacacagccgaaaaggtagacgaaattgcagaacgtatcttgatgttgggcggtactccagccaataaattcagcgattatttgaaagtagcaaatatcagtgaagtagataaagtgagcaacggtgaacaggcactgaacaatatccttcagagtatcagttatctgattggtgaagaacgtaaaatactgtccatcgcttctcaagccggagatgaagtaaccgtttcgatgatgagcgattatctgaaagaacaggaaaaattggtttggatgttgacggcttataatagcaagtaattaagataaaaggtttaagtttaaaaaaggagatgtgtcaaaataatca

SEQ ID NO: 8100 - DNA, 6444 bp, Unknown
  gut microbiota DNA sequence
gaggatagttgataaatagtatgtgatagctgattgaaaattcactataatattcggtatttatcatctgttaggcataaagaatcaactaaaacgttaaaaccgtcgccttttttaagtaaaaggggacggtttttgtttaactatgattaataaagatagaaaaacgcaaggaaaagatttaattttttattaaatttgcaaaccaaaggaggggttttgttgttgtagtaatcagaatacaacctaaatagctccttacggttaatttccgggaagttccggttaaatcaagttaatgcattaggagtgttaattagggagtgttaattttgttgctatgaagaagtcaacaatttggatattaggtattgtaatggggctttccttccttagcttgctgtatttgcaggtaagttatatagaggaaatgatgaaaacccgtaaggaacagtttgattcggctgtacgcaatagcctggatcaggtttccaaggatgtggaatatgcagagaccagacgttggttgatcgaagatatttcagaagcagaaagaaaagcgctgattgcgaataatgcttccatacaacaagacaacttgattcagcaaacgcagcggtttacagtgaagtctaaggatggaaaagtatattcggattttgagctgaaagtgatgaccactaagccctccgagcttccgaaggctatgatttctccttacagggggacaaagaccattccggaaacttcgcgttcattagtggaagccatcaagaatcggtatatgtatcaacgggcattactcgatgaagtggcctggcagatgatttaccggggaagtgacaagtcgattggagacagagtacggtttaaagaactggatgactatctgaaatcgagcttatataataatagtatagatttgccttatcactttacggtgatcgacaaagacggaagggaagtctaccgttgtgcggattatgaggcaaagggaagtgaagacgcttatcagcaggcattgttcaagaatgacccgcctgcaaaaatgagtatcttgaaagtacactttccggggaagaaagattatatctttgactccatcagtttcatgattccgtcgctgatatttacactggtattgttagtgacattcatctttacgatttatatcgtatttcggcaaaagaaactgacggaaatgaagaatgactttatcaataatatgacgcacgaatttaaaacaccgatatctaccatttcattagcagcccagatgttgaaagatcccgcggtggggaaatcgccgcagatgttccagcatatatcgggagtgattaatgatgaaaccaagcgcttgcgcttccaggtggaaaaggtgctccagatgtcgatgttcgaacgtcagaaggccactttgaagatgaaggagattgatgcgaatgaattaatagcaggagttgtcaatacctttgcgctgaaagtggaacggtataatggtaagataacatcgaaccttgaggccaccgatcctgttatatttgcagacgagatgcatatcacgaatgtaatctttaatctgatggataacgcggtgaaatataagaaaccggaagaggatctggaactgaaagtgagaacgtggaatgagtcgggtaaactgatgatttcgatacaggataatggtatcggtatcaaaaaagagaacctgaaaaagatatttgaaaagttctatcgtgtacatacgggtaatctgcacgatgtgaagggctttggactgggattggcttatgtgagaaaaattatattggatcataagggaaccatccgggcggaaagcgacctgaacgtgggaactaaatttattattgcattacctttattaaaaaataattgatatggacgagaaactgcgtattttattgtgcgaggatgacgaaaatcttggcatgcttttaagagaatatctacaggcaaaaggttattctgctgagttatatcctgatggagaagccggttataaggctttcttgaagaataaatatgacttgtgcgtgtttgacgtgatgatgcctaaaaaagacggattcacactggcacaggatgtccgtgcagcaaatgctgaaattcctattatcttcctgacggccaaaacgctgaaagaagatatcctggaaggctttaaaatcggtgcggatgattatatcaccaaaccgtttagtatggaagaattgacattcagaattgaagcaatcttgagacgtgttcgtggaaagaagaacaaagaaagcaatatctataagattggtaagtttactttcgacacacagaaacaaattctgtcgtcagaaggcaaacaaactaagctgactaccaaagagtctgaactgctcggattgctttgcgcacatgccaatgagattttgcaacgtgacttcgctctgaaaacaatctggattgacgataactatttcaatgcccgtagtatggacgtgtatatcacgaaactacgtaagcacctgaaagaagacgattcaatcgaaattatcaatattcacggaaaaggctataagctgattactccggaagttgaatcttaatgattgcgtttgagataactccaaataaaaaatcccgggaacattcgtttccgggattttttattgattttgcgaaattaatcagcgatcttcttattaataacaatataagaaatgagtcccagtactacaagtactactgaagtacccaggatggcgttgttgtttacatttcctgtaaaggaacaagccagcaggatgactactccgaccaagattaatatcaatcctaagttctttaataaacctttcatgtgtgtgtattttaatagattataatattccagtcacaaattaaagcataattctttaacgggcgaaattatttggataaaaattccattataaatgcacgatttagtggattttatgatttggagagaagttcttctatctaatcttttgtattgtagaacacctttttcagtacctcctgtccaatgctcaattcgtcgagagtgataccgtgaagagcctctttcagagtctgtccggcaatgacacgcgctttttcctccagttcttttccgtctttggtcagatggatcaagttggtgcggcggtcttttttatcggaaatgcgcacaacaagatgttgccgttccatattatctatcaaacgggtcatgctgggcttgtctttaaaagttgcattacacaactcttgttgcgtcacgccgtctttttcccacaggaaaatgagtaccgtccattgttcgggactgatttccaatccgttctgacggaagttacggtacagtttccggttgattgccgcagaaactttgccatttaatatggcaaatataagtcgaatgtcgaaattaaattgctctatcatgaaattattgtttaaacaactttgcaaaggtaagtctcttcccggataaatcctatcttcggatacaaaaaaagattaaatatttgtagttcaaaataaaatgtctaactttgcacccgcatttaaaatcaaataatttatttatttaattaaacgaagtatgaatcaatacgaaaccgttttcattttaactcccgttttatctgatgttcagatgaaggaagcggtagaaaaattcaaaggcgttcttcaagctgaaggtgctgagattattaatgaagaaaactggggactgaagaaattggcttacccaattcagaaaaagtctacaggtttttatcaactgattgagttcaatgcagatcctactgtaattgacaagctggaaattaatttccgtcgtgatgaacgcgtaatccgtttcttgactttcaagatggataagtatgctgctgaatacgctgcaaaaagaagaagtgttaaatcaaacaaaaaggaggattaatcatggcacaacaagttcaatcagaaatcagatatttaactccgccgtcagtagacgttaagaagaaaaagtactgccgtttcaaaaagagtggtattaagtatatcgactacaaagatcctgaattcttgaagaaattcttgaatgaacaaggaaaaatccttccgcgtcgtattacaggtacttctttgaagttccaacgtcgtatcgcgcaggctgtgaagagagctcgtcacttggcattgctgccttatgtaactgacatgatgaaataagaaggaggaaaagtatggaaattatattaaaagaagacgtagtaaacttgggttataagaacgatatcgtaaacgtgaaatccggatacggtcgtaattatctgatcccgactggaaaagctatcatcgcttctccttctgcaaagaaaatgttggctgaagaactgaaacagcgcgctcacaaacttgagaaaatcaagaaagatgctgaagctatggctgctaagttggaaggcgtttctttgactatcgcaactaaagttagctcaaccggtactatcttcggttctgttggtaacatccagattgctgaagcattgtctaaactgggtcatgaagttgacagaaagatcatcgttgtaaaagacgctgtgaaagaagttggtagctacaaggctatcgttaagcttcacaaggaggtttcggtagaaattcctttcgaggtagttgctgaataagagcaaatttacttcatatatgaaaagcgatttgttctgaacgaataaatcgcttttttttgttatctttgctattactattatgaaattcaactattgttttctaaagaagaggtttttgcttctgctgattgctttgggaattggcagtgttctttatgcaaataatgagttgaaactattgactgattctttgcgtagagtgatagatgaaaaacacgtctttgttaaagagaaagaggatcggataaaccggataaaatgtatgttgagaagtcccggtttgactcttgaaggagaatatagaatcaatctacggttatataatgaatataaaaagtttcatattgattcagccatccattatgttgatcgcaatattgagatttcccgccagttgaatagaccttatttcaccaaccagtcgtctttacatcttagccttttatattcgatgtgtggcaggttccgcgaagcggagattattttgaaaagtataaagacttcagaacttcccagagatttattaataaactattatcaaacttattccagcttttggggacactattcgatttctgtcgccaataatctgtatggcaagcagcaggctgcttaccaggattcgttgtttgccctcattgaccacacttcttgggattatcgaatgtcccaggcttcttattatatttggcgtgatacgctgaaatcgaaagaaatttataaagaactgctggagattgaggaagtggggacgcccaattatgctatgataactcattcatattctaggttatgtcaccatcagaaaaagtatgatgaagaaaaaaaatatttgatgttgtcggcaatagccgatacccggaatgctacgcgggaaaatgcatccctgcaatctcttgcattgatagcttatgatgaacagaatttagctgatgcctttaaatttacacagtccgctatcgatgacgttatatcttccggtattcatttccgggccatcgaaatttataaattcaattctattattaatacagcttatcaggcggagcaggccagatcacggtcgcatctgactacttttcttatttctacaagtattatcctttttcttttagtcctgttggtgcttttcatctatattcaaatgaaaaagacgttgaaaataaaacaggcattggcacagagtaatgaggagcttttgcgattgaacaacaagctgaatagcatgaacagccagctgaatgatacaaataatcagttgtgtgaaattaatagtataaaagagtattacatagccgaattttttgatgtctgttttagttatatccataaaatggagaaatatcagaatatgctgtataaaatagctattaataaatactatgatgaattgattaagaagctaaaatcatctgcgcttattgatgaagagcttggcgctttatacactcgttttgataaggtcttcttgggtctgtatcccacttttgtttctgattttaacgctctgttgaaagatgaagagaaaattattttaaaaccggacgctttattgaatagagaacttcgtatttatgctttattacgcttgggtattacggatagtggaaagattgcgaactttctccgttgctctacaagtacggtttataattatcgtacgaagatgagaaataaggcagccgtcgacagggatgaatttgagaatgaaattatgaaaattagttcaacacaagagacataattatcattttaacattat

SEQ ID NO: 8101 - DNA, 92727 bp, Unknown
  gut microbiota DNA sequence
atcatacaccataaaatcggaggaagtaggtaaaacactgaactttgtaatactggcaactgacaatgaggaaaagaaatccactgccgaatatgtagtttacatccaggctgccaaaccggaaattgaaataaagattcctgataccgcaccggaaacggttactgcgggagaagtggtaacgttcgacattgagattacttccgcaacaacattaagaagcataaaaacatatctcgaaggtctggaaattacagatttaaccaaagagacatttgagaatcccaacagtgatacctatgtattctcatacacaactactgatttgaatgccggacaaaccctgtcattcacatttgaagtgatggatgctaacggtggtatcgtaagaagtgaatatagcatagaggtaacgagagcagtagaattagacataaatgaattctacacacttaaaatcggagcacaagccagtacagacgcaggacctttcttaaatactactaacggagaaatttatgtacgagacggagctgctgccaaatcagccaatatcgacattaccctattctatagtaacggttcatacggctattatttcgtatccccgtctgatgcaagcatcgaagctattttcaaagcaccggatgcaataacaacttgggaacatcgtaacagtacgaaactgaaagttatccaaatgacgccggacgaattcttagcaatcaattctgctgaaatgattcagaatctctacacgaactcatccgaagcagaagtagagaaactgacaaacaagctgggagtaggctctatcatcggattcaaaactgttgccgacaaatatggcattataattgtcaggtcatttgccagcggcagctcaaaaggaaatgtcaccatcgacatgaaagtggaaaaataacccggttctcaaaataaattaattcttaaaccgcccttatttatgacaaaaataggggcggattagaaattattatctataaaacaatgaaaataaaattattattcatcctgctaattacttttcagcccttagtattcggagctaatgacatacctgaacgaccgctttatcttgacccttcccagtcagtccaaacaagagtggaaaatctgatgtccttaatgacgctgaaagaaaaggttgcccaaatgtgccagtatgtaggtctggaacatatgcgcgacgcggaaaagaatatcacggaagaagagttactgaacggtcatgccagaggattttacaaaggattgcactccacaggagtggaacggatggtcacacagggagaaatcggttcatttcttcatgtcttgactcctgcggaagccaatcatctgcaaaagttggcggaaaaaagccgtttgaaaattcccttgctgatagggattgatgccatacatggaaacgggctcgtcagcggctctaccatttacccgtctccaataggaatggcttccacatttgcgcccgatttaatagaacaggcaagcaggcagacagccctcgaaatgcgtgtgacaggttctcactgggcattcactccaaatatagaaatagcctgtgatgcccgttggggaagagtaggagaaacattcggagaagacccgtatctggtatcccgcatgggagtagcatccatcaaaggtctgcaaacagacaatcttacaggactaaataccgtattagcctgcgccaaacatttggttgcagggggaatagccaataacggaaccaatgccggcccggtagaattgagtgaaggcaaactaagaaacttctttttacccccattcaaagcagccatacaagaagctaaaccttttacccttatgccagcacataacgaattgaatgggatcccgtgtcatgcaaacaaatggttgatgaccgacattatgcggaatgaatacggattcgacgggttcattgtaagcgactggatggatatggaagcaatcagcacacgccaccggatatccgagaatacaaccgatgcattcttcctgtccgtagatggcggagtagacatgcatatgcatggccctgtttttttcgatgccatcctgaaacttataaaagaaggaaaactgacggaagaaagagttaataaagcatgcgccaagatactggaagccaagttccggctaggattattcgagaaccggtatgttacggaagccggaataaagaaaacggttttcaccaaaaaacatcagcaaacagcactggaaatcgcccggcgctccatcgtcctattgaaaaacgagagtctgcttcccgttgacacccgaaagttcaaaaagatactcgtgacagggcctaatgccaataaccaatcaatcatgggcgactgggtatttgagcaaccggagaagaatgtatcaaccatactggaaggcataaaagaggaagcatccggtacacagataaattatgtagatgtcggctggaatatgagagcattggatagtgccaaaatagaagaggccatacaaacagcaaagtcttcggatttggcaatcgtcatagttggcgaagactctttccggcaacattggaaagagaaaacatgcggagaaaacagagaccgtatggacatcactctttggggtaaacaggattatcttgtggaatctatttacaagacaggagttcctactatcgtcatcctgataaacggacgtccccttgccaccagatggattgctgaaaatatcccggctgttattgaagcctgggaaccggggtcaatgggtggaaaagcaattgcagaaatcctcttcggcaaagtaaatcccagcggaaagttacccatcactattccacggcacgtaggtcagatttcaacggtatataatcacaaaccgtcccaatttctccatccttatattgacggggacaaaacaccactttatcctttcggatatggtctaagctatacttctttcaagtacgaccagcttaaagtaaataaggctgattatcacgccaacgaagaaatagagattactgtgaatgtcagtaacacaggagaaaggcaaggagaagaggtcgtccaactttatattcgggatgattacagtaacaccacccgaccggtgaaagaactgaagcgttttcaacgtattcttttggaaaaaggagaaaacaaagtggtatcattccgcttgaacaaagaagacctgtcctactataaccataaagccgaatatgtgctcgaaccgggcacgtttaccgtcatggtgggcggcagttctttggacaaagacctacaaaaagttaagtttaacgtaaaatgaaaccggatatgaagaacctgattctattattaactgttcttacttttctgttcagttgtaaaagcaacccgaaagaagagtacgacatatgtatctacggcggcacttccgccggagtaatagcagcatactctgccaagatgttggataagaaggtgttgcttatcgaaccgcaaagccgcctcggcggactgacttctggtgggcttggtttcaccgatataggaaacaaacaagtggtgaccggattatcaaaagatttttaccgccgtttgggagcttattacggcaaactggaacaatggatattcgaacccaaagtagcggacagcctctttaatgactacattaagcgagcggatgtcaaggttttatacaaatacagaatcacagacgtccaacttgccaacggatatataaaaaatatcacccttgaaagttccgacggaacaaaactcggcaaatccatagccgccaaagtattcatcgactgtacttatgagggtgacctgatggctaaagcaggagtttcctacataataggccgggaagacaacaaacagtatggtgaaacttataatggcgtccaactgatgaaaggacaccagtttccggatggagtagacccatacaagataaaaggtgattccacaagcggattattatggggaatcagtcctgccgcactctcatcggacggtacgggcgacaagttagtacaagcctataattaccgcatttgcctcaccgacaatccagccaacaaaatagaaatcacccgcccggaaaattatgattccaccaaatacgagttactgctacgcctgtttgacgcccaacccaataaaaggaaactaaaccattattttatctggagccggatgccaaacaataagacggatataaataaccggggaggattttctactgatatgattggaatgaatcataactatccggaagcatcttacgaagaaagggcagaaatcataaaagcacataaagactatacccaaggattactttatttctacaagaccgaccccagagttccgcaagaattaagagacgaaatacaggcatggggttatcccaaagacgaatataccgaggacaaccattggtcgcctcaactatatatcagagaaagccgcagaatgacaggggattatgtaatgacgcaagcacattgcgaaggacgagaaacagttaccgatggtatcggtatggctgcatataccatggactcacacaactgccaacggttactcgtaaaaaaagatggtaagtacatagtaaaaaatgaaggaaatgtagaaatcggcggtgggctcccctaccccatatcctatcgttccatcatcccaaaggaagaagaatgtaagaacttgctcgttcccgtttgtctctccgccagtcatattgcctatggttccatccgtatggaaccggtatttatggtattggcacagtctgccgctatcgccgcagcagaagccataaacacaggaagcgtacaaaccgtcgatataaaaaaagtacaggcattgctacacgaaaatcccctattggacgatagtttttccgagatactgattgacgacagcgaactggacttatccatcaataatgattgggaagttataaaaaaacaaggaggatatggtcccactttcctgaaatccaaagttcgcaacggttcgcctgtccgtttcagcccacatatggaacatgaaggaaaatacaaagtctatacttattatcacatgagaaaagatatatcaccggctatcacatattccatttcgaacggaatcgatagttggacaagagtcatacataaagacagcgtgagaatagaaggacaaactacgggagaatggatagaactgggaacatacaactttcaaaaaagctccatgccatatatagaaatatccaccggagatacaagcggggcggtcattgctgacgctgtactattcatacccgtaaaataagatttatatgtatatgaaaaagattttgtgtttgctatatctgttatcaatattttgtttttcccatgcccagaatgagaatacatatttagagcaaaagattgattcaaccctatcaggtatgactatccgtgaaaaagcagggcagttgaaccaacttgacggacgcggtacaattgaaaatctgaagatattgatacgaaaaggagaaatcggttcggttatgaatgttaccgaacccgaaatcgtcaatgagttacaagaaatcgcctacaaacaatcaagaaccggtatccccctggttttcacacgcgacgtcgtgcatggtttcaaaacaatgttacccattccattaggacaagctgccaccttccatccggaactgatacagaaaggggcacgaatcgcagccatagaagccacggagcatggtgtcagatggtcatttgcacccatgatagacatatccagagatgcccggtggggacgcatagccgaaagttttggtgaagatacctatctcacggaacaaatggctgttgccgtagtaaacggatttcaaggtgataatttatcaaatccacaatcaatggctgcctgcgccaagcattttatcggatacgggactgtagaaggaggacgtgattataattcaactcatattcccgaaagacagttgagagatgtctatcttccgcctttcgaaaaagctgtaaaagccaattgttccagtattatgacttcgttcaatgataatgatgggattccggctacaggaaacaaaaaactattaaagggtattcttcgcaaagaatagaagtttgacggggttgtagtttccgactggggctctgtaacggaaatgataaaacatggcttcgctgaagaccggaaagatgcagcccgaaaagcgatagaagccggactggacatggatatgtcttccaaagcctttattcagaatatagaggaattaatcgccaaggggataattaccgaagagacattggacaatgcggtacgaaatgtactaagattaaagttcaggctcggactatttaacaatccttacactgatattaataagaaaaaagaaacctattcggacaagcatctagctattgcaaaaaagattgcggaagaatctgtcgtcctattgaaaaatgagaaccgcacattaccgctatctccgaaaataaaaagtatcctgatagtagggccattatccgatgctcctcacgatcaactcggaacctggacaatggacggagaaacagagagaacacaaactcctgtaaaagcactgcgtgaaatgtatggcgacaaagtggaaattcattttgtgaaaggtctggagtacagcagagataaaaataagatgaatttcaataaggtattggcaaaagcaagccaagtagatgtcattatagcttttatcggtgaagaagccatcctgtcaggcgaagcgcattgtttggctgatataaagctacaaggagcacaatccgaacttatcaaaatattaagcggaacaaataagccgctcattacagttatcatggccggacgcccattgattatcaatgaggagctaaacctatccgatgctgtattatatgcttggcatccgggaacgatgggcggtaacgcactggcagatattttatttggtaagaccacacctagcggcaaactacccgttacttttccaaaagcaacaggacaaattcccatttactataatcacaccaataccgggcgtccggctacaggaaaagaaaagtctttagacgaaatacctttaaatgccaaacagtcagtattaggccactcttcttattatctcgatttaggagcacaacctttattcccattcggatatggtctgtcatacacatctttcgaatattccgatttaaaaacagaccacaccgtactcactccgaacgatacgctttcaattagcgtcaaagtgaaaaatacagggcaatataaaggaacagaagtagttcaactctatgtatcggatcttttcggttccgtcactcgtccagtaaaggaactaaaagggtttaaaaggatagagttaagtccaaatgaagaaaaaatagtagtattcgaactctcctcatacgaactgagcttttggaatattaatatgaaaaaagaggtggaaccgggtaagttcaagataaggatcggcactgatagtcaaagcggactggaaacctttttcgaaataaagtaacagtagcaaagagttattctattcaaaaagcggcctcaccaaaaggatgagactgcttttcatttattcattattcagacctgatgattatcagagtgatgattatcagagaaatcgttatttctctttcttataattctccaatccggtctgcaagaattcgatatacttaggaatatcttcgttataagcatacgacttattcaacggtttgccctgattgtccaacaatacatagaaaggctgggcattggctccgaatttcacacgttgcagataactccatttatcgccgacagtacgcaaagtacgttctgtaccgttctcgattatctttacgggctcggtcaacggagtcttattatccacatagagagtaatcagtacataatcgttattaatcaaatcactcactttcggatcagtccacaccgctgcttccatcttacgacagtttacgcaaccatatccggtaaagtcaagcataacgggttttccgttcagacgggcatattccatacctaagtcataatcatcaaatttcgcatgtacctcgttcttatacaaattgaagtcttgcgtctgcataggtggagcaaatgcagatacggccttcaatggtgctccccacaaaccgggaaccatatatacggcaaacgctaaagagattaatgccatgaagaagcgggtgactcccaccttattatcatcgtcatcatgcggaaatttgatcttacccaacagatagaatccaagcaaagcaaagattacaatccacagagccaggaatgtttcgcggtcaagcagtctccaaccgtaagccaaatcagctaccgacaagaatttaagcgcaaacgccaattcgaggaaccccagcgttactttgattacattcatccatccaccggacttcggcatagatttcagccaagacgggaacagggcaaaaagtgtaaacggcaatgccaaagcaatggcaaatcccaacataccgattgccggagcaaccacacttcctgtggtagatacctgtaccagcagaaatccgataatcggacctgtacaagagaaagataccaatgaaagcgtaaaagccatcaggaaaatacttagtaatccggtcgtagattccgctttgctatctactgcgtttccccatttcgagggtagtctgatttcaaacgctccaaagaatgaagccgcaaaaatcaccagcatcaggaagaagagaatattgaaaatagcattggtagataaagcgtttaatgcactggcaccgaaaattaacgtaatagccaaacctaatgccacataaatcactacgatagatgccccatacgtccacgcatcacgaattcctttctttttatctttactacgcttcagaaaaaagctgactgtcatcggaataatcggccatacacaaggagtgaacaaggccaataatcctccaagaaaacctgtaatgaatatatatatccaagacatatcctcctgaccgtgctcttcgcctaatgcttgcagatcactgataacgggtttccaaagttcactggaggtaacagccggctgaatatccgtaatagcctccgttgtagttgcaggaaccaattccatcatagcagatgaatctttcgaagcaacaggagttgccccttctttcttatctgccttatccactactttttgttccggttgttctgctttcggttgttctgttttcgttgcggcagcatttccggctttcgctactcccgaaaacttgaatggcacttgagtagggggcaggcagctctcgtcatcacaagctccgtattccagataaccttctatcgcgtaagctccacccgtaaatttcactttctgtacaaactttgctgtattctcgaaataacgtaccttcatttcgaacaatttatcgaaagtagctacttctttgcccacaggcttcagtttaccgacaagttcgacacctgatttattatcaacattaaatgttgcagaaataggaccgccatctcccaggtcggtagaataaacatgccaacctttatcaatggtagctgtaaacaccacttctgcctccgtatcggagagagttgtcagctctgttttaaactttaccggatctttgatctgcgcttgcaatgcatatacaacaaagcttaaaagcaggaaagaaattatttttctcatctttatttttggggtttataattcatagtctacgcatgcacggctttctttcgtttcagccagaatcttgccggcagctacgtggtcggggtgtgttgcatagaatttcacatcttctagtgtatcaaactcactgtaaagcgcaatattccatgtttcaccgggattcatattcaatccgacttccactttacgaatgacagagattttagcaggaagagcttctatcgcttccttaaatttagtcatgactaccagtttctcttcagcaggaacttcgtcttttaacttaaataatacaatgtgttttaccattacgttgttattttaatgaattgtttctatatttgtcttgttaatgcaatcatcgcattaatagtaatgcaaaaatactctatttagttcaaatatacatttaaagagatgttaattataggaatagcaggcggaacaggctccggaaagaccaccgtcgtacggaaaattatagaaagtctccccgcaggagaagtagtactcttaccacaggattcatactacaaagacagtagtcatgtcccggttgaagaacgccagaatatcaattttgaccatcccgatgcttttgaatggagcctactatccaaacatgtcatgatgctgaaagaaggaaatagcattgaacagccgacctattcttatctcacttgtacgcgccagcccgaaacgattcatatcgaacctcgtgaagtggttatcattgaaggaatccttgctttatgtgataaaaagctacgcaatatgatggaccttaaaatctttgtagatgccgatcccgacgaacgcctgatacgtgttatccaaagagatgttattgagcgcggacgtactgccgaagctgtaatggaacgctatacacgggttttaaagcctatgcacctgcaatttatcgaaccttgcaaacgatatgccgaccttattgtaccggaaggcggcagtaataaggtagctattgatatactgactatgtacatcaagaaacacttgaagagttgagagtggagaatggagagttgagagttaaaagcaaaatgtcaggtatgaatgtcaagacactgattatccctttattcctcgtattgttctgttgtgtgttcggatgccggaacaaacaacatagtacaacggatgaatccgcacgtgatcttccacaaataaaagatagtggcgaactcgttgtattgacattatatagctctacttcctattttatttaccggggacaggaaatgggattccagtatgaacttagcgagcagtttgccaaaagtctgggactaaagcttaggattgaagttgccaaaagcgttgacgagatgattcaaaaattgctggcaggcgaaggagatatgattgcctataatctgcctatcaccaaagagtggaaagacagtctgctttattgtggtgaagatgtcatcacccatcaagtgattgttcagcaaggaagaggaaaacagaagccattaaaagacgtaaccgaattggtaggaaaagatatatacgtaaagccggggaaatattacgaccgcctcgtcaatctgaacagcgaattaggaggcggcatccggattcatgaagttaccaatgacagtactaccatcgaggacttgataacgcaagtggcgcaaggaaaaatcccgtatacagtagccgacaatgacttggcaaaattaaataagacctattatcctaatttaaatatcgatctatctatcagtttcgatcaacggtcttcgtgggcagtacgaaaagacagccccgaactggcagccgccgctactaaatggcatcaggaaaatatgacctctcctgcctacacagccagtatgaaacgttattttgagaatagtaaaatgatgccccactctcctatcctttcattgaaagaggggaaaatttctcattatgatgatttattcagaaagtattccaaagatatcggatgggattggcgtatgctggcgtcactagcctatacagaatctaatttcgataccaccgctgtttcctgggccggcgctaaaggactgatgcagttaatgcctgccaccgcccgggcaatgggagtacctcccggcaaggagcagaatccggaggaaagtgtgaaagcagccattaaatatatcgccgccaccgaccgcagtttcagtatgattcccgacaaacaggaacgactcaacttcattctggcatcttataatgccggcttaggacatatatacgatgccatggcgctagccgaaaaatacggaaagaacaaactggtgtggaaagacaatgtagaaaacttcatcctgctcaaaagcaatgaagaatactttactgaccctgtctgcaaaaacgggtatttccgtggtatcgagacttacaatttcgtccgtgatatcatgtcgcgctacgaatcctacaagaagaaaataaaagcatgattaatattaagtatcaagtattaaccgtggcctttgaggcgcttatccgcatggcgtaatacttaatacttgatacttacttaatacttattttttggttattaagctgattacgatgatggctaatacagataatggtaaggcaaataatatcggatcaatcacagggaaaggataagtggtaatcaatacatcccgtccaaataatgctttgcagatacctaatgctgcagattctttctgatgaagaaatacaagggcaaacaggctaccgattgttccgacccaaagacttgccatgacaccctgcttagtagctttcttccaatataaagcacagaaataggctggaaggaaagctgcagcacaaatccccataaagatagaagttccacgggcgataatatcatgaggcaacatatagcaaataatgtagctgaccagaatagagaacaatactcccaaacgaatcacgttggtcagtttattccgcgaacggggtttataagttccataaatatcagaacctaccgaagcccccattgtatggaactgcgagcttagtgtagacatactggccgaaaggatacataacataaagagtgcggcaaaccagtcgggcatcgctttattaataaaatatggaataatcttatcgatgtcctgcactacttcggtagcaaccgctccttctgttttcagaaagaaaaggttactcaaagctccggcatgatagatagctcctactgttataatcaaaaagaaacaaccgataaatacaccgcggtttaattgtttgctactttccacagtcataaaacgaaccactagctggggttgcgcaagacatccgattcctactcctaaaataagggaagtaacaagtgagtaccattgtggtgaacctgtaacaggcattgcagtccatccctgatgtcccaatgctttaaatttttccgggaccaacggagcaatagcagtcaactctttattcgcctcggtaaaacccataccgagcacctggtataaagagaataataaaaacagcatgcaaccgaacatgattactgcctgcaacgcatctgtatacatgactcctttcataccacctgcaataacataagcagcaataaccaatgtaaatatcaacaaagagatattgaaatcaatctgaaagatctgttcgataaatacagctccacctttcatcacaactgctgcataaagcggcattccgatgaaaataacagcagcaataaatacctgtatattacgggaacgaaaatgacgccctaataattgaggaaaagtgctcacattcagttttgcacccatacgccgggtgcgtaaaccgaaaaagataaaagcaatgacaaccccaataaacatattcaggaaacagagccactgaatacccattccgaaagctgccgccactcctccaaaacctacaatagcagatgcagagataaacgtagcaccgtaagaaagtgccataacaataggattcatctgacgtccgcctaccagatagtcactggtattcgttgttttcttatatcccaaaaagccgagataagcaagtgacaagagatatcctatcacaatcaagccgagtgtaaatgtattcatcgagtttcgtctttttcgtcatccttattccaatacttcagcccaaaccaggcagcaaagatcacacataccactgaaagaaggtaaggcagaattataaaagggtcgtctattccaaacatttgcgtatcagattttaattagcgttgcaaatgtaaggaaattattgaaaagacaaaacttttgctcgctaatactgattataatgtatctttttctcgtcaaacttctgtttcgggttctcttttgtagccggatagccgaaaggaatgacacaaagcggaaggatattatcaggtagattggtatatttgcgtaccacctgcatacggtcttcataaggataggcagctgtccatacagcccccagtcccagactttcggcagccagcagaatattttgcgctgctgctgaacaatccaaataccaataagacgaacgtacagaatctccgcagacaatgatagcgttacgggcctgggtcaacatctttgcataaggaagcgcagcagccattgaatccagtttggcacgatcggatactactataaactcccaaggacggacatctttccccgaaggggcagccattccggcacgaagtatcaagtctatcttctctttctccactcccttattcagataagtacgcacacttttacgtgcgaagatattatccaaagcagcatttccggtttcggacgttcctttttcttctttggtagaagaacatgcgctcatagcaacaactattgctgcaatcagacataagaaagagaaaatctttttcattgtgatactatttaaaacagattcaacttatttttctgcgcctcttccaatgaaaccgtttcacgtttcagcagaccgcttttttcacgaagcgcctcatattcgctattcagttcgttcaccaattcggctttcagctgtggattcaataatttggaagcaacacttgcattctgggaagcatctttcagatgtaccaccggagcgtgatagacaggagcaatcttcaatgccgtatgcattttcgatgtagtagccccaccaatcagaagaggaatatccagtcctgctttttcgagttccaaagccacatgcgccatttcttccaaagagggagtaatcagaccactcaatccgatcatatccactttttcttcaatggcacgctgcacaatggtttccgccggcaccatcactcccaagtctacaatatcataaccattgcaagccatcaccaccgctacaatattttttccaatatcgtgcacatcgccctttacagttgccagcaacacttttccagccgcagcgcttccttccactttttccgattcgataatcggctgcaggatagctacggcttttttcatcgtacgggcagtcttcacaacctggggaaggaacattttaccggcaccaaacaactcgcctacataattcattccatccatcaacgggccttcaatcacatcgactgctttatcataaagcggcaatgcttccgccaaatcctgttcaaggaaatctccgattcctttcatcaaggcatatttcaagcgttcctgaacggattcttctctccacgcatcttgtttggcagctggttgtccggcagttccgctcatagttgctttcagcgattccgccaattctatcaaacgttccgctgcgtccggacgacgattcaagacgacatcttctatcttttccaatacatcggtcgggatatcactatataacacggaagtacccggattcacaattcccatgtccattccttgctgaatggcatgataaaggaatacagcgtgcatcgcctcacggatataattattgccacggaaagagaaagaaaggttactgactcctccgctaatatgagcacccggaagattctttttgatccatgcggtagcttcaatgaaatctacggcatagttattatgttcttcgatccccgtagctacggcaagtacattggggtcaaaaataatatcatgaggattaaaacctactttatctaccaaaagacggtaagcccgttcgcaaacttctattttacgggcggctgtatctgcctgacctttctcatcaaaagccattacgacggcggccgctccatattggcggatgatacgggcatgttcgaggaaaacttcctcaccttctttcaaagaaatggagttaacgattgactttccttgcagacatttcaggccggcttcaatcacttcccatttggaagagtcaatcattaccggaacacgggctatttccggttcagacatgataagattcaggaaagtagtcatctctgtctttgcgtccaacagtccgtcatccatattgacgtcaatcaccaaggcaccatcttccacttgttgacgggcgatggagagagcttcatcatatttcttttcgtttatcagacgaagaaacttacgcgaaccagctacgttgcaacgttcgccgacatttacaaagttaatttccggtttgacttccaacagttcaagtccagaaagccacatacaatccggtgcaagagcagggacgtgtggtttagcacctttcacgagggcgggatattcggcaatataggcatccgtcgttccacaacagccgccaatgatattgattagtccttcttcgatatattctctcacttcgtgagccatatcagcaggtgtctggtcatacttacccaggctattcggtaatccggcattcggataagcactaatataataaggtgcacgagctgccagttgttccagaaatgatttcaattggcgggctccgaaagaacagtttaaaccgacagaaaagatattggcatgttgcacggaagcaagaaatgcgtccaatgtctggccggacaatgttcgtccgccaatatcagacaccgttacagataacatgacagggacttcgacacctattgctttcattgcctgttcggctgcaaaaatagcagctttggcattcagggtatcaaagattgtttcgatcagaatggcgtctacgccaccttcaagcattgcttccatctgttgctgataggatgcagccagttcatcgtaactcaaagcacgataagccggattgttcacgtccgggctcatagagcaggttttattggttggtcccacagagccggctacaaaacgcggtttatcgggattctttgcagtgtactcgtcggcaagatcacgggctagttttacggctgccagattcatctcacgcacgtattcttctacgtgataatcagccatagaaactgtagtcgaactgaatgtattggtttcgatgatatccgcacctgcttccaggtatttacgatgaatatcctgaatcacgtcgggacgtgtaagacacaataagtcgttattccctttcaactgtccggggatatgcgcaaaccgttcaccacgaaaatcttcttccttgaggttatattgttgaatcattgtacccattgccccatccagaataaggatgcgctcggatacgacttgagaaattgtctttttcattaccctatcacattaatacctaaatacctactctgccatcttctgccagacacttcgcagtccggcgtttatcttatagcgttttttacttaccgcttgaacattcttgccatatctctacggtcgtctttctcctttatagattctcgtttatcatattctttcttacctttcgccaaagcgactaccagtttcgccaaacctttctcattgataaacaagcgtacagggacaatcgtaaagccgggatttttcatctcccgctgaagtttctccaattcttttttactaagcaacaacttcctctctctacgtgccgtatggttattgtacgatccatagaaatattcggcgatgtgcatattcttcacccacaattcgcctttcgtaaaatagcaaaacgtatctaccagactggcttttcccaaacgaatggattttatttccgtaccggtcaatacaatacctgctgtgtaggtatctatcagctcgtaatcaaacgtagcccgcttattctttatatttacaggaggttgtttcatcttcacacattaattaagtatagccgtcagtctattaaacacgatctgtatcaccgccggacatagtattaacaatacagacgacaaaagggtgtattttaatcgttgtttttcttctactcccatcagtataggaactccctcccataccacatagacgatgtagaactgcagcaaccaagcaataattctaaaatcaggtaatagtccggttactatctgaagcaggaaagacacaaccaatgcatatcctgcaaactgttgtgtcaacggcatattgctatgcagaccaaacatccttgttcccatttcattgatggcataagctgccagaaaatagccaccgaacagggctacagctacggcgcaacaattggtcatagctatctggaaactttgcggacctccccacccattcgtcaataacgaaccgatgaatacggacagaccgcataaaccaatcataggatagacaaaagccataaatacttttcgcctatcctcttccatagaaatttcctcccaggccttggccggagaggaaatcaatttcattgctatgttaaatagttctttgtagttcaatgttattctgtaaatgcgtaatcatattcaaccgaacgttcaaccgaagtttccttcccatccttatcgaccaattcatcttttgagttattgatttcagctgtcagttccaggtatttcggtaatttgcctgttttctccttaaatgcagcaagagcagctctaattgaataagccctataagcatatgtaaaattagaacgagttacggtctcacctgcatcctcaacaacatggctaatatatagttttaacttagtgtcagaggcagtcattgcttcaggatcataagaaagaacaaatgaatgcttctttacttctgaatcttcaacactagagtttgtaactttcacccaatatggcattgtcaaaacgattgtatttttgtcataataaaccaaacttgactgttgcttatccaatgaataaagaggattagtaggttccgttttttgaggattcaaaccttcattacctttagggtcaatacaaagcggagtagatagcaaagtaactggtatactagtactatttgctgtcacctgtgattggtcatattggcatgaaattatatacatatttccatccaaaaagcccaattctgtagttggaaccaacttcgtagttgcatcccccatcagaaatgatccaaaattatacttaacaggaacagtcattgtaacattgtggttatcatctccattcatacaagaagtaactgacatacccataaccacagccatcaaagccaccaagaaaaatttcacttgtttcataaacatattttttagattttgcaaagatataaattctaattcataattaataaatgcaagtacttaaaaaatactgcatcagttactttattatttttgcaaaaagttccaaatgatcatctacgtagcttgcaatcaatgctgtgacttgttcttccatctctaaataggcttcttccaactcatcaaaagcttcatattgctcgtacatagccataaattcatcatccgtccgttccttttccaaatctttccggttggcatcaaagattttcttagccttataaactaatttcgaaaactcttccgctccccacaaacgcatcactttcgcaaacggattatcaaagatataaccaccatagccattctgaatcaattgacagaacccgccaaccatcatctcatcacgaaaaatctgataagccagcaaagaatgttgttctcccgtcaacaaaggcatcgtctccgcagtcaattcaccaccgattacctctttatatttatctgtaaacgcctggataaattcatccattccttcacccgcagccttttgtaaggctgattctacaacttcgatcataatcttctttatataatgatgcagcaaagctacgaattttattctacatccagtaataatccctccataatcttgccaatcttaacttcattatccgtcctccacgttcttcacacgatccatatcatctcatttacagacacttcctgtgaacaaatcatataaaacacggtattcacatccttcacagaatatgtatttcacagtttcaccacatagtgagaaccaatacttgctatattaatagaaacaggcaaatagcatatatatcccgaatgaaaagcaactgtttaataacagacgactccagtcggctatccagtcaactctagtcgactaatcagacaacgatagttgtccgaatggccggctagagtcagctgacaagaatattgtaaggtgatttatgaattgccggctctattcaggctgtttattatacatgtaatcgcatccccaaataaactcctattagataaggtataagccaaatgcaccaaactacaatgctgaaacgattaaaatgtctcttttctataggcgttcccttcacataggtccatatcgcccataacgcatgtacaaacatcagaagaatagcaattgcccctatcaccgtatgcatttcgtcatgcaaatgagtcagttcggcaatatgctccatcaggcttgtacccaccgtgtcggccagcaacccgagaagaaagaaaatgatatgccaaaactttaatttcctttgaagacgttctccccaaacacctatcgtataaaacacaagcgcagatgaaataacgcaaattgccgctattaaataatgtatatctatctgattcagttccataaattttctttttctaataacaacaaagcacaggatagatagttctcgcggtctcaatctttcacaaatgcaatcccgactttacaaacgacgaaaaaacgtaaacagatttgtctcttttcacaaaaaagtaataaaaggcgatttgcagaaacaaataaatcgactacctttgtgggcgatttagagaatcgtgactacgtatttttaattatatcactaaaaaaagagctaattatgacttattcacacgaagtggaacacatgtgtgttgtaaagaagggccctaaccacggaccggctcccatacccgaagaaggcaaatgggtaaaatctaaagaaatcgttgatatttctggtttgacacacggtatcggttggtgcgctcctcaacaaggtgcttgtaaactgacactgaacgttaaagaaggtatcattcaggaagctttagttgaaactatcggatgttccggtatgactcactctgctgctatggctgctgaaattcttccgggaaaaacgatccttgaagcattgaacactgaccttgtttgcgacgctatcaatactgcaatgcgcgaacttttcttgcaaatcgtatacggacgtactcaatcagctttctctgaaggtggtttgattatcggtgcaggtttggaagacttgggtaaaggtcttcgtagccaggtaggtactctttatggtactttggctaaaggtcctcgttaccttgaaatggcagaaggttatatcaaacaaatcttcttggacaagaacgacgaaatctgcggatacgaattcgtacacatgggtaagttcatggacgaaatcaagaaaggtactgatgctaacgaagctttgaagaaagttacaggtacttacggacgcgtaacagcagaacagggagcagttaaatctattgatccacgtcacgaataatataaggaggaaagaaacaatgattagagaagtaaaattcgaaagccaagaccgtcgtatcaaacagattatcgctgctttgaacgctaacggcatcaaagatatcgaagaagctaacgctatctgtgaagctcatggacttgatccttataaaacgtgtgaagaaactcagcctatctgttttgaaaatgcaaaatgggcttatgttgtaggtactgccattgctattaaaaaaggttgtacaaacgctgctgaagctgctgaagctatcggtatcggtctgcaagcattctgcatcccgggttctgtagctgacgaccgtaaagttggtatcggccatggtaaccttgctgctatgttgctgcgtgaagaaactaaatgtttcgctttcctggcaggtcacgaatctttcgctgctgctgaaggtgctatcaaaatcgctgcaaaagcagacaaagtacgtaaagaaccgttgcgttgtatcttgaacggtcttggaaaagacgctgctcagatcatctctcgtatcaacggctttacatatgttcagactcaattcgattactttactggtgaactgaaagttgttcgcgaaatcgcttactctgacggtcctcgtgcaaaagtaaaatgttatggtgctgacgacgttcgcgaaggtgtagctatcatgtggaaagaaggtgtagacgtatctatcacaggtaactctactaacccgactcgtttccaacatccagttgcaggtacttacaagaaagaacgtgttcttgctggtaaaccatatttctctgtagcttcaggtggtggtacaggtcgtactcttcacccggataacatggctgccggtcctgcttcatacggtatgacagacacaatgggtcgtatgcactctgacgctcagttcgccggttcttcatcagttcctgctcacgtagaaatgatgggattcctgggaattggtaacaatcctatggtaggttgtacagtggcttgtgctgtagacgtggctcaggctttgggtaagtaattcaaataattaccatatagtaaatccctgtaactgataaggttatggggatttttattttcatgttcgtaggttgaactgctgatttacctctctcctacctttctaatatagtttagttttgtattcctacctaatactgatttcactttactaagatgaatatagatactactttaaactaaaaaagaaagtatttattagtccaatgcaaaaaaagtagagtattaatacaactatccctaatgataccttgttaaagtaagagttattaattatctttgcattgaaaggagatacacctatgaagctgattgaaaataatatccaaaagataattgacctatgcaaaaaacataaggtacataaattatttgtctttggttctgttcttacgagtcgttttaatgacaacagcgatgttgatttagttgtcgattttaataaggcagaagtaagcgattactttgataatttctttgatttcaaatatgctttagaaaatttgtttggtagaaaagtagatttactggaagaacagactattaagaatccatatttgaagaagaatgtggatgcaactaaaactttaatctatggatgagttaataaagaaacacttgcaagatattctaactgccattgaagaagtagaaagtttcttcggcaatgctcctaaagtttatgatgacttctatagtaacctatgccttagacgagccgttgaaagaaacatagaaattattggtgaagcaatgaatagaatactaaaagttgataaagatatagctataaccaattctcgtaaaatagtagatgccagaaattatatcatacatggctatgatagtctatccgtagatatactttggagtatggttattaaccatttaccaaaactaaaaaatgaagtaacagcattactaaatatataaggtttgtgacttattcacgaccatttattcaaaacagagagatttataatctggagcgttctttaaagcatttcaatattcacctgtaaaacattcatttacgattaatttgattgaattatagggatgcagtgtcgctacttcatacggtatgacagatacgatgggtcgtatgcactcagacgctcagttcactggttcttcatctgttcctgctcacatagaaatgatgggattcctgggaattggtaacaacccgatggtaggttgtacagtagcttgtgctgttgacatagctcaggctttgggtaagtaatttattacttttatacataaggagagtgttcaatacagcactctcctatttttacttaaaaacaaaaacttttggaatagcgtttccattctatatttattaaaagatattggcataaacaccaaaaaattattatataacaatgctaatttatcaactgaactttgttggatataaacctaataaccatatctgcataagctcataatcaataaaattatggaatacatcaacgaatttcacaagcaatggatagagcgtactcgcaagtcaatagcattatggagcaagcagccagcctcattagaagaaaaaaggaagcaacaagaacgtttggaccaacagaaagctataagagaaggcaaattgaagagctaatttcattggccaattcagacaatttatggatttccccctctaatttgaatatagaattcttaagtaaaggtggagaaaatgaagtctatacaggaaatgaagatatagttgtaaagctgaacaactttgagtacgcaggcgatgatttatggaatagatggagatttgtattttattgatacacaaattagattgagaactcaatcctaacgaaagatctatttgagaactattatacaacttcacttgtttatataacagatactaaacattatacaacaatgctactcacattcttaaatacactcgctactatcatcagtgtcatcagtttactgattgtgacttatggcgtactcgtcggcttcattgccttcctacgcaatgagataaaacggttcaacggaacttataccattaataatatccggcaacttagagcagatttcggcagttaccttttgctgggactggaatttctaatcgcatccgacattctgaaaactgtagttgatcctactttggatgagctggcaatcttgggcggagttgttgtagtaagaactgtactttccgtgtttttgaataaagagattaaagaactggcagaagatggttcatctaaggaaataaaggaaatataagaaaggtcagcattactaactttctccaaagctgcatatttttattaccggatatttctacttttagctacctttgcaaaagcaaatcctttataaagaagctaaaagaaaaatatccatgcatctaattatatatagctcatttttatactctatgcaactccaagcagttccacttcgaatatcaatgtcgagtaagcaggaatagaatcaaaagatttaataccatatcccattgcataaggtatatagataatccatttatccccaacatgcattttctgaagtgctacctgccacccttctattacatcactaagacgtaaggcatcgggacaagtacgttcataagaattatcaaatacccggccatcaatcagacttcctttgtaatgcacggtaacaatactccgcgcacccggagaaatcgtaccttcaccagtttccaaaactttgtaataaattccacacggcaacgcaaaaacaccttcctgaaaagacagttttttcagaaatcgtcgattggcctctttgtattctttctttttccccataaataaattgattaagaacttgcaaaaataatcagaataacaaaggatttagcataaaaactgtatatttgtttgttgaactataaaaaactcatcgctatgggactaacaaagactacacgtagcattagtgctaccggactactcctacttatcatgatgactgtgggcctatattcatgcacacgtactcaaaaagacatcattccttctgccgattatgcaccgtatgtaaatgcgtatacgggaggagttatttcacagaattcaaccatacgcatagagttgacccatgaccaacccatggtggatctgaacagtgagttaaaaaacaatccgttcagcttttccccttcattaaaaggaaaagcatattgggtaagcaacaacaccattgagtttgtgccggaagaaggagcattgaaaccgggaacgctctacgaaggaactttccggcttggagacttcattgaagtggacaaaaaactaaaagagttcaacttctcattccgtgtgcaggaacgtaacttcactttgcagttggagtcgttaccaattacagctgcccaaccggatgaaataaatattaaaggagaaatacgcttcagcgatgtagtgaaaaaagaggaagtggaaaagatgctgactgccagcgatggcaagaagagttatccggtagaagtcaccacgacagacaaccttacccggtatcagttcaacatcagacaaatacccagagaagctgatgattacccattgaccattacagccaatggtaacccagccggcattgaccgcaaacaaagcgaagaagtgctgataccggctaaagattgcttccgttttatgtctgccgaacgcattgaacaaccggaaaacggaattgagattgttttctccgctcctttatccactacccaggatttaaaaggactgattgagattccggaagtctcctcatctatcttccaaatcagcgagaacagagtcttcatctatttcgaagcaaacacgcagaataaactgacattgaatatccatgaaggagtcaaagacagtcaaggtaaagcgctgggaacttcacatacgatctcgttcagtgaagttagtctgaaaccacaagtagaaatgtctacctccgccgccatcctgcccgattcgaaaaatctgattattcctttcagggctgtcaatctgtatgccgtggatttgagtgtgatccgtatcttcgagaataatgtattgatgttcatgcaaaccaattcgctcgcctcagccaatgagctacgccgctcaggaaggctggtttataagaaaacattatggcttgccaaagatgcttccaaagacattcatcattggggggattactcaatagatcttgccgggttgattcatcaggagccgggtgccatataccgtgtcatactttcattccgtcaggaatactccgcttatccttgtggaggaaacaagaatcaggatatgaaattcgccgacagtaacacatccgatgggttgaccaaagtaagcggaagtgtcttgtctgaagaagatgaagccatctggaatacgcccgaagcttactattattacaacggaggaacaatggactggagcgtgtaccgatggacggaacgcgacaatccatgccatccatcttattatatgaattcagaccgaattgctgcatgtaatgtgtttgcttccaatctggggatgattgtaaaacggaattcactgaacaaactatggattgccgtaagcaatattttggacaccaaaccgatagggaaagcacaagtaacagcatataacttccagttacagcctataggaaagggagagaccaatggagacgggttcgttgaaatcgctccgaagggcgtacctttcattatcgtggctgaatcggaaaagcaaaaggcgtatgtgcgtgtcgtagacggtgaagaacagtccgtcagcagattcgacgtgggaggaaaagatattcaaaagggattgaaaggattcatatatggcgaaagaggagtatggcgaccgggagacacattgcacatttcctttatattggaggaccgcgaaaagagaatccccgacaagcatcccgtagcactggaaatatacaatccgagaggacagttctacaccaaaatgatttcaacgcaaggaatgaacggattttatacattcgacgttccgacacaggctacagatccaaccgggctctggaatgcatatattaaagtaggaggaaccaccttccacaaaggtctgcgtatcgaaaccataaagcccaaccgcttgaaaataaacctggcattgccgaagattcttcaagctacggacaaggatgtctacgccccactcacttcaacctggctgacaggagccactgcctccaaattgaaagctaaaatagaaatgtctttatctaaagtgaatacacagtttaagaattacggacaatatatcttcaataatccggctacggatttcacgactatcaaaacagatgtatttgacggtacactggatgcagaaggaaaagccagcgtcacactgaaagttccgactgcaaccgaagcaccgggtatgttgaatgcaactttcaccacccgtgtattcgaaccgggaggagatgccagcatctacacccaaacaatcccattctcgccatttacatcttacgtcggtatcaacctgaaccaaccgaaaggcaaatatattgaaacggacaaagaccacgtattcgatattgtaactgtaaacacgcagggacagctagtgaaccgtactaatctggaatacaaaatataccgcatcggctggagctggtggtgggagaacagcggtgaatcttttggcacttacatcaacaacagttccatcacacctgttgccagcggcaacttacagacaagaggcggaaaagcatccttcaagttccgcgtcgattatccgtcatggggacgctacctggtttacgtaaaagacaaagagagcggacatgccaccggaggaaccgtttatatagactggccggaatggcgcggacgttcgagcaaaacagatcccagcggcatcaagatgcttgctttctctctgaacaaagattcatacgaaattggagaaacagccacagccattattcctgcggcagcgggaggacgtgcactggtatccattgaaaacggttcgacagttttgcgtcaggaatggatagaagtctccaacggaggagatacgaaatatacattcaagattacgccggagatgactccgaacgtatatttgcatattagtctgctacagcctcacgcgcaaacagtcaacgacctgcctatccgtatgtacggcgttgttccggtatttgtcactaacagtcagacagtattgcaaccacagatacagatgccggaagtgttacgcccggaaaccaacttcaacgtgaccgtcagcgaaaagagcgggaaaccaatgacttatacattggctatcgtagacgacggtttattggatcttaccaactttaagaccccggacccatggaatgatttctattcacgcgaagcgcttggcatccggacatgggatatgtatgataatgtattgggagcttcttccggaagctacagttcgcttttcagcacaggaggagacgctacgttgaaacctgccgatgctaaagcaaaccgttttaaaccggtagtcaagtttataggtcctttctatctgggaaaaggaaagagccagacacatacattgaaacttccgatgtatgtgggttcggtacgtgccatggtggttgccggacaggatggtgcttatggtaatacggaaaagactgccttcgtacgaactccattgatgatgttgtctactttgccccgtgtgcttagtattcaggaagaaattaccgttccggtcaatatctttgcgatggagaatcaagtgaagaatgtgaccgtatcacttcaggcatccggtggaggagtacagattgtaggagctaaccaacaatcgctcaaattcacccaaccgggagaccagcttgtcttctttaccttaaaaacaggcagcaaaaccggaaaggctacaatccacctgacagcaaatggcggcggacaacaaaccaaagaaaccattgaaatagacgtacgcaatccgaatccggtagtaaccctgcgcaacagtcaatggatagaagccggacaaagcaaagaattgtcatacaacctaagcagttcttccacaaataatcagatcaagctggaagtatcccgcataccttcggtagatatcagccgtcggttcgacttcttatacaattatcagcaccattgcacggagcagttgacttccaaggctctgcctcttctgtttgtcgctcaattcaagacgatagataagacggaagccgaaaagataaagacgaatgtacaggaagctatccggcagatttatggtcgtcagctccccaacggcggatttgtatattggccggggaatgctgttgccgacgaatggatcagttcttatgcaggaatgttcctgacgctggcgcaagaaaaaggatatgccgttcatgcgaacgtactgaacaagtggaagcgcttccaacgtgcagccgcacaaaactggcgtatgccgcaggaagcaagcggttggcagcaatggcagtcggaattgcaacaagccttccgtttatatacccttgcattggcaggagtaccggaatatggagctatgaaccgaatgaaagaacagaccggattatctattcaggccaaatggaggctggcagccgcatacgcactgaccggaaagatgaaaccggctgaagaacttgtttataatgtagaaacaacggtgaacccctactcttccatgaatcagatttacggttcttccgatcgtgacgaagcaatgattttggaaacactcatcctgatgaaccgggaacgggatgctttgcaacaagcgaaagtcgtttctaagaatctgtcacaagaggattggttcagtacacaatctaccgcttttgctctgatggcaatgggacgtctggcagaaaagttatcaggcacactggattttgtgtggtcatggaacgataaacagcaacctgctgtaaaatcagccaaagctgtgtttgaaaaagagatcgctaccactccaaaatccggcactgtttctgtgaagaatcaaggaaagggagcgcttagcgtagaccttatcacacgtacgcagttattaaacgatacgttaccggctatcagcgataacctccgcatggatataagatatgctaacctgaacggtacaccgctctctgtcaatgacatcatacagggaactgactttatggctatcacctcaatatccaatatcagcggtacttctgattacactaatctggcactgacacatatcataccgtccggttgggaaatatacaatgaaagaatggttgctcccgaaacggaaaacgcagcagccgacggctccggtcaatcagtcagcaagtacagctatcaggatatacgtgatgacagggtgttgacctatttcaatctgcgccgcggtgagacaaaggtattcactgtcaggttacaagcgacctatgctggtaactttattctccctgccgttcaatgtgaagcgatgtatgatgcaaacgtacaggcacgaagcaaagcaggaagaaccattgtcagtcgataatacttggcacggatacacggatttcacggttctactcgttcacttaaaccgcgtaatccgtgtaatccgtgcctaattatttcgtaccttattatttcttacttaattatttgtcataaagatatgtctcttagcttttaatatttaaatgaatcctataaaattcttcaaacgattatctgtcactaaaaaagtaatgactataagcattactcttttgataataggatacatcttttgccttccccggcaactgtttcatgtaccctattctaccgttgtgactgatcgaaatgaagaattattgggagcacgcatcgcctcggacggtcaatggcggtttcctccccgaaagacaacacccgaaaaaatcaagcaatgcctcattacctttgaagacaaacacttttatcaccactggggagttaatccgttagctaccggaagggcactctatcaaaatttaaagaacaaacgtgtcgtaagcggaggcagtacccttaccatgcaaaccattcgtctcgcccggaacaaacctagaactctcggagagaaagtcgttgaaatgatatgggctacccgtctggaatttcgggcttctaaagaggaaatcttatccatgtatgtctctcatgcaccattcggaggaaatgttgtaggattggatgctgctgcctggcgttacttcggtcattctgccgaagatttatcatgggcggaatcggctatgctggctgtcctccccaatgcccctgccatgatccatctatccaaaggacgaaagacactgctttccaaacgcaaccgtctattaaagcaacttcttgaagaagagattatcgacgcatccacctatgaattagctgtcagcgaaccgttacccgacgagccgcatccgcttcctcaaatagctccccacctagtcagtcgtttctatcaggaaagaaacgggctatatacccgttcaactattgacagagggatacaaacccacatagagagtttggcagaacggtggagcaacgagtttaatcgaagtgatatccgcaacctggcaattctggttatcgacattcccaccaatcaagtagtagcatactgcggaaatgtacatttcgaccgtaaacaaggaggaaaccaggtagatgtgatccaagctcccagaagcacaggcagtattttaaaaccttttctctacaatgccatgctacaggaaggaagtttattaccgaaaatgctgttaccggatgtaccggttaatatcaacggctttactccccaaaacttcagtatgcagtttgaaggagccgtccccgcttccgaagcccttgcccgttcgttgaatatcccggctgtaaccatgttacaaagatatggagtacccaagtttcaccatttgttgcaacagatgggattcaagactatcaatcgggcggcttctcattatggtttgtcactgattttaggaggtgcagaagcaacattatgggatgttacgaatgcctatgcacaaatgggacgaagcctttccagcaatagcccctccccgaccgtatctcaaggaaaggaagcacagatactactggaaacagaaaatacagagccaataaacaatgatgcgaagcaaacaagccgtaatcataaaagcaatcataacaagcaggaaaaacgagaacaaagtaactccagtcctctctccgtagaagaggattcggaagaaaccacttcggctaaaacaggagcagcttggctcaccctctccgccttaacagaagtcaaccgtcccgaagagattgactggaaatcaattccatccatgcaaactatcgcatggaaaaccggaaccagctacggattccgtgatgcgtgggcagtgggggtgactccgcgctatgcagtaggcgtatgggtaggcaatgcaaccggagaaggaaagcccggattggttggtgcacaaacagccggtcctgtattattcgatatattcagttacctcccttcttcaccgtggttcgaacgtcccacaggcgttttcgttgatgcagaaatatgccgccagtccggtcatctgaaaggacgtttctgtgaagaaactgataccgtattgattcttcctgccggattacggacagaggcttgtccttaccatcatctcgtcactctatctgctgacgaaagccaccgcatctatgaaaactgtgcaaataccgaacctaccattcagaaatcatggtttgccctgccacctgtatgggaatggtactataagcagcaccatccggaatacaaaccactgccacctttcaaagccggctgtggagaagattctttccaatccatgcagttcatctaccctccgatgaacgcccatatcaagttgcccaaacaattggacggcagtaaagggtttctcacggtcgaactggcacacagcaaccccaatgcgactatcttttggcatcttgacgacacttatcagacacagacgcaggatttccacaaaatttccctgcaacccgctcccggcaaacattccctgacggcagtagacggagaaggcaacacagtttccactactttcttcatcgaataaacatcttattttattatctttgccgcatgaaacagccattaaaagaaaacggaggactaccggcatccatcctctggacacttgctattgtggcaggtgtctcggtagccaacatctattatatccaacctctattaaatatgatacgccatgaacttggcatatcagagttcagaactaacctgattgccatggtcacgcaaataggctatgcggcaggactgttgttcatcacccccttaggcgacttatatcaacgaaagaaaatcatccttgtcaatttcaccgtcctgatcttctccctcttgacgattgccctgacacacagcttccatctgatactcatcgcttcattcctcacgggagtctgttccatgattccacagatattcattcccatagccgcgcagttttcccgtccggaacataaaggcagaaacgtaggaattgtcttatcaggactattgaccggtattctggcttcacgtgtcgtcagcggatttatcggtgaactgattggctggcgggaaatgtatcacattgctgcaggcatgatgtttatctgcgcgattgttgtattaaaagtccttcccgatattcaaaccaacttccaaggaaaatatagcgacctgatgaaatctctgttagccttagtgaaagaatatccgcaactacgcatttattcgattcgggcggcactgaatttcggttccctccttgccatgtggtcctgtctggcttttaaaatgggacaagctccgttcttcgccaacagcgatgtaatcggtatgctgggactttgcggagtagccggtgcactgactgcttcttttgtcggaagatacgtaaaacgggtaggcgtacgccgtttcaactttatcggctgcggtttgattctctttgcctggttattgttcttcgtcggtgaaaacacctttgtcggtatcatcgtcggtatcatcatcattgacataggaatgcaatgtattcagctaagtaaccagacaagtatcttcgaactgaatccgcgtgcttcgaaccgtattaatacagtgttcatgactacttactttatcggtggttctatgggaacattcctggcaggcagcttttggcaactgtatggctggcacggagttatcagtatcggagtcgttttaaccgggatttctttattaattacgattttctacaagaaatgagtcaacaaaacgaacggtcaaaccgtttattacaataaaacgccaatgaaatacggagttaacagacaaatcttacttatcacagccggtaccgtctggattatagccggtgccaatattctgcgaataggaattgtgacctggttaaacacttcccaagattggatgttcaaaataggagaagccaccgtggttttcttattattcttcgtattggttttcagaaggctctactataaacatacccagcgaatcgagcaaaagaaagaacgccggaattgtccgttctctttcttcgatgtgaaaagctggattacaatgatattcatgatttccctgggaatcaccatccgtagcttccacctcctgcccgaaacgttcatttctgttttctataccggattatccatcgccctcatcctgacaggagtgcttttcatccgttactggtggatcagacgcaagacttttgccagttgagccgtctcctacatattccaatcaaatataaacatctaataatttttattacctgatgttttgaagcaaaagatttcattcttttttgttgtatctttgcgcggctatcaacaagcagtagccggaaaataaataaaaggttataagaatcaagatgaaaaaagctccctctcccctcgtatcgttgataccgattgttgtactggtgttattattatttgccactatccgtacctttggcagtgatgccctaagcggcggaagtcaagtgtcattgcttaccactacagccatttgtatcctgatcggtatggtgttttataagattccctggaaagattacgagctcgccatcactaacaatattgccggagtggcaacagccatcatcattctgttgataattggtgcgttgagtggcatttggatgattagcggagtagtgccgactttaatctattacgggatgcaaattatccatcccagtttcttcctggcatcgacctgcatcatctgcgcgttgatttctgtaatgaccggaagttcgtggaccactattgccactatcggtattgcattgatgggtatcggaaaggcgcaaggttttgaagatggatggattgccggagctatcatttcgggggcatacttcggggataaaatatctcctttatccgaaactactatcctggcgtcttccatcacagacactcccctgttccgtcacattcgttatatgatgattactacggtaccgtctcttatcatcacgctgattattttcacagtggcaggactttcccatgatgccagcaatacacaacatattgcggaggtggcaaccgctttgaacgaaaagtttcatatcactccgtggttgttaatagtccctgttgtaaccggaatactgatagcacggaaagtaccctctatcgttacgctgttcctatccactctgctggctggtgtctttgctttgatatttcagccggagttgttgcaagagatttccggagttgccgtttccggattcgattctttattcaaaggactgatgatgaccgtctatggagcgacaaatttacatacagacaatgccgttctgacagatttaatcgccacacgtggtatggcgggaatgatgaatacgatttggctgattctgtgcgccatgtgttttggcggggcaatgacagcaagcggtatgctgggaagtatcacttccatcttcgtccgcttcatgaagaaaacagtcagcgtggttggagcgacagtctgctccggcctgtttcttaatctgacaactgccgaccaatacatcagtatcattctgacgggaaatatgtttcgtgatatttatgccaagaaagggtatgaaagttgcttactaagccgtacgacggaagatgcagtaaccgttacatccgtattgattccatggaatagttgcggaatgacacaagctactatcttgagtgtacccacacttgtgtatctaccttattgttttttcaacattatcagccccttaatgagtatcactgtggcagccatcggatataaaattgcaagacgttcgtgaacaatctggcatacactttgtttttgcaataaacgaacaacgtattaaacctaaacaaaaaaaagttatgaaaaagtttattgcattagtagcattagtattagtaagtgcaagcacaatgatgtatgcacaagaaagtaacgcagcagcacgccgcgcagaaagaaaagctcaaagagatgcagaaagagcaaaactccgtgccgaagaagaggtgcaagacatggcggcctatcaacaagctgtacaggctttgaagaacaagcaatttgtattggaagctaatcaagttgtcttccgcaacggtatgagtgcttttgttacttcaaacaccaacttcgtcttgatgaacggcaacagagctaccgtacagactgctttcaacactccttacccaggtcctaacggaatcggtggtgttacagtagatggtaattcttcggatatgaagatgaatatcgacaaaaaaggaaatgtgaactgctcattcagcgttcagggtatcggcatctccgctcaagtatttatcaatatgagcagcggaaacaatactgcttcggttagcatcagcccgaacttcagcaacaataacctgacattgaacggaaatatcgttccgcttgaccagtcaaatatcttcaaaggacgttcctggtaatccggatacaagaatcttatcataactccgctacaaatcgcgcaaaatgcgtacatttgtagcggagtttttttattcatcgttgcttatgagagaatttatcatcgcagacaatcaggatatcagtaaggcaggaatgatgttcctgctaagtaaacaaaaggaagtgtccctccttttagaagctgataacaaggctgaactgattcagcagctacgattgcatccgcaagcggtgattgtattggattatacactgttcaattttgccggggcggatgaattgattgtcttgcaggaaagattcaaggaagccgactggattttattctctgacgaacttagcctgaactttctccgccaggtactgttcagcagtatggctttcggggtagtgatgaaagataactcgaaagaagaaatcatgactgccattcaatgtgccacccgcaaacaacggtatatttgcaatcatgtcagcaatctgttgctttcgggcgcttcttctccgctggctgcctcaagcgtagacgatcatctattgacacaaacggagaagaatatcctaaaagaaattgcattggggaaaacgacgaaagagattgcaacagagaaaaatcttagtttccatacgataaacagtcatcgtaagaatatctttcgcaaattgggagtaaataatgtacatgaagctactaaatatgcgatgagggctgggattgtggatttagcggaatactacatctgagatgccgccttataagaattaccctacacatcctattagcacaaactagtgaacagtgcctttctctattctatttcaatccattctgtttcagaagttgttctatttccttttctgatatagacgctctatctgctttatcataaatatagagaagattcaaaactgcatcttgttgagaaacgactaaagtaaatgttataacccttgctcctccacttttaccttttccttttgaagttattttcatacgaactttgcgcagtccatgtcccaagtccgttcctagcagaggattctgttctaaatcatcaatcaatgaaacaaaatcctccttaaaagaggaatagtgtttcgccaactttttagcctcccgctggaatgtcggcttaactataatttcataattcattaatgaactctcttgcagtctttacctccaacttaccttccattgaaagttttacctctttcagtccggcgtcaatccctgctagaacttcttctttcgtgatttcttcctcttctttttcagcttccatttttttcagtcgtttcaaatagttcttcactcgattgagcatctctttgtcattcaaactcaggagttcctccaccaagtccattttcagacttttcaattccatcgttgtcataagcaatcctcctttatttatattctacgaaacaaaagtagtgaaaaatctcctgattatccaatcttcaccattcaaaataaactatttaacagatgatttcaccgctccccacacaaacttttacttcttcatcataaatcaccccaaactgtcccggagcaatgccttgcaacttttcggacgacaagatgtgaaactgcttctccccttcctgtatcagttttccttttgtaaattcgggagtgtgacgaatcttgaaagtaatgtctatctccttctcctgacctttccaaggattatcagtaataaaatggaaatcatgcatccggaattcataaccgtattgcgtctctacaccatatccacgggatacgtagatagtattttcctcaatatccttcttgactacaaaccagggacctccactcaatccgagccctttccgctgaccaattgtgtggaaccaatagccgcgatgtgtacccactttctttccggtttccagttcaacaatcgctccttccttttctcctaaaaaacgacgaacgaaatcattgtagtttatctttccgagaaaacaaatcccctgactgtctttccttttggcactaggcaatccggcacggtttgcaatctcacgtacctcctgcttcatcaaccctccaatgggaaacatgagtttggaaacttgcaggtaatcaatctgggcgagaaagtctgtctgatctttcacgggatcttttgccgtgcccagccaagttttaccatcacgttgtaaggtggtggcatagtgaccggttgctgtaaaatcaaaatctttcccgacacgctgttcaaagcaaccgaatttgataagcttattacacatcacgtccggattcggtgtcaatccctgccgaattttatcaatggcatacgccgccacattctcccaatactcctgatgcaggtccaccacttccaaagacaaaccgtatttacgtgccgttgcagtagataattcaatatcctcctctgccgaacagtccatatattccgctccgtccatacctatcttaatgtaaaaaagagtaggcttatatccttgctcacaaaggagatgtacgacaaccgaactgtcgacacctcctgataataatgcagctatctccatgaataaaaatccgtctattaataactttctatattttagctaatacctatcgaaaactttgatgtcacaaagataaggcaagattctctaacacccaatcacacattgaaggcatttttataccataaatgtggtagataagcaaagtatttcctacatttgcacagtaaaaagctttttatgatgacgaaattaagaaagataatcctcatacctgccctgatcctcgtatctatcagtggtttcttctcctgtggtgtcgaccgctggccggagtatgcccatcaaactgcactggatacatggatgtacgacatcatgcaacagaactatctgtggtatcaagatctaccttcctacgatgatgtgaatctgtttctggaacctgcctcgttcttgtctaaagtgaaatcgaaaagcgacagttactcgtttgtggattctgtgatggaaactccgctgcctacttatggatttgattattcactggttcgaagtgtggatatcgatacagcatataacgcattaattacttacgtcattcccggttcaccggcagaagcagccggtctggaacgtggaaactggattatgaaagtcgatacttcttacatcagcaagaaatatgagactcaattactacagggaacccaagcccgggatctggtgatgggagtatggaaagaagttcctgttgagccggaagaaggggaagaagtaggagaagaagaatttgtatataaggtagtacctaatgacataacattaaaactacctgctgcacgatccgttgaggataatccggtacataaaaccaaaatacttacggtaaaagaaaacaatagagatatcaaagtagggtatctcatgtacaatagcttcactgccggaaccaatagtgatccagacaagtataataacgaactgcgacaaatctcacaagagttcaaaacagcaggcgtgaaatatgttatacttgacctacgttacaacgccggtggttcattggattgcgttcagttattaggtacaattctgacttcagaagtacgattaaataagccgatggcctatcttgaatataataataaaaacagggacaaggatgctaccatcaactttgatagtgagatattaaagagcggtgttaatttagacctacccgccctatttgctatcacaagcagtacaacagccggagcaccggaaatgttaatcaggagcctattcctgaaagacagctatcctgttgtaaccatcggtggtgtcaccaaaggacaaaatgtagcaacagaacaattcattaatgaagaatttctgtggtcaatcaatccggtagtctgcactgtttatgattccaaccacgatgccggaggagctctctcccctgcaacagatcttaaaatcagtgaaacgactattggtggagttactaattacagtgagtttctgccattcggtgatcctaatgaaagaatgttgaaagtagccatcggtgttattgacggaagttatccaccaaaggacgaggaaaccgaagagacgacaaaagcgcaattcaagatagaaaaaagcgtaataagtccggcaagtagacgttttagtagtaacggattacgattaaaataagaaaggatgaaaatagtagccattttattgctggcaatactgacattcagttgttcggatgatgacgaaaagagtacagaagagaataaagggcaatgggctatgattttcaaagaaaccgtcaagagcgattcaaatcctgtagatagaacagagaagtttatattcgatgatgaacgcctgatccaacacattataaaacaacgttatttcgaagaagaaatcagtaatgaagtaaacttgagctactctgataatcaggtaacagttaccactgactatctcactttaatatatacattaaatagcgaaggctatgccagtcaatgtgtatacagtttgtcttcacaaaatcgtatttatcaattttcttactctgcagaaggatacttaaccggaattgtcgagaatatcgacgatacagaatattcatcaacatcacttacatacgagaacggagatataacctctatcagttccaagatgaacggccttgaaaacaagttcatttatgaaccgggagaagaaagttcgaaataccatttgccctgtctcggtttattagaaatacaccctctgacattccatattgaagctctttacgcagggttattgggtaaggacccgcgccatttcaccatacgcagttgtcctgcaggaagtaacgacgaaaagacagtctattcgtatggatttgataaaaaaggaaatccatccaagatgatttgtctgacgacctatgccggaggacaggccagctattatccatacacacgcaacatttcgatttctttcgaataatctttcattccggacatcgaattctcttttaaagtagcataatcactctatttctgtcaagagcagaattatagattcttaacctataaaggtgcttttcatgcctcaactttgtttattccgaaacaaaggctctgattttacctaacaaaggctctaacttctcctaacgcagcgtttaatgagtcgtaacgcaccgtctaatttttataaagctacggtataaaacacgttaatctctggtttcatcccttttataaaccgggataaaactcacgactcccaaggatacaacaaaaaaggagaaagcttccgctccctccttctatcgtagtttaacctcaatctattttatgattctgtaccaaagatacaacattgaaaagccaaagtcaagtattcccggttttatttcttgaaaaacttatcaaagaatagaatctgataatcaatggagttattccaatactgtccattatgcgctcccgggcgggtaataaaatcatgatcgatctttctttccaacaggcggttatgcaaatccttgttcacattcaggaagaaatcagcttctccacaatcgacaataatagccaaatcgccattctctatcttatcaatctgattgataacggtgtgattatcccatacctccttattcgattcatattctcccaactgtttagccatgtcccagtttttcgggaacgggcgaatatccatccctccgcttgtacttccactggcaccaaacgtatctttatgacggattgcattccacatcgctccgtgtccacccatactcaatccggtgatggcgcgtcccttgcggtcggcaatcgtcttgtaatgttcgtcgatatacttcaccagttccgacgaaataaaagtttcatagcggaaagacgggttgaccggactatcccagtaccaactggtctttccgtccggacaaacgaatatgattcctttttcgtccgcaatttggggaagattcggtttaatgccaatccatgttttagcatttccaccataaccgtgcaacagataaatagtaggacaagccaccgatttctttcctgatgcagcatccggcgtaacaacgaccacttgcacttccttattcatggaaggacttttaattaacaaggtatctactttggcagcaaaagagggagctacccaaattaaaagaagagcaattaatagattttttttcttttccattgtgtgttataaatagttagatataattattcctctggctctgcagcaggattaaatttagcaaccggcatttcaaaggttttatgacactgtttacaggtatagttccagtggttgtctcccgggggaatgaccattaatgcagaaatgatagcagcccccatagcacgccaacgctttccttttctcaaaaccaactggatgtccgatgaaccgcagtacggacaaagcgttaactcttccggccaactatcgttatccttcaatacttggacagcattctcgtagtcttcatctgccaccaatatatccacccctgcaatactacttacgcaacttttatacaaagtagagaaattctcattgtgcagaatagactcgatgccttcattctccaatgctccctgaaggatatgtgccttcatcgcatcattacaagtgatcaattttacagtcttcataaggaatctgttttaatatgtcccacaaaaataagatataaaaatgaaatgtgaaacaaaacccgactaactttatcagcaggtaaaacgaaccaaatcagaagtgattctttttttattcacggaaggtatcattatttaatacttttttcgtactttcgcagcgacaattggcaatcacatgaaaaaactattgacactgctactattttctaacatcctgttttccctgttacaggcccaacctgtacatcaaataaagggaacggtgattgagaaaaacagccgtcagccattagaattcattaacgtaatggttcttgggctgaacaaaggtggtgtcaccaatgcggaaggtcatttcaccatcgaacaagtgcctcccggcatctaccgcctacaagctacagctatcggctacaagagtgtcattactcccgaatatatcttatctaccaaagatctgaacatttcgatagaaatggaagagaacctgaccgaactcgcaggagtaaccgtcaccgcttctcctttccggcgcgacctggaaagtccggtcagcctgcgtatcatcggattgcaggaaatagaaaagagtccgggagccaaccgggacatttcgcgtattgttcagtcttatccgggagttgccttctctcctatcggctaccgcaatgacttgattgtacgcggtggttctccttctgaaaaccgtttctatctggacggagtggaaattcccaatatcaatcacttcagcacacaaggagcctccggcggtccggtgggaatccttaatgccgacctgatccgtgaagtaaatttctataccggtgcttttcccactgacagaggaaacgcgcttagctccgtgcttgatttcaaattgcgcgacggagacatggagcataactcactaaaagctaccctcggagcatccgaagtctctctggcctccaacggacatattggaaagaagacctcctatctggtatctgtgcgtcaatcttatctgcaattcctgtttgatatgctcgacctgcctttcctgccgactttcaccgatgcgcaattcaaattgaaaacccggttcaacgaacagaacgaattgacggtattggggcttggaggaatcgacaatatgcgattgaacacgaaagcagatagcgaggacaatgaatatatccttagttacctgccaaaaatcaagcaggaaacgtttaccttaggtgctgtatatcgtcactatgcagggccgcatgtgcaatcggtggtagtcagtcacagttacctgaacaaccgcaatactaaataccggcagaatgatgaaagcattccggagaatctgatgctccgcctccgttctaccgaacaggaaatgaagttccgcttcgaaaacaattcttctttccgcaactggaaagtcaatctcggagtgaatctggattatagtcaatataccaataccacctttcaaaaggcatataccaatcaggcacaaacgtttgattaccacacctatttgggaatgatgcgttggggacttttcggcactatcagctactcttcgatggacgaacgtttcacagcttccctgggattgagagctgatgccaacaattattcgtcggccatgaagtcactctccgatcagctttctccccgcatatcgctttcctaccaacttgccgagcactggttcgtaagcggaaatgcaggactttattatcagttgcctccttacacggcactcggttttaaagataataacggaatgtatgtcaacaaatacaatctgcgctatatgaaagtcagccaggaaagtctgggcattagttggcgcaaaggagatacgttcgaagtctccgtcgaaggattctataaagactatgacaaaattccgctctccgttgtagacgggattcctcttacctgcaaaggaaatgactatggagtgattggcaatgaattgctgacttctaccgctcaaggacgttcgtatggcgcggagattctggtaaaatggctgatcgccaagaaactgaatctggcttcctctttcaccatctttaaaagtgaataccgcaacgacaaaaagagcgaatacatcgcatccgcatgggacaaccgatatattttcaatttacggggaacttacaatctgccccaccaatggagtgtcggcatgaaagtcagttgcatcggcggtgctccttataccccatacgatgaagaaaaatcatctttggtatccgcctgggatgcacaaggcaaagcatattacgactattcgaaatataataaggaacgtcttccggcctttgcacaggtagacctccgcattgacaagacattttatctgaaacattgcatgctgggattctatcttgatttgcagaatatcacggccagcaaactgaaacagcaggatgtgctgatgagcaccggcatcatcgagaatccggaagctcctgccgacagccaacactataaaatgaaacgcctcaaacaatcgagcgggactttgctccccacattaggaataacatttgagtattaatttatgcatagaacattaaactagaaaaagagtatgaaaagagaaatcgctatgattgccttcgtattattaggcatgggaatgacagcttctgcacaattcggcaagaagattaatttaggaaaagctttgcaagcaggtaaagatgtagtatcagccgttacgttatctgatgcggacattgctaatatgagtaaggaatatatggcatggatggatgctcataatccattgacaaaacctgatactgaatatggcaaacgtctggagaaactgacgggacatatcaaagaagtggacggactgaaacttaactttggcgtatatgaagtaatagacgtaaacgcctttgcctgcggtgacggtagtgtacgtatctgcgccggtctgatggatgttatgacggatgaagaagtaatggcagtggtaggtcatgaaatcggtcatgtggttcacacagattccaaagacgctatgaaaaatgcctacctacgttcagctgtgaagaacgcggcaggtgcagccaacgacaaagtagccaaactgacagactccgaactgggagccatggcagaagctcttgccggtgcacaattctcacaaaagcaagaaaatgaagccgatgattatggtgttgaattctgtgtaaaaaacggcatcgacccttatgcaatggcaaatgccttgagtaaattggcagaacttgcaaaagatgctcctaaagcatcctatgcacaaagaatgttctcttcacatccggacactcaaaagcgcattgaacgtacaaaagccaaagcagacagctacgctaagaagtaaagagtttatctaatatataaggaagagttcaaaacttcctgttgatttttattaaggcacggattacacggattaacacaggtcttatttaattgaaactgtgaaatctgcgtaatccgtgcctcaattatattattatgattacacaaaaaagacaacacgattattaaattttcattaatatattacacatatttgcatagtgtcccgatttcttgtaatttcgaccctataaccatttaaatccatttatggaatttcttatcatacttttcttacttatactgaatggcatttttgccatgtatgaaattgcgttggtatcatccagcaaagcacgtcttgaaacacttgtcgcaaaaggcaacaaatcagcccgaggagttttaaaacaattggaagaaccggaaaagttcttgtctaccattcagattggtatcacgctgatcggtatcgtatccggtgcgtatggtggtgtggctattgccgacgacctcgtacctttcttttctctcattccgggcgcagaagcatacgcacgcaacctggcaatgattactaccgtagcaatcatcacctatctttctctgattatcggagagctggttcctaaatccattgctcttagtaatccggaacggtacgccactttgttcagcccggtcatgattctgctgacgaaggtttcttatccttttgtgtggttgctaagcgtctctacccggttactgaacaaacttatcggtctgaaaagcgaagaacgccccatgacacaggaagaaatcaaaatgatcctgcaccaaagttcggagcagggtgtgattgacaaagaggaaacggaaatgatacgcgacgtattccgtttctctgataaacgcgccaacgaactgatgacacatcgcagagatcttattatccttcatcccgatgatacacaggaaaaggtgatgaagattatcgaagaagaacattacagcaaatatctattggtagacgaacggaaagatgagattatcggtgtggtttccgtaaaggatattatcctgatggtaggcaacaaaaaggtgtttaacctgcgcgaaattgcccgtcctcccctctttattccggaaagtttgtatgcaaataaagttttagagctatttaagaagaacaaaaacaagttcggagttgttgttaacgagtatggcagcacagaaggcattatcacactgcacgacctgaccgaaagtatctttggagacatccttgaagaggatgaaatggaagaagaagaaatcgtcacaaggcaggatggttcaatgctggtggaagcttcaatgaatatcgacgacttcatggaggaaatgggtatcctatcctacgaagatctggaatcggaagacttcaccactctgggtggattggccatgttcctgattggtcgcatcccgaaagcaggagacatcttcacctacaagaatctgcaattcgaagtggtggacatggaccgcggacgagtagacaaactgcttgtcatcaaacgggacgatgaacaggaataggatagcaaaaaacgagcaatagctcactatatttatattaacttaaagcacttaacgatgaaaaaagtaattatgttagcagcagtcgtagctgctttggcatcatgccaatcaaaagcaaacaaagccgcagaggcacaagcagacagtctagctcttgcgatgactccgattaccgaattgactgaagtttatgaaggtactcttcctgctgccgacggtccgggtattgactatgtactgaccctgaacgctgcaactgacggtgtggatactgcgtatacactggatatgacttacctcgatgctgaaggtcaaggacaaaacaagactttcacttcaaaaggaaaacaacaaacagtacacaaggttgtgaacaaaaaacctgttactgctgttaagttaactccaaaggatggtgaagctccgatgtatttcgtggttgttaacgacaccactcttcgtttggtgaacgatagcttgcaagaagctgtcagcgatctgaattatgacatcatcaaggtaaaataataataagcctaaccctaaccagtaaaaaagctctgtatagaaccttcgttcttgcagagcttttccttttttacgccattacctattctaatcggactattcactttattagttctaccgatactttgatattaccgtattcataagcccggtaatactgttatcccaataccccgtgtccttcttgcagacgtttcagcctcaacaaggcttcgatataataataatctgcataaataatagaagcatctatttccgaatgagcgggccagtgtcctacactatgcaacaggaatgacggtttgcttttgccactctgataactgtcagagttcaggcttgccagcatttcaatagctgcatctttataacgttttccggttccattcgggaggtaagtggatagttcaagcaaagcagaggccacaactgccgcagcagaagcgtcacgcggagcatccggtattcccggggcactgaagtcccaataaggaaccttgtcttccggcagacgttcgagatagacatctgtcactttctgcgcgaaatcaagatacttaggatctttcgtttcacgataaactaccgtgtatccatagattgcccatgcctgaccacgcgcccacatggtgctgtcagcataaccttggtgcgttactccttttatcagattacctgtaatggtgtcgtataccgctacatggtaagatgtatagtcgggacggaactggcatttcatcgttttatcggcatgagaaacggcaatatcatataaataaggatttccaccattcttcgctgcccagaaaagcatttcgaggttaatcatgttatccatgatggtattgtgcggccagttgcggggttccacttcacgaggccatgaaaggatggttcctacgataggattgaacagagtagccaacgtatcggctgtatcaagaatcacttgtttgtaagccggattcttggtcaggcggtaaccatttccgtagctacagaacacgaggaagcccaaatcatggtcgaaagccggagtcttggaaaggaattctagtgagttcgtgaacttctccgcttctttctgaatctgtttatctttcgtatattcgtaatcataccacaatactccgggccagaaaccggcacaccattcttccttcgtcgctttccgacaattccaatgatgttcgtcagtcatgatattacgtggcatcattgtatagtcgatgccggagtctgttttcagttccgcaagcgtacgttgtgtctgctctgcacaatagtccaatgccttattcacatccaatgtaccggacggctgatgaacacacgtacagaaacctaacatcacagccaaacctactacaatctttttcatcttaatctgatatcttcgagttaattcttaatctttatttctctttgtcaattattgattggtcaattacttattcatccgaaaccaatcgacatctgcccatccccgattgccttcattcggagtcacacagaatagtccgactttggctccaatccatttgccctgacgggctgtgaaagactctcctactgtcgtatatttcttcccgtccagactataagcaaatgtacaaacggctcctttacgaacctttacttgcaagtaaacagtttgccattcattatctgctactcccggcatcttcaaatattttaccggaatgtttgccaattcttttatctgttcaggattttgctgttccgcatccttacaaactgcctgttgcagaataaactgatcgcccgccttgcgaatagaaagataactataatcccatcccatcacaataattccggtttgttctccatcctgcttggcagtaaatgtcagcttggtcgtagctgtaaattcttcagccgggaacttttgcatcaacagattaggaacttcccagaagttcacaaactctttcgagaggctgcctgcataaagacggataaatcccaaatcggtagtaaacccgtaagtgtcttttttattggcatgccattgccattgtaatcccaaatgccgggtattgaattcgtcactctccggcggagtagctaccgaataggtctttcccacattcggtttcttataagtcgttacaggttcaccgcaaccatctttatccttgtccactccgattacaggccagtcatttacccacatcatcggattcagatgaatcacacgtccgtaagcgcctttatcttgaaaatggacgaaccaggattctcctgtgttggtgtctacccagccaccctgatgaggtccgtttatcgttgtctttccttgtgccatcacgattttcgattcgtaagggccatagatgttctttgagcgaagtaccaattgccaaccggctgcgacacctcctgccggagcaaaaatataatagtatccgttgcgtttatagagcttcggtccttctacagtatgattctttccatcatttccgtcgaacaccatcaccggatcggaaataacttctgttccttccgcattcagttcgcaaatgacgaggatactgttcactccactacggcttccggcataagcatgtatcagatatacttttccgtcttcgtcccacaaaggagttgcatcaatcattcctttccctgctttcaccaataccggtttgctccattttcctttcgggtctttggttttaatcatatagattccataatccggatccccccagtaaatataaaattctccgttatgaaaacgaatggccggtgcccatacgcctttaccatgctgtgccttatcgaagaaaggttccggctcctgaaccggtaacgcatagtttactaacgaccaattaaccaaatcattggaatgaagaataggaattccaggaatacagttaaaactggatgctgtcatatagaaatcatctccggccgcacagatatccgggtctgaatagtcagcatgaagaaccgggttctgataagttccattccccttatcagccacccaggtcttagaaatttcttgtgcgcctgccaatgaactgcaagccatcattcctgctaaaaacagaatctttttacgcatataccttactaatcaatttcattcaaaactagattcgttattcctaaaaacaggttctttctaccttatataaaaaccaagcacttttaaaactgaatcctatctctgatttcaaaacaatctatttactgacctatttacttatatatacgaaagggattaggtaaatacctaatccctttccaacttttttctatttatctaagattattgtaaaacaatcatgctatattaccaacagctttttctttactcttttgcaaacatcagggttccgaaacctaattggtcataaccgccgctattaggtccataatcacctgccccaccatcggaatttccgcgtgatgcattttcacgcattttatcaacccacatcttagcatagatgcttgatttaccataatcctgcgccaaacgattcaccagctcccacgcaggacgcacttcaccacgtgaatcctttccctctcttctttcctgtgcagaaatggtatcccagcttccactacaatttgtataagtagtataaggcagatcattatctgtatacctgaaaccggtcatcttccaactggcacttgaactaccggtttcagcaccaccgatattgtatttagccacatactcacacatagccaatgcacgtccgtcatcaaagatgaaaaggtcttcacctacattctttgccatctgacagaaagcacccagcagactgacacacaaggtagcatgtccctggtcacgacctgattcctgacattgtcccagcatttcattactatccggatctaaatgtatgaaaggaacgccatttcctatatttcccgaaccaataccaaatttgaaatattggatagcttcattgattttaaagttatcatccgccaaaataccgatagaaagtaaagctgtcatcgcagataaatcccaattgagccaataatgaagcgcacattcatttccattgtgcgtagacaggaattttgtgatatgaggataaaagacatctgcaatccatgctttaaacttaatgaaatcagcttcctgccatcctgaataagaacgcataatctccgctgcatttgctatttgatgtacctgaataaaaatcaagaactcgttcggatctataaattcacctttatcattcacgataaatcctgtacatgttttagcccagtcattcaaaatagcaacagcagcatctgcatactgtgcaccgtcagtctccgacaatttccatcgaagggccaattgataggctgcggcagcgtccttcatcaacttcgtgtagttattccagtcattgggatatttgcctgcccaattattttgatcgagacgcgccaataatttcaccggagaagccttataatttgattgtgacaagctattcccaccacgacttaaatgatcgaacgcatttttccaaggttgcgcaccggcttgcacttttccttttacaaactcaaaatccgtttctgtatgaagcatacaaggatgttccaaagtcgtaacataatccttcacttccggccaactactcatatcattagagccgtcttctatttcgctacatgctaaaagcgtggtagaagtcagggcaaaaagccctgctcctattattgtatataatttcatcttattcatggtagttattcgttagtattgttttcactatctacaaaagcttgaagttcctctatggatttgaaagaacgaatccagtaaagatcataagtctgagctgtttccgggaaatcagcaattacaaacttacattgcgacaaatcaaagacctgattccaatctgtaggagtcactgttttatatcttgcctgcaaatcataatacaacacattaggttttgtaattgatatttcacttgtacccaaaatggcatacctgttatttgcatctccagccgtaccccaatattcaggaccaattttcttaatgccatcatcaaaaacttcaagtttgatacagccctgactattatttccaacatgtaattgagacttaaatccaattttaacagcaagatatctatattcagcaggagttatattaacaacttttcccttaccgcttctcgcaagccataaatcaccacgatacttaaccttactatcaggtccacccatctgaacagtggtcttatttccgtcagatgaaacgacagacgcattgttgccatccaaataccaattattatccagtccgttacccaaaccattacctaatgaataccagaaacgtccatcggcaactgtgacagttacattttgtacaacagggccataagaagctgttatcacagcagaagcggccttagtagtatgtactttcaatttaccagtcttatccacactaatcacctccggattatcactcgtccaagtcagcagcgaagcagtagcatctaccggttccaatgtgtacttaacctgatattcctgtccatatcccaattgattaagttccgcatcttcagtaaacgtcattccggtaattggagttactatcttaacccctatctcgcaacttgcagacaccggattcgaactgaaatcatcagccgtcactataataatcgcatcccctttgctgattccggtcaccaaacctgtcttttcatccaccgtagctacttccgggttactacttgtccatttataacgcttgaacgtagtagttgccggttctgaagaaacagttaattgatattcatcgcctgccgcaatctcttctgccggaacattagttatattgatggctgacatataggtatattcgtccataacttcaactgttctagtgacgatcgtagcctccggaccgaaaccgatttccggcgttaatgtaataatagcttttcctgctttatccttagtcacgaccttaccttcccgtgtaacagcaacaatagattcatccgacgaagtccattgcacattagcattggttgcattttcaggtgcaatactccaagagagttgcagttctttgttcttcagcagacaaattgttttattccctgcatcatattgagtttcgttaagagtaatggtggatactgtaatcatttcgtccatctttcctcctaaatccttatcatcatcacatgaagtcagacctaaaaacgaacaagccgccagtccaacaaaatattttatataatctcttttcatgattcttattctttaagttattcagacttgattattgccatcccggattctgtcccaagttcggattcaactgacactgatctaccggaagcggatacaggtcatttttactaccccagcgccgactattttccaagatcaaacagccatcggaatcttttgccatattagaagcgccagcccatgaagtcgcaaaatcagttcctgtccatttcactcctagaataggtttaggcatctctacaatagcagtattccaacgcttcaaatcatcaactcggaaaccttcattgtacaattcgatggtacgttcacgacggatttcctctcgcatattcaaactgttttctgaagcaaaagacgtagtcagtttaggcatatccgggtttacacggagacgaaccaaattcaacgagatattcaaagcatcatccaaagctttgccggtggttcccaactcatacatagcttcggcataattcaataaaacttctgcataacgaataatcgggaaatcgtaaccttcaaatgtatcggccaccttacgttccgtaccccatttttggttttgataaccggaaccttggaatacattacatgtaatggcattggtcgcatcttccccatccatacctttccaatcaatacgcggtttgtcgttatcccaatatttagtgccatgagccagaagacagttcttcatgcgattatcacgattttcaaattccgtagtcagacctccataacctttaaagacgtcagcactcttggtatggtcaataggtagcccattgctacaaagatacatattcacaaatttacggttaatatattgcacgttcgctacacaaccatgtgtaatattagtcccgatcggagcaatcgtttcatcatgacggcgatagaatatatattctttattggcactcttagtcagattcgcaggattagactgtacattctctaaaatgaacaggtatttataagccatctctcccaatgctgctggtttgaatagctcgaattgcttactgtcgataacttttttcgccgcatccgctgcaatactcaacaatgctttgccacgttcttcattattgcggttttgttgccatgtgccttcatataaagcgacacgtgaaaggaatgcataagctccccattttgaaatacgtccttcttcatccgtcgcaataatttccggcaatacttcagccgcatccttcaaatcctgaatcacgaagtcaatcacttcgctacggtcattgcggctcatgcgtaactcgggtgaagtaatatccagcggttctttagtgataatcacatctccgaacaactgcaccaaatcaaagtaagaataagcacggaaaaacttggcttccgctacatagcggctgatatcaccgttaccggaaaaagacgctgctttttgcagcaacaaattgcaacggcgaatatgggcataattactcgtatagttaccgtctgaagtaggaatcggattgctaccgttactgtacatatttacagaactggaagtcatcaagtccgaacgccagtcagaatgtgcaccatcagaaataacagacttgaaatcacgggtccaaccatagaaattagttgcaaaatatttaaaatcatctgccgccccccataagttgccatctgccagttggtcctgcggatcaagatccagacacgaattcagtgtcagaccaagcgataaaattaaaagagctttcttatatagtttcatattcttcatacattaaaaagttagatttaatccgaaagtcactgtacggacaaaggggaaacgtcctgctgctgataccttacggctagcctccggatcccatccgtcgttaatcttagaatattcccaaagatcagcacctgctacatatatacgacaagaactaattgctttcgttttagccaaaaaggcagaaggaacattgtatcccaatgtcacatttttcagacgaatgtaagaaccatcttccactgaccaggaagaagcctgatagttgtagtcattgatttcattcttattactatatgtcggataataagcaccccggttctccggactccacgtgttacctaccgattgattcgaagtgttcagatataatgctttcatcggtatacgccaaatctcattaccgttattatctcccgtacggaagattgtacgttgagcagcaccctggaaaaccaatgataaatcaaatcccttccattctgctcctacattaaaagagaaagagattttcggatcatctgtacctaaataaacaatatcattctgatccagtttgccgtcattatttacgtcagcatacatattatctcccaaacggaagttttgttctgtcaatccgatagtattaccagtcaggaagcgatatagatatttttgacgttcttcttctgtctgtgctttgccggcataacgcaaaccaaaaatactattcaacggataaccttgctgtttatcaacaaaaccggatttcagaactgaaactgcaccaatatccgtcagtttattcgtattaaaagaataagtacctcctacatgataagtgaagtcttttccaatcttatcagaccagtttaccatgacttcccatccatgtgatctgaattttccattgtttgacatacctgcgttatcacccagaactcccggataagaaacattaatcaacatattatcattacgtttcatgtatacttcggcagtacctgtcagacgggaatcgaacaaggaaaaatccaatcctaaattatagttcttaatgcgttcccattcacgtcccagagaagcgattctaccattcgtatctatgatagtgcctttgttaggaccgatataagctccgctttgagattcaaatttatagaattgtgtaccatcatatcgatcaataccactctggttaccaacttcaccataagaaagacggattttcaaatcgttcaaccatttgatgttcttcataaacgcctcttccgtaatacgccatccaccggatattccataaaagaagtcccagcgattttccggtttaaacttggaagaaccatcataacgcatatttacttccaataagtattttgacttataattatagtttaaacgagaatagtaggacatcacagcctcatgccactttgtaccatgtttatctgtcagatttaccaaacctgccccatttacagtttccaacgagttctgtatatctttcaccgatacaccaaaataatcgtattctttcaattcatattgagcaccaaccattgcacttacattatgatgctgcgcaaatgtattatgataatcaacataacctgccatagaatagaagtctgtacgcgaacttgttttctcgtaagacgactcttcctgtttgtaaccgtcagccttagtgtttatcttggttcccgcataattataagaagtaatagccatcttctttatatcacgtgaagctactccggagttataaccgagatttgctactacatccagatgtttattaatattgtaagtgaatttctcactgatattaatttcagatactttcagtttattatctccacccagttcggcaaaccaaatcggtgacaaccaagttccccacgaataaggttttccatcaatcgtagaagccggaagtcccggttgcggataactggaagtcaatgttctattcagttgtgaaggagccacctgatcctgacggttataggctatcacagattcaatagaaaagttatcaaagactttcagtttattagtcaaacgaagattgaaacgctgattgttattatttccccacttcaagttactgtcatcatacatataccctacggacaagcgatataaattcttttctgtacctccggaaacagctaagtcatgttgcgtagaataagaattgccgaacaacacgtcttgccagttggtatccatgaacacgaaatccattacatctgaatagctgggagcaaaaggatttgcactgtgatccaaatcaatgtatttaccttcattagccaatgccattttcgcatatttcacccatgagtaagaatccggctgaccatcgttctgacaagtctgtaacactgcatttgcccactcgttcatagtcatcagcttcggctgcaatcccaccatcttgtaagtgtatgaaccgctatattctattctcgcttttccttcctttgcctgcttagtggttaccaataccacaccacctgcagcccgggaaccataaatagcagccgatgcatctttcagaaaattgatagactgaatatcagaagggttgatattacgcagtgcatttacaccatcataagcaactccgtcaataacgatcaatggctccgcattatttgcagaaacagaaccacgcaatttcaagccccagctctcatctcccggagctgccgaattgcgagtgatcgtaacacccggaacctgaccttgcattgcctgtaacggacttgacatcgttcctttattcttcaacattttatcagataccactgttacagcaccagtcaatgtctccttcttttgtgaaccgtatcccactaccacaacttcgtccaatacttcgctatcttcctgcaattttacatttatcacagtttgtgcagccacatctataatttgatccttataaccaatatagctgaatttcaacttagctccagcaggtacaccaatcgtataatttccgtcaatatccgtaatagttccttctgttcctcctattacagtaatattcacaccaatcaatggttcgcctgttgcatcaacgacttgacctttcactttcttttgagcctgtgccactacttgactatctttcatgtttgtatcggcccacgcctttgaaacaggacaaagtcccagcattaatcctaacgcaaacaccgctgttttgttaggtcgcgaattaaatattaatcctcttcgtttcataaaattaaatttgaggtttaaaaatagtattaaatttttgttctctaaaataaggtgaggcatacaagtacctctttgtaaattctgactccttttccataagcacaaagggttatttattaatgaataagattatatacaattccggaaaaactcgcgcatttcacgacgtcccagaaacagatggttttccaccgtcctgcaacttaaattcagttcatttgcgatttccggagacattttattttcgaagcggttcaatgtataaattaaccgacgttgttcgggcatagcagccaagcgggtccgttccattgtcattaaatcatcaccgataattttttcttcggtttcattggtagaagtggacatagtatcatagatgtagctgtctatctcctgtttcttataataacgacggatatagtcgatcacaatattgcgggcaatggtgaacaagaaatatttcactgtgtccggacggagcatttgcttgtagtccagcagacgtacaaatacatcctgggttagatcctccgcttcgtagcgatgagtgatacgataagtaatataggtaagaatcacctgataatattcttcataagaacgggtgataatgttgtcggaagtgttagctgttgtctccataatactatctttttcggttttgatcacgatgcaaatatagaggtgattttggatataacagccagaaaataaagcagatcaatctcaatgaatctaggtagactcatttaaacatacaatactaattatcaatatattacgtttacaaaaagagagtatcactttataaaatgagactcaaatcaacgtatctttgctccacttatgctcgtttgctcccatcctcttcccctcttcaattttattatttgatcgtttcattgtcacatcaaagctattaatgaagtacgaacattaatagataagttccgtttcattaaagataaacttgctttgcacttattgcaaagttatgtttgattaagggcaaactataaatgaaagcttcaattatataattgcaagctttgtttttataaacgaaagtttcatttataaaaacaaagcttgcgtttatagattactccctataaaaaacaactttgcaataggaccaaaagaagtttatatagggagaagaagaacttatctattaatagattacgagaaaaagactagtaaaaggaaaatccacttggtgaagggaggtccttcaccctctaaccccgatgaatagggcggtgtgaagggtgaaagggatatgagtataaaatagatttcagtgataataagtcgaaaagttactcttctttggctgttccacctatactacgaatatattcattcggagtgactcccgtactctttttgaatgagcggaagaaagaagcacgagaactgaagccgcaaagttctgccagtgcagttaatgtatagcgggaatattgactatccaccaccattttcttgaattgagtgacgcggtattcgtttataaaatcataataagactgattgagatattgattcaaaagatacgataatgaatgcgaagaagtatccagagcagaagccagatcgcccattttcaaatcaggattaatatatggcttttctttctccacataagcaaccagtttcttatggagttctttacattcttcttcagtcagcctgttggttttatacttttcttcggttgcagcgatagaagactcttcagaaatcacttccgcctgttctatcgtttggtctttctgctgtgtattctctacggatacggagattgccgatgcaggagaagtaagcaggcggcgcatacgattccacacataatatcgtataaaagcaataatgcctacaactaataaaacagaaagtgcccatccccaccaaggtatcataggacgcaccgtcacttgataaacagcttccgactgttcatttcccggaaggcgcacacggaacgtataagttccggaagataatccataataggaaacctcattctgcgcagccaatagtttccagtctttatccactccttccaactgatattcgtacaatagagcagaaggcagaccataagcaaaatccgtaaagcagaaagtcagattattctgattatattttaaagacgggttggtaaaagaaatgccattagccaatatatccgtaaacacaatcggacggactttaccacgcacttcatccacccgcttcggatcgacataaatcaaacctttggtgttgccgaaccataatattcctttttcatctttataagcagccccattcgtaaaagtgggtcccggtactccatcattgaaagtgaaggcatcgtactcttctccttcttcctttattcgtaacaatccatcattgcaagccacccacaaccaaccctggttatcttccacaatcgacatcagcgaattgtcaggaagcgtggaaaagacggaacggttccgaaaacgatccatcgttaaagtagaggtaaacagactccccttttcacgaataaaataaaggtcgtgtccggtatcttcgtaaatggtgcgcaccttatccctatgcacaaatccttcagggaacacattagatcgtaaactttgagaagcaggatcatatatacacataccggtttccgtggcaatccatcctttgccggtagagtcaaaactaacttcataaacgttaccttccggcaattgggaattggcgctggtaaagtgtttgatctgttttgcctgtttattataacagaacaatccctgtgaagtgcctatccagagatttcctttctcatccggtcgcacacaaaagatatgtcctttctgaaacagctctgcatctccatctcctccctgggcaaaatattttaaagataatgtctccggattcaacaccatcatgcctccgccatacgtaccgatataatattcgccttcataaaaacagattgtcaatatcaaatccgaagtcaaaacaggtttcacaaaactctttacgactccggtagtttcatttatataatacaaaccatcacgtgaaccgatgaccttttcgtgtcctctgttgacataagaacgaatggaaagattggcagagttaaacagaggaggataagcataagtttggaaaagaccattctgataaagtgagtaatctaaacctgcctgaaagtgccccacccaaacagcacctctgtcatccaccaatagtgaataaatggaattactgcgaataccttctttatcacttacatcgtgacaaaaacgacgtgtcacttgttgggctttatgcgaaaggaaatgaacgccattgccatctgttgctatatatacagtctcctttccatcactggatatgtcggaaatgacatcacagtctaaagatactgtatgcgaaaagctctttttgtttatatcgaaacgaactactccctggctcattgtacctagataaagggtttctccaatacgagtcaggcagcggaagtaatcggcctcgggaacattctcctggaaatgccaggaatcaatcttaccatctttcaatgaataagagaacaaaccttgtactgtagccagccataacgcacttttatcttcattcagacagagatccataattcgattacaggcagccagcatattccggtcggtcaagacttggagcaattgcccgtccttttgaatgaacaatcctttctccgtaccgatatagagaatatctccatccggaagtaaggtatttacagcaaaatctatcttttcgggaacaattctctccaactggccgttcgcacgattcagacgccaaagtccgataccgtttcctacccaaagttgatcgtcagctgtttccgtgatgcagttcacccgtttcttccttccggaatccacgcctcgaaattcataatggcgaactttcacaccatcaaaacgatcgagacaattatctgttcctagccagacaaaaccttccgagtctttataaatggcgttcaccaatagcccggacagtccatcggacatgactacattacgaaatgtataattctgggcttgcagatttacaccacaaaccaagtatatgattaaaagaatcagatatttaatcgtgttcttcacttacaaccgcttcctttcatattaaacatgtgacaaacatacataaaaatctccaaaagagcacattcctttatacaaaaaaatagtcccttcgtatttgttatatatggaaaacaaatacgaaggggagaatttatttactcaatgctattgaagattttatctgccactgattcaaataatagccttaatctgaattcttttttaccaattcaatcatatagctataagtatatttcttgtcaagcaagcgatattcattgtgcggatacattccccaactattatcgccgcctaatccgcgttgcttcaagtcaacgtgcagaaagatattcttttgcggaacaatgtcgatagtatgctgcaatttacgggtcaggccgggatcaaggtcttccggtgagaaatgcaaagcggaaaatgcgataggttgcaagcctgtaattctcactccttgcccttcgctatccaataaggacagccaacgaacatctgttttatttcctgtttcctgcggacgtgtataccaatagaactgattttcaaccttatcctcatatcgtccgatgaaggaactcgaataacggtcgatatagttctcaaaaggccctctaccgtaatagaccaagttttcataaggttgatgcaattccatacgcataccaaaacggggaagttcgggaagtttcgttcctgtcaggtcgatactgcctgtcacaacaatagcaccattattacagatcaaatattccatcatataaggaacctgaatatcatttaatatccaatcaatcctgatggataatcctttttcattctgttcgtctattgtcactttcttcacataacggttgacatgagctgtccgccaaacacctgccaaagtgggcattttatttccaaaatcattatcaatcggagcacgccaaaaggctggttcgggatattgcttgataggttgctcgccatttatcatataatcaaataagattccctttttcaaatcaatcttaccagaaacgccccccgattgaaaagacaaaatattatcttttgtttcataagatagttttcccgaacaaggcagaagcgatgtgaagaaactacttttatttaattgcatctgctctctagctacttcataaccggcaggtactaaatcggtagcaacccgggtgtgcgcatagagattaaggaaatactcattcccgtcttccggaataacaggaagagataaacgtatctctttctcttcgtgaggtattaaatcaacgttgaaatcccctgtagatattttttctccgtttttgtatatttcccatataaaagcatactcatccagattggtaaagtcataacggtttttaatggaaataattcctttccccaagtcttttgcgctaaactgaatgtactgatacactttcttcacttcatacgcttgtggtttgggaataccattggcagaaatcaaaccgtcagttcccgtgtttagttcccctttcttatcttccagccatttatagctacccatcttaccattatacgtccaataagtacgtccgtctcttggttcggtctttaccttaaatccctgatccataaaatcccagataaaaccgccctgcaagttagggctgtcataaataatatcccaaaggtctttaaaattgccattgctgtttccttgggcgtgagcatactcacacatgataaacggtcgctgtttgccggacttccgatattctgttattttccacatattgggatacatcggacagacaatatctgtattccaatcctcccaagcctgctcgaactgtacaaaacgaccgggatcatatttcttcaagcgcttatactcatcgtggaacacgattccattgccacattcgtttcctaatgaccatccgatgatacatggatgatttttatccctttccaccattcgggtgatacggtcgacgtgagctgcataccattcgggccgataagcaggatgcgggatggtatctttgaaataaggaaccgaacccattccatgagtttcaatattggcttcatccactacatagataccatattggtcacacaattgatagaataacggatgatttggataatggctggtacgaatggcattcatgttcagttgtttaatcagtcgcaaatcattcattaagatttcgcgggtctgcacatgtcccaacgtatcattatgctcgtgacggttgacaccttttatataggtaggtacaccattcactagtagccgtgcattctttatctcaatgcggcggaatccgactttatgagccactaccgtctgttgcttgtcgccatcggctcgaagtgtcaggatacagtcgtagagcgaagggtgttcggcgctccatttccgcacattgcgcacagtgccttcgaaagcaagtgtagtacttatgtctgagatacaatatgctttctgcactgataagacagtcttcccccctgcgtccttcaaatcgagtgtaagtgtccccttttgcagggttgcattggtattgaacgaacgcaagtctacagtagcccggaattgcccgtgtcggtaggtatcgtccagtcctgcatgcagaaagaaatcccaaatggtcgtttggggataagcggtcaggaaaacatcacgttcgataccgcttagacgccaaaaatcctggtcttccatatagctgccatcgtgccagcgatacacttgtacagcaagtaagttctctccttttttcaaatagtttgtcacattaaattctgccggagtcttggatgctttagtcatccccacctgctgcccgttcacatagatacgggcgtagccgctgatggaaccgaagtgcaacaacacttcacgcccctgccagttttgaggaaccgtaaatgtgcgccggtaagtccccacaggattatcaacgtcaatataaggtggattgggtgaaaacacatactgaatgttgcggattatcggctcaccgaatccttggatttcccagttggaagggacaataattgtatcccaatcattgtcggataaatctgtacgataaaaatctcttatgctttctgcgatagagggagcataaacaaatttccacgtaccattcaacgagtattgccaaggcgatttttggggattatcgttcactgcatcatctgcgcgctcgtagaggcgaaagtcagcgtgtggtttctctttgttccactcatattgggtgggattttcccactcgttgttttgcgcctttgccgttggggacaaaccacaaaaaagacaggaaaggaataataaggtagaaaataatctatttatcataagataaagggttgtaagggtttccattgagtaacgtcaaggagttaagaagcctaacctcttaactccttgaaatcagtaggaaaatctcaaaaagttattcttcagtatacaataatgttccaaaccccaaatcaccggcttcagcagtaccacgctcgccatatccttcggggcgttctttttcagcaaaagcttgcgaatatggagcattcatacctttcaccttagcgtaatggttgtaaaggagttcccatcccggacgggcacgccccttaccgtcggccgacaccttctcgtgccaaccgtatttagggtgatagtaaggttcgaaaggcatttccacatcttcggccgaagttaagttatacttagccgtatattcgcagaggtcgagaatgatgttgtcgttgtaggcaaaaaggtcgatgcccatgttataagctgtacgacagaagtaagcgtgtaagcctacgttgagagtagcgtgcccctggtcgcgtcccatctcctggctctgtgccaaatgtctgcctttcacttttcccgcaggatcctcgtgcatgcctttcaccgaccattcgatacagcccataccttttccgtgatagaaaaactccaaagcttgtttaatcttggcatcgtcgtcattcagcacgccgatagaaagaatggtgagcatggcgggcaaatcccaactcatccagcccgaaatggctgaagaattaaagtggttatccaagaaatcatcacagatgggatagaaagttttatctatccatttcttgaagacttcaaaatcttcggttttccagccttcgtaatcccgcatcaattcagcgggagcagcaaactggtatccgataaatccggcggcaagcagacgatggctgtcgtcgggccatgttttataattcacccccttacaagtcttagcccatccgttcagaattttaacagctgccttggcataatcttcatctcccgaaattttccagcgtacagccaactgataagcggcaccggcatcgaaagcggccgtattgaagttgccgccttgcgagtgacgtacaatttcttcttgcgggtttgcgttgtagctcagttgggcaaatcggctttcgcacaatttttcccaaccgctaatccaaggttcggcacgttcgttcactttgcggcgtgcgcgttcaaagtcggcttcggtgttcaccagacaaggatgcttgatggtgtactcataattttcattggggttgatttcgcgttgccatggttcgggagttccgttctcgaactcagcactacagctggtcagcaacacaagcgttacgctgcccacgaaggtataaataagatttttcatacattcaattttcattttgttattcaatcagtttccagagaaagtagatgctattgtttaccactttcgttctttatcaaatctttcagttcttgttccgattcgaaagtctttatccaatccacatagatgctgcctgtttcattggcttcataccagattttccaaaattgaagttccaccgtgtcgtacttcgtcaatgaggtaggcatatactgttgatttttgccaaggaatttcttcgtgaagtcggcgtagaatactttgtattcaccgcaatctaccacagtcatggcattttttcctttatcggtatcttcgccatatttaccggctacggtaatgccgcttccgccccaaatgtctagataccactctatacttgtcgatgcttcgaacacattttcggggaatttcattttaaaggccaagatgggatagttggttacgttgaacccaaaaccgccgttgcgacaaatgcggacagctttgtaagtcttatcttcaccggggaaaatacgaagtactccgtcattctccatccattcaaattcccggtgggtaaagtttccgaatggctgccagatgttctcgacagtaaactggtcgttcattaaaccttcgctcacgttgacactcatcgtagctttgacaggtttaccgtcaccatagtcggccaaagcggtaattactgcattgccataagccttcgccacgaaccggcctttttcatcaatctctacaacatccggcttactgctttcccatgcgatgtacgaaagcgtagcatctatcggcgttacattcatctgcggagtgtaggtttcgcccaaagccagtttgtctgtttctttcacaaattccatactttcgatatagataatgggcttcaccttaatttcaaactctttcatgaaatgtttgtcgtcggtagcggtaacttggatgcgtgcctttccttcggctatgcccttcacctcgcctttttcattgacagtggctttatcgggagtaaggcttttccaaatcaacccagggtaagtggggtcggccggggaagtctgccaagtgaggggcaaagtcgaggttacaaacacttcgaggtcttcgttagtgagattgatatcagtgatgtgaataatttcgtttactaccttcacattaatggtcgaagtggcagaataacccacagccggcttggccgaaattaccgtactaccggccttcactgccgtgatgcgtccttcggcatctacggtagccacatcgggcacagtcgatttccataccacctctttgttgaaagcctcatcaggacctacggtatattttatcaaagtgtcagtgcctatcagcagaggcagttcgggggtcacttcaaggttgatttccttaacgagcactctctcttctaaaacaggggatacatcgtcatcgttgcacgaaacggtcatcattaagccagccgtcatcagtgctgcaaacgcacccttttgaagtatatttttgtatgtcataattcgattactttataaatgaataatgaatggattattggttccaacccggattttgtttcaagttggagttcagtttgagctggtcggtgggcagtggcaataagtaatgcttttcgtgccagttgcgtcctttctcgtggataatgcaaccttcgccatctttgtccttaaaggaagcatcaggccatctgttttcaaaatcggtacctttccacttcacaccggtgaggttcatcggcatttcgtcttcggccgttttccaacgcttcagatcatcaatgcggaaattctcatcgaaaaattcgatggtacgctcacgacgaatctctgtgcgcatatccaaattatttgccgtaacaaagtcgttagtcaagtcaggcatttcgggattgatgcgtttgcgtgtcaagttcaaactgatggctaagtcttcatccgatatttgtccatcgcgttcaaacacggcttcggcatagttcagcagcacctcggcatagcggatgatggggaaatcgtaagcttccataccggtaggcactccgtcgcgttcgctacaccacttgtggggaaagtagcctgtacccgtttgaggtatgaagttcctatgcgaggcattggctatttcggcagcattgccgctccaatcgatgcgtccgccgtttgtaccccagtaagtttgtccgggcaccataagctgattgttcatgcggttgtcgcgatttttatattcatcatccactttcgtgtaattccacgtttggggattgatgggcaacccattgctttgcagatacatattagccattttgcgagtaacgtacaaggcattgcccaaacgcccttgtgtgatgttgaacccgatagaattgataacagggtcgtggcggcgggtaaagatatactctttattacctgttttattgatactagcagggttcgacttttcattctccaagataaagagatacttgtaagcttccgtacccaattcttgaggagcaaaaagttcgaatgctccgcccgccattacatcatgagccgcctgtgctgcggtattgagcaaatcttttgtacgttcggtattttgaccgccattatggaatttctcccatgtaccttcatagagggctacacgcgaaagaaatgccaaagcggcttcgctggagagacggccttcatcgctgctgctgatagccttatcgacgggtaatagtttagcagcttctttcaagtcgtcaatgatgaagtcagctacctcggtacgcggattacgggccttctgcatctcaggtgagtcgatgtcgagcggcgtgcgggtaatgataaggtcaccataagcctgcaacaactcaaagtaacaataagcacggaagaaacgggcttcccccaccgaaatggcgatgtcggcttgttgttcatacgcatcggcttgttgcaataaagtattggtttgacgaatacgattgtaattgtcggtataatgcttgtcagatgacggaatactgtttgttccgttgctatagatgttcaccgtgctaccggcaaacaagtccgagcgaatatcagcgtgctgactgtcgtcgagccatcgaaagtcggccgaccagccgtagaactgggtggcaaaaagtttgaagtgttcgggcgacttccaatagttggtatccgccaattgtgtcttgggctcaaggtctaaacacgactgcatggtcatggcgcaaatgattcctaaaatatatgctatttttttcattgttatcttcaatattaagaataaaaattagaatgtggcattcacaccgaaagtcacggtgcggttaaacggatagcgttgcttgttttccactttgcgggtggcttcgggatcccaaccatcggtgatatatgatttttcccacaagtcggcgcccgatacataaatacgcaggttgctgatgaaaccgctcttattcatccatgcctttggcaatgtataacctagtacaatctctttgagacgcaggtatgctccattatcggccgaccaggtagagggaatgtagttatagttattgatgtcattactgtttgaataagtaggaaaatggttgttaggagtttcaggactccatacattacctaccgactggttggtagtgttcagccaaatagctttgaaaggcactttccaagagtcaatttcacgatagatggtacgcttgcccacaccttggaacacggtattgaaatcgaatcctttccactcgcatccgaaattaaacgagaacgaatatttggggtcatcggaaccaagaaatacaaggtcgtcttgtgtcagtttaccatctttgttcacatcttcatacatgtggtcgcccaaacgcaagttggcaggcagggcgatagaattgctgcccacatatttgtccacgtaatagtccagttggtcttggttttgtaccttgcccacatagcggtaaccaaataccgagttgagtgggtagccattcacggcctcgttataacctgcactcaccacgatgttacctccatcgactagtttgttggtcatataagttaacgtaccgccaacatggtagttgaaactgcctatcttgtcacgccaagtcaagctggcatcgtaaccattggcttcaaacttaccgctattagtgctgggagcagttccacccaatacaccggggtgcagacgcgaaaccagcatattgtcgtttttctttttaaagacctcgaacgtacccgtaaggcgattgttgaggaatccaaagtcaatccccaagttatagttgtagatacgttcccaagtacgcatggtgctcaccagtccggcagattccacataggttcctttcgagttgcccaacaaagcgccgctgttcgatttgtagttgtaaagttggatgccgtcatagcgtccgataccattttggttacctacctcaccatatgaggcacgtagtttcagttcattcacatagtcacgcaagttctccatgaatttttcttcagtgatacgccatccggctgatgcgccccagaagaagttccagcgattcttgggcaaaaatttcgaagagccgtcgtaacgagcattcacttcgaccatatatctcgacttgtagttataattcaagcgaccgaaataagaaagaatggcttcctcccaacggtctactttgtctatgtagatttgtcctttaccgttaagcgattcgattgccgcttccacgtccattgctttggtgccgctataatcgtaagcggcatagtcgtattgcacacctcccataagcgatatgtcgtgaacctcatcaaataatttcttataagtgaggaaagctgatgccgtgtaattgtcggtacgcgcagaacttttagtatacgatgatttttcttttgcgggatagggagagttctcattcagaatcggagtgccgtcgtattgataccaatcaaccgaaagatattgttcgtcacgggccgcattgttcgttgagtatcccaaagttccctgaaaatcaagaccatccaaaatattcactttcaaaatctcgttcacattcattgtggtcaccacaagtttgttgtcaccacccaattcggcagaccagttgggggtatgaatgcctccccacgcatacggtttgccatcaatagtcgaaaccggtagcccaggctgcggtatgctgctacccaatatactaccaatctgtgtaggagccacttgatgctgacgactagctgacatgttggtttccaagctgatacggttgtttatcttgaaactgttgaataaacgtacgttatagcgttcgttcgagttgttcccccattgcagcgtcccttggtcgttcaaatatcccaacgaaagtcggtaggtcgatttttccgaacctccgcttacgctgaggttatgctgggtagaagtggcgtttccccacagcacatcagtccagttcatatcgtgaaacacaaagtcggccacaccacggaatcctcccggaatgggatcttcatcggggttgtttccaccatgcagattaatccaactccccttcatcgctttggccaaacgggcatagcgcacccagttgtcgtcttcgccatagccgtcattcaaacgagcttggagcacaccgtccgtccattcgtccatgctcatcatgcggggttgcaaacccacaattttacgtgtaaccgaaccgctatattccactctggttttgccggcatcgggacgtttggtagttaccaaaatcacaccacccgctgcttttgcgccataaatagcagccgaagcatctttcaggaagttaatggtttcgatgtcgtcggcattgagttgagccatctcgctcacaccactggctggtacaccgtcaataatcaaaagaggttctaccttgttctttgagacagagccacggattgagacaccccatccttcttcgccgggagcagccgacgagcgggtgatgcgtaagcccggaacctgaccttgcatagccgagagcggattggccactgtacctttgtccttaaaaagtttttggtcgaccactgttaccgagcctgtcaacgattcttttttctgagtaccataacctaccacgacaacttcatccagcacctctgtatcttcgtgcatgataattttagtcagattcgtcccttttacaaaaacttccaacgtcttataaccaataaaagaaatcaccaacgtaccacctgatacattattcaaagtaaagtttccatccatatccgttatcgtaccattagtagtgcctttcactttgacattggcaccaataacaggttcgccataggaatccacgattttacctttgattgccccagtctgcgaaacagcctgcacttctcccacattggcaaataccgcctgcggagcacctgttacaaggacagaggccatcaccgtagagaatagaaatcttctcgatgagaatctgaagagattttttttcatatacataaaatttaaaactaacatttatactatttattctaatattagatacactgttggatatactcacggatttctttccgactgataaacaagtggttttccaccgtacgggaagaaattcccaattgggcggcaatatcagccgaggatttattttcgaaacgactcatgatataaatcttccgacgttgttcaggaagctgattggctctctcccattcgcatgtcaatagattattggcaataatctggctctccacttcattggtacaagtaggaatccggtcgaaaagataggaagttacttcttgagctttgtaaaaacgacgcaaatagtccgttaccagattccggcaaatcgcgaatataaaatgtttcactgtttccggacgcaatatctgcttatagtccatcaaacgcaaaaagacatcttgtgacagatcttttgcttcttcgtccttacctattttataatagatataaagataaacggaatgatgataactcttataagagtcagcaaccagttgagtggatttcatgtttatattttccattgcttagatttttgtttatcattacgctggcaaatataaatggtaaatacggaaaagaaacaataaaaaagggcggatagatttcatcctattggaaggaaaacagaagtcgtaatactcactgataatcaatcaattagacaatcacaaactggagtctcaaattattatatgagactccgataatcaatcttcattagttcgtcctatactttggacgtattcgttcggggttattccagttgtctttttaaaataacggaaaaaggaagtacgagaactaaaaccacacagttcagctaaagcacttaaggtatattttgaatattcatcctcattaagcaatcgtttaaactcagctatgcggtaatcattcagataatcataataattcttgttcaagaactgattaaacacgtaggacaatgtatatggagagacgttcaatactgacgccaaatccgcaatctttaaatcagggttaacatacagtcttttttcctgcatcagcatgtccagttcgtctgccagccgatgacattcttccatactcacattgctctttctgtatttttcttcaactaccggtttcccggtttctatggcgtccgccgcaagagccggagagttcttttttctccggtaataagcatagcttaagcatattattgcaatcaataatagaattgttccccataaggtcgcgttaaaagaggaagcaatagtcactgataaacagatttccgaaccgggctcaccaatccgacggattttgaattgatatttcccggaagacaagtcatagtaggtcagttcggatttaccacccaacaactgccaatcatcatccatcccttccattttatattcataagacatatatgcagggtcggaataggtaaatccggagaaacagatagtcagattcttgtgcgacgattccaaagagactttatagagatgctgttctctctgtatagcaggatgataaggttctttaccattcacatatacatctgtaatagccaggggataactgttttcttcatttatatcacgtaaatccctggtcaaataaatcaatcctttggaattgccaaaccagattgttcccgaagcatctataacagggcaacaggtaataaaaacagaactcggtaatccatctacaaaagtataaggaacaattgtacattttttatcataacggtacaggcccagattcgtaccaatccacagccacccttcacggtcttcgatcataaacatggcatctttcccttccaaaagagtgcccggctggaatcttcggaaatgagtcattgacaaatcggaaataaaaatagggcctttatccggaaggaaatagagctcgtgggaagaatcttcatatactgtcctgattttctctttatgtataaaaccttcggggaatacatctgatttaatactatgagtggaaggatcccagatacataaaccggtagccgtacaaatccagccctttcctgtagaatcaaagcaaatatcaagcacattcccttccgggagtttggagttcgaactggtatagtgattgagttgttcgccatctttatactgatacaagcccattgaagtggcaatccacagacaaccgtcattgtccgacttgatgcagaaaacatgccctttcacaaaaggagtctccgaaggttcaaaatcatggatagttaatgtagaagaatccagtatatacatgccaccaccatacgtaccgatataatactttccttgaaacgggtaaatgcacattatcatattagagcgtaattggggtgacttgaaactcctaaaacgccgtttcgtctcatcaacatagaagaggccattgcgggaacctatcaatctttcattctcattgatagctatggcccgtaccggtatgtcttttgaatcaaaataaggagaataagaataggtagagaaaagcccgctctgatacagtgtataatcaagtcccaactgatagaatccaacccatatcaatccttccctgtccaccagcaatgaatagacagagttagagcggattccaccattagtaccgggttcatagcagaaagatttcataaccttattttccttgacagatacaaaatgtactccatttccgtctgttccaacataaagtatatcttttccgtcacccgacaaagaggaaattacattgcatcccaaatcaatccaattatccctgaacttccctgtcgatatatcgaaaacaaccactccatgttccattgtccctaaatagagcctggaaccaattcgtaccattttccgataagtataatcctgtctatcattgtcaccgtatggacataaagttatttttcgggtagacagattcattgaatatagtttggagcgggtcagaatccataatgtatctttttctcccatattcaaatcgactatgaaattatccgatgaccacatatccgcattgatagtaatctgctccaattcattatttttgcagacaaacaatcctttttcgctgccaatatataaggttccctgcgcatcggtcaataaagaacgaactccgaattttatcacttcagcaacaaacggttctaatttacctgattctttatttatccgccaaaggcccatatcgtttcccaccaaaatctgattgccttgcgtttccgcaatcacattcacccatttcagtttttcatcatctccgaatatcggataatgcttgaaacgaaaaccatcaaaacattcaacagacgtagctgttccaatccaaagataacctacggagtctttatacaaggcactgaccgttaaatcagataatccatttgtttctgacagaccacgaaaagaataagaaatcggataggcagacagagaaagagaaataaatataaggcttgttatatgtcgtatcagattattcataggattcatatttgatgaaacaatgcaaacctacataaaatatcccgaattttatgtaggtttatacaaaaacaaaacacactcctcaataaaaatgagtgttaatctaccagctttatactcaattgggattgtttatacacaactggaattctcttattattaacctctactcttattggcttcttcttactcctgaaactagcatggatcttcggttgcccgtctatccaaagattgagtttcttatcttcttccttttgaatgacaaacaacttggccaaagaagaaaaataagtctccttatcacgtctcaatgcactgccatgacagataaagaaatcttttgcatcagcagcttcagtaccttcgggataagagacagcaaacatataagcatctgtcatccagccgtccggcataatccatgagttgctgtgcattagcctgccgtccgctaattgattaatataaagatcggtcactttccctttatgacggatacgaagcccaatccaatcttgtccttcccgccgttccatttgtggcaagtctttctcattaggagtctcctttaatataatagctgtcagcccttttacacgattgacttctgccggcaaatgaaatgaataataggtttcagtgcctttcaaatcttcagtgggagcttctatttcttcccaatacaaatcttccgggtagtcatgcacaaaatcggatttagccagcaaacgaggatataacggacgaatcacaaccgatgagttaccattcgtcacattcacgtcaactcccgactttttatatgtcccgttcgtatgccataaccattcaaattgccctattttatgtgttttcaaatcatcaatcatataaataacattatccatccaaaggaaatgacggaaattacgactgaaattattagatacaggacctgttccattagccagaacatacttcacatttcccgcatccagaagatgatataaatatcctctcaaagtagaaccgctgtactgctgctcacgaggttgtccctctccattaaacaatactacattatgcgcctgactttgaaagaaataattccgataagcaggattaggataccagcagtttcccccgtctttaataatatccacccctttatgaaagacaataaatgaattggcatctgcgtgagaatgattccatgtatgaccgctttttacagccagcatcgtagcatccttttcccacgaatcacgcatcgtagcccaaccaaaatcggcaaataattgagaagtcggcagttgagggacagcgggcgccttactcaaatcaggagtgtaaaagaagcccatgggacgattcaggaaaaagccatcacgatgttgtccttgttccacctgggctatataccacaaaatagttggatctttcacccccaatgcatacaataacatcatgctggattctgctgatacatttttatggctatctccaaaattcaaactatgcagcatacctgtacgcggatagcagacttgtgagaagtaactcggcaattttgccaattgaggaatatcacccggattctgtccgggatgagtatttatccaagcgatcctaaacaacaaagcttcctgaataccaaagttggcgtaattcagactttcatacattccaccggcctcatcaaaactctttgctttctgttgcaatacatcaccggcaaaatcaaaccactcgggaagtgattcgtgaagttgctccacccattcttttacttcgggaagttcattttgaagactcaaagccaatattccaccctgacaaacacaggaggtccaccaattatgtcccatcgaattcaatgagtgaatacgggtcggttccaacagccagtctcccaatgccggttctacggctaaccgtttcaatccttcggctatcttttttctttctgaagaagacatgacattgtatgcagcatcataccccaccgcggaaagaaaactcttatgagccatacccagttgtgaacgccatgcaggaatacgtgccatcatttccacatctccccatgattcggcttccacagttttcaggaggatttctttgattacgtctgcatactccttattatcagtcatcaaataagctaatgacaaatagtccaatcgattaaaatctttcttttgcaaagcttcatctgctgttctcttaatatctccccatgcttcctgcaatttaggttcatgctgcatacgctgtttcacttgctgtatgcgttgtggagtatacagtaatgaaggatgatttattttttgtgcttgtatatataatgaagaaacacacaaaaaacagataacagcaataatagtttgtttcatggtacttagtctattctatatataatcagttacaatattattctttattgaacgtttttcaaaaattcttccaatgctgcattaaattcttccgggcgttccatattcagcatgtgtccgcaatcgtcaattactttcagttttccattgggaagatattgtaaaatgggaggttcttttgagaatcggttgccggaagaatgaccttcaacaattaaagcaggtacatcgggatgattctttttcaattcctcgatggcatccaaaccagctaccacccgtacttctttgtgtaaaggttgccacgcatcccactcatcgatcatttgccaaagagactcacgcattcgttcccgctgacttcctcctgacttcatcaatccttcaaaccactctttcttcatcacatctacccctttctctttcaaagcagcaatctccttatcacgtactcttgcttcttccggagtcatcggttcactgggacctttcgattttcttatgttcccactggctaaaaaagcagataacatccgatccgggaagtacgccaacatatcggcagtaataaaaccacctaaagaaagtccgacgatatgcgcttttttgatgtgcaaagaatccatcaaagtaactaaatcttcagcgtgtgtgaattgatagtcttccgtttgtgaagacgaaatgccatatcctctcaaatcatagcggatcacacgatatttttttgccagtacggaaaattgttcatcccacatacgatgatccaaagaatgaccatgaacaaagattatcggttcaccttgaccggcttcttcatagtataaagagccatttcctacattgacacgtccttgtttaatgaccaatgaattgcctttcagtatttctgaaacggtccgcgaaatcacaggactgccatagaaagaggaaaagccgtcttccttagcggaagaacctgctacatgggcaataaagaagccgtaaacactatcacgtttatttatccaggggtaagcgccagcccaacccggagaactgatttgataggcttcgcccgtcttcttatctattaattcacgccattcgcccaatccgtagattccattgtgggattgtcctagccctttcgctacataattatccgagttattcgaagggattattgcatctttcacttggtcggcctgcatttcttttacagtttgtgcagatataattcgcttatcgttatacattccatcgtgataaatcattgataggaaatgaatataatcgttcaaggtagtacacagaccaccacctaacatcggggcatgcccgccatctgtatttatcggagtaaaatgagaattcttcatttctaatggctgtgctaataattcctgaaaaagagtttcaaactctttccccattgccacttccgccattcttccagcaatctgcatggcaagtcctccatattggaaccggcttcccggagtaaaaaccgtatctaacggcaatatctcaataatggcggaatccagatgattgtaattatctacgcgcggttcaggaagatagggacacactccggaagtatgagataacaattgtcgcaaaaggattttacctttggcatctcctttaaattccggcaaccacttctccactggatcatcccagtccaaactggtactgtccactaccgctccgataacagcagccgccacccattttccggcagaggctacgtatacttttgtgtcaggagtatagctaccatagttcttctgaaaaatgacagaatcattctttactacacagatagaagcaccgggatagtactctttactcacccagccttgaataacagaatctaatgaagagaagttataacgactcccttgtacggatgatacattgcaggaacctgcaataaaacagatacttataaaaattatgattaataatcttcccttcattttcgttatctattaacttcgtattaaacacaaattacacgaactacgctgttgtttgatgcagttatatttgatgcaattataattataaaaccgcgcaattcgtgtaattcgttcttaaaattttctatttcgactgcaaatcccaatataccacataacgctgatgatgcaaatcataaagcggacgaatcacatctccttgttctgttgtaaatttcaggtcttttcctgtacgctgcaaagtacgttccggatgtttcatatctactttcaatgaggtacgcaaatcggcaggcacatggaaattataagtataataatcattataaagagcaggattagagaaaggtgcgggagcctgcataccttctgtaccccgttctccggcaagcactaacgggccatacaataaagccactttattcggattatcgggagtggcttccaattcaatctgcatcgggtaagtagccgagatacggtcattgtctttccagtcacgggtgatagcgatgtaagaacctggcttttgttttactgctacttttttaccgttcacaagaacttccgcttttttactccatgaaggatatcttagataaacagtagtacgaaccggtttctcggcacgaatagttaacagggtcgtttcctctttcggaaattccgtttcctggagaagggttacccctttttctttccaggtgacttgggaaggaataaacagatttacgtagattccctggttgttgtggtagtagatagcttctccatatttagcatgattttcaaatccactgccgacacaacaccagaaagagttctctttggtactatacagtttatgtgaacccgaaagtaagggtaagaaataagtgaccattcctgtttccggatcttgctgtcccaggatatgattatatagtgccctttcataataatcggcaatagatgaatcgcccgtccaacagaaaagatgacgactaagcttcaacatattataagtacagcaggtttctccggtatagccggtcaagtgtttagagaatttcttcgggtcgaaaaaatgctccttatcactactgcatcccggagcaaaagtatggtggtcaatcatggtatgccagaagaattccgagagctttttgctggtctcattctctgtcagttcatagttacgcgcttcggctatgactttcgggataaacgtatttgtatgtttggttcccaaatcgtcccgaagttctttcaacgggtcaattacatcattatggtagaaatattcagccaaccaacggtaacgttcatctcctgtgatagcatacaaattgtagaatgattcattgacacctccaaactcattgcgtatcatgagtttgcgggtttcttcactaagtggtttcagtttgttataagcccagtcgcccattttggtcactgttttcaaagcctgctgattatccgcatacagatattgatctatcagaccggaataaagtttatgcaaggtgtaccaaggtgcccaaacactctttccccggatattacggtttatcagttcttcgggaaaagcacttaaatatccgcctttcaaagcgttctgaacttcggtcagcccgttgacaaggctatcccctttcaacttgaaaatctcacttccggtagcggcatacatcaaagcgtaagccgaaagcagatgtccggtagtatggccgcgaagctcacagtccaaagattcccagccaccaagttttttcactgtcatataaccgccttcacgaccggcaaagactccggcatttgtccggaaactatgcaacaggcgacttacgtcgatagaggtcatccatgcggaatcccgcaacatattgtcacgaaagcgactcggtaataaacggacgtctttcaaatcaaaactttctacccgaacaggagccactgtctcttttttcattttcccctggtgctgtccggggtacacagattgagccgacgatatagccgatactgccaataatgcgattgcaactaaagatttcttattcataatcatttttaatatccttatttattattggatacgaatagactccgcctattactcaatgcaaaaaaaacgaattccaacttatagttccataatctttcatttatcaattgcctattgataaatgaaaaaactccgttctaccggttcggcagtctgtacttctcctgccaatccatattgccatgccaccacagtcactttcaacgggaacttactgcgtgggggaattcgagtaaataccaacttgtttccctctatttctgccggtccttctttcacgtagtaatatacgggtagcccgcaatcggaagttgcctgtaaagagatagtttccgtgcctttcttcacatcgtcaagacccggaaaaagaatatactggcgtttaccttccgtattgcgatagggaatccggaaactaagttcctgaacagtgcttttatagtgcttgtcaccatcattaccggctagaaggcaaatatctcccgtacgacgctgattgtacattcccatacggtagaaacggacagtaaaggttgtgtcgttcactttctgaaccgggccacagatacgggttatttcaggagaagtgagcgaatgttcgccagaaattgcagtatgcaagctatccgtatatacagctttcagatgaaaagtcaatccgtctttttccggcaggaagcgggcggcaactttcacatgggatttgggattatatgtgagtaattgccccttttgtacgaaacctaagtattgtggtttcttccctctctcccggcgatagcgttcttccgtcatttcagccatttccttatcgaaataccagaatgcatcgtgcgagtctcctttatactctttataaggagcagcttttgcacgtttcttctgattcggatgccacctttcggcaagccagccattctgcggattcagcttcttcaattccacaggcttattcaaatcatacgttgcgggtatacgatattccagtgctttctttaagaacaacgcgatataaccagcggtgcggtcggctatatcgaaatgtcctcgtcctgtgtcgcaaaggaaagagacacaacttttaggatacatcatacggaatgccaaagccggatttacacggtcttcccaccattcgtattcgccttcaatcatcaatccagggatgccgtcaatcgtacgtttcccccactccatattgtcacgaccatatccggtaaggttagtgcgtggcgcatctccatgcaaagagataatggctaatgtgcggtcgggattccaagcagcgaagttccacggataggtagccattgccgaatgtcctaaagggacaataggcgcatatttcaattcactatagccactgacattcgcaaaatcctccatcatcttttcaaaagcttcctgacatccggtagttatatcccatctttgatcccatccgggagtaatccatatcagtgctatacccgcttctgataatctttcacgaaatagagaattttcaaacaaagtttcctctgtcatattatgattgcctattatcacagctttcaattgagtacaatcggaaggtatccacaagaatgcttgcggatgatcgttcgtttcgttggaaataatacttggtagttgtacagaccactgccattcggctgctataatgctgggtaacagaataacggacattattccaaacaccaaaaatcgaagtagtttcatgtttaattcatttatcattgttttatataatacgtagcaggaagaaagtatactcaaccgaaaaatataaaaaaactattattataggaagcctttcactgactattccataaaaacgttgtatctttattctcaatttaagaaaggagtgatatggatttacgtacagcaaacgtaacaagatatattcttcccttgcgggaaggagggtcattgccggctttggctgaagcggatgatgaatttaaatatgtcgtaaaattcagaggagcaggacatgggactaaagcccttattgccgaattgatagggggagaaatagcccgtacactgggattcagagttccggagattatatttttgaatctggatgaggctttcggacggacagaagcggatgaagaaatacaggatttactgcaatggagccgtgggttgaacatgggtctgcatttcctgtccggttcattgacgttcgaccctgttgtgcataaggtggacggtaaaactgcttcgcaaattgtgtggctggatgcgttattgaccaatgtagaccgtacaatcaagaatacgaatatgctgatgtggcataaagaattgtggttaatcgatcatggagcttccctttatttccatcattcgtggacgaattggcagaaacacgcacttagtccgttcgtacaaataaaagatcatgtactattgccgtttgccgatcaactggaagaagtagacgcaacattcaaacaactacttaccgatgacaagatacgagagatagtcaatgccgtccctgacgactggctgaactggacggaaggacaggaaactccgcaagacttgagagatgtttatattcaatttttagaagaaaggatcaagcattccgaaatatttgtaaatgaagcgcaaaatgcaagaaaggcacttatatgaatacgcagttatccgtttcgttcctaaagtagaacgtgaggaatttattaatgtaggtattgtactgttttccaaacggtgcaaatatctcaaatctctttatacaatagatgaaaacaaattgaaactgttctcttccgaattggacatcaactgtctgatagaaggtctgaaagtcttcgacaagatttgtcagggaaataaagaaggaggagttattgccaatatggatattccggaccgcttccggtggctgactgcggtaaaaagctcctgtattcaagtgtcccgtcctcatccgggattctctacagatttagataatactttagaaaggttgttcaaggaattagttctttaattccttgaataacctttccactcaatgaatgagaaaactctcctcttctctcattacgacccggaaatggtgaagtggttgattaattatagcaaataatacctcactatatttttcaggcacggattacacggatttcacggttttagaaatgatggttgcataaagcaacagtgtaatctgcgttatccgtgcctaaaaagaaacataaacttgcctacttaaacggaataaaatgcaatgcagctccgccacttgcttttagcttcaaaacaagcttatctccggcttttatcttcttatgagtactgcgtactttcgttcgtgtattcagcttgtcatcatcttcgtacaggtgaagcatatacttcttacccggttccagaaaatccgtagtcaatgtaattgtgcgggcttccgtattcgtcattgctcctacaaaccagtcattccccgaacgacgtgcctgaacgatatattcaccaacctctccatctaacgcgcggctgtcatcccatacactcggaattgctttccaaaattccagttcttcttctccctggtagaattccggtctgtcataccaaaacataaattgcaaaggactgtaatacacagctgccatcgccaactgatgtgctttcgtattcttcacccgattattgaaatagcaaagcgtatagtctcctgcacctgccagatagcgggtgaaaggaagagtcgtattgtgtgtggcatccggcatttcttcatttccacgaataccttcctgcgtcatcaggttaggataagtacggctgaaacctgtcggacgatattcgtcatgaatatctaccatcagaccatattctccacatttacgaactgcatcatgcagccaggtactccaacgctgattacctatctgtacaaaaccgaacttgacacctttcagtccccattttttatacaaaggcaacagagtatccaactgctgcactaatgcacgctgattgacatacaccataagtccgattcctttcgattcggcatactggcacaaagctggtatatcaaggtctttatccggagaaacggtagtagcgtccgaactcatcttcatttccggcccataccatcctgcatccatgtgcacatactgaataccacgttctgccgcaaagtcaatggctgcttttactctatcttgtttcaagtcgcccgaacggaataccttcccggggttaatccaagaagtatcagccagtttgcaagccggattcagattcaagacaatatcattgttattaattaaatcgaccggacgttcgccaaccatgattacacgccacggagtactgtaaggagaaataatatcggcactactatacaggcttgtctccaaagtggaaggtttctctgccgataaacggaatttaccacgaacataatccaccatttccgcttccaacaaggctacagataatccatcaggcagtttcaaggtcaaaggacgctcactctcctctttgccccatccttccaacggacgaagttcataaggtccttgcgcccaacgttcataatacgccatcgttccttcaggcattgtgaagctagtctgctcaccaacgatatgcaagaaaagcccgtttgtcatttccggaaaatgatagcggaaagcaactccttcattataggcacgaactatgatattcataaagtaattcttacgcttatcataaccaccgtcctgattgccatttccttctcccttcttgagtttcaaagtcatctcattgtagcaatcacgtacttccgcacgttcgccatatacaggcttccatctctcgtccgtcttttgatgttcagtctctgtcaacttcagattctcacaccaaaaatgacaagtatcattcggtatacccaacgccgattcaaataactgattttcaatcagaacacccagtttactttcttcaatcaccggacgattcttataagtcaaggtataatacatttgtgcattatcctctcccaccgcacgttgataaaaggtaaaacgataagctccatcaggagacgtcagttcctgacgggtttctgtcatcacatcttgcgcttttaccaatgccggtatcaccaacaacaaaagcaaaattcttttcttcattctatttacgttcatgtttattcatctttcctaattatatacgaacgaggaagaaattatactcaaatgtttattgcctgaaaaagcttattccatctgttccctataaaaagtaggtgtcattcctgtcacccttttaaagatacggttaaaatgtacaggtgattcaaatccgcaagtagcactgatttgagatatattcatcatactactattcaatagtttacaagcatatccgatacgcatatcaagtacatactctttaaatgtctttcctgtgttttctttaaagtatcggcagaaagcagcaggattcatcgctgtataagaagcaatttcatccagaccgatagactcggtataatgtttattcaaataggcaatcaccttttccattctttcattacgcataatagaagggaacggagtataatgagaagtagtcagatatttcttatgattactggtagccatcatctgtagaagtgaaagcaacaggatgatttgatctgctcctttagcagaaggtatttgttccaataatttaatgattttccccgaacgggtaattgtgaatttaattcctctgcaagcatcctccaataaattcctgataggaataaactgagagtattgagaaatagaataatgcataaaatctttctcaaactgaatattgactcctcttactttcggttcggatttttcttcgttatcagattcttccccgccgtccggtggactttgcatactatgaggcagttcggaaccgaaaagaatcaggtcaccttttgaataggagataatgctgtcacccaccagacaatccccctctcccttctccacataaataatttcatactcactatgaaaatgccacggatacgtgaaacgtggatattcataaaagcgggcacggacgggattagaagtcgtaatagtcaacttctcattcattatcttcttcataaatctcctttctaaactgcttttgcaaagataggtaaatatcttgcaaaaatacgcatcatag

SEQ ID NO: 8102 - DNA, 12985 bp, Unknown
  gut microbiota DNA sequence
gtatatgcacctgcaccttcagaattataaatagcctccattattaaatcttccacttcctcctctgttgcctgtactcctgcccctacactttccaacaggtaattgtacatgcggcataaaggatatacatccaaccgataagattggactttagaacccggagtacactcaaatacaaaattatgttcagtgttactggtaacttttatacctactcctcgttcgccgccgtccacttcattttcaacccatttgataggtgtagggtttggaggaagcggcacatccggattcacaggtacatcaggttctacactcggttcatcaccatccgaacacgaaaggatcatagaacttatcacaaagataaatcccaacatgagtaataaactaaataaattcttcttcataattaaaagtgataaatgtaattaatcatttacatattcataatcggcatctccatcaattgccttgcagacagccaaattatttacatatccgttttcatcagtaaccaatgcataaaaagaaagattctccgcattccattcttcttccattataacagtataactcctgctcgactccttaccggtcgctatatatcccaatttatcgccatcaacggtagcagacagtaatttacgtaccacatggttatgtgtgtaatcacgataaattcccccgtcattctgttggtacttcaatccgttttctaccgcatataaaatcaaacgatattcagcgtctttttctgacgtaatcctcactgtcacatcagcctgtccgttatattgtgactggatggccactccacatgatgcgggatactcctccaaagactcattaaatatagcccgcatgacactatagttttcagatagtcccattgtcccacgcatatcaaccacgcatgaaggataaccggagatagcaaacttcctggaaagaatcgatgactgttcaattgtcattggatcggcacttgtcccatcaacatgaaatgacatcagataaacaactccctcataactcgaatttatcagatagttcaggcgagtcattcctgccggacacatggcgcaccaagttccggtgaactccatagcacaaatacgttttacaaatttggaaggtgtacctggtacagcactcgcaacgaccgttaccagcttggatacatagttaccataagatgcttcaaaagcgtaggttccggctttagaagtagaaaaggtatttccatccaaagtttgtccgtccatcacggaacggatgattgcatcagcagttacatctattcccgcatgcattaccgtaaaggttataatatcctttccgtccgcagtcaatgtatttttatcgacgctcaaaatcacttctgtctgctccgaatcatcggaattgcctgaacaggaaatccagcatattcccacacagcacatacagaccagcaatattattttatagacatttatatacataactcttctttattcgttatacaagtaatctgctgattctccaagtttacactcatttacattgttacacgtataagtctttcctccatccaaagttgtcagcatcgacactatcacacgcatattatccacattccatcccggttccaactgataagatcgttgcatggtagattctactcccgcatttacttccccattgaaacggtcgccgttcaatgatgtggacaccactgcacgtactacattattatgcgtataatcattcgcaccattcgtttgaaagtatttgattccatcctctaccagataaatcaaacaacgataagtgtttgttacgttggaagttaatttggcagtaatcttcactgtacggtcagaagcattatacacagactcaacagctaccccacaagaagccggatagttacttaattctttctgaagctcttcttcaatctggctcttgatactgatcatttctttagtacccttacgcagattgtaaaagaaacggggcagtcccgagaaattaccgagaatattagtccggtaattattggtagctgctgtactcatgggatccgtcattcctccgaaatccatgtggaaagaagcgatagccaatcgccccggttgttcagtctgaattgctttcaatgtagtgctaagcgccggacaggcctggcacccgacagaagtaaactgtattcccagtaatttatgataatagctggttcctcctgatacgggagcaacctgaacgatcacttcattttcactgaccattgcttttccttcataatagcgtgctttaaagacatacgtacccggcactgaagtgctgaaagcacgaacaccataatccaggttttcctctcccgattcctttaccaaaatcaggttcattgtactttcttcacttacatcttttgtacccagtttgaccgtgaaggtcactttctctactccatctgcctgtatagccgtcttatcagctgtaatacgcaaaatgccgtcatccgtccctccattctccgtttcgtccgaattgccggaacaggatgacagcattgctaaacaaaggatcattacaattggtagaattgtcaagtataatttcctcataagtcttaatcattatagagatagtctatgctaccattaatcgaacattcggttatattatccaccatatatgcgtcatccactttacgcaatgcataaaccactacacgcgatgtggcaggattcaggttctttgcattagagatgctgaaagttgcggcagtgtgctcctcgtttgcactcacagtaaaccgtccgtcggttgacatcgacaggtaattgttggaaatagctcttactgtataatcatacgaggcctcatttcctccggatgctgttaagccatcagtcaccaagacataaacaaggtcatattctccccccaagctcgacttcagtgcggcattcaccgtaatctcacccatagaagaattataagatgtatttaccttaattccgcaggttgccggatattgtcggatttgactttgtaaagtctgtttaatagcactcacgttcctgtctatcgacatgactttcaagtcatagatacaggtaggaaaaccggacgctccaaaacgactcatgattgtgcttgtctgtgacaaatggaacgggtcagtggcggaactgctggaagaatgaaaagccatttttaccatacgtcccggcatcagttcttccactttcttcaatgccgaagtcatggccggacaataagtacaccaagttcccgtcattttgaagacacctactttacgatagaaaagttcataattcttacgattctgtgcggttacggaaacttcatccgactcccagtccaggtaatatgccttaaacttatgtgtcccgttctctactgccgagaacgtattggtccgtctctccaaataatcaccggtagttacatcttcaaaatatacattcttcatatattcggaagtcgtcagtacttttccattggcatcagtcaccgtaaaagtcgccatatctgttccattggcttcaatcttggctttatccacagtcaaagtaataggtcctgtcacttcgccgttatccggctcttcaccattgtcgtcagaattgccgctgcacgctgtaaaacatccgcacaagcatatcagacttgacataaaaaacattgtaaattttctcatattctatattctaattaataaatgtttcgatgaactcaaaatgaagtagttatagtcaggttagcacctgtatatttaggaatcgtccgacaaactccaccagagcagacgtatccttccttgttacgaccataactcaaggctatacgtgtacgtgacttggcataactggctcccacattgtaataatggattttatccttgccgtgattatacatatcacttccgtaaatgctccatgccggagcaaaatttatctccaacagagctgccatccagtccttctgatcttcttttgtagttagatattgcaactccatgcgagttgaaaaagaaggtgtgaacttatattgtaaatctgctacaaaaatattcgacagattagtcgttttattcgctccgtacgaagggctatattcttgcatggaataaagcaagttcattttgaatgactttgtccattgcttttccacatcaacactaaagtcacgaaatgccaagttacctatctgggctgttccttctttttctaaagcataataggtagaaaagttagcgtgtaatttcaaaccacgtttacctccaatgaccgttcctcttttgaaatgataaaagatatccaattgtccgcccatctcaccgctaactgcatttgtcacatctcctatttgtggagtatgaggatgcaagttggtcagcatataggtatattgcgtactcatagccggaacataattcaacagattcgaagtcgaaccattaccggcaataatctcactattcatccattccaaacggcgcccggtcagatttactcccaacccattgccgctatatcccaactccagcaattgcgcattggcacgtttcctcgcataaagtttgtcatcatgaatgaaattataatatttattgccaccatccacatattcacctttcgctgtaaatccggagcgttcaaaatttacccgtcccgagaagccattcgaataaggttttcccccttcttcttcgaggtcgatattgattttctcataccggttcaatgcccctccttcgatactcaaggatgtattttgccaactaagcatttcagataaggagaaacttacatctacgccacgtacttgtgtatcggaaaagtccatgccaaaacgtggagttccccaaatggccttcaaccttacaatattcttgtaattgtaagtaaaacgtgctcccatcaccgcattattcaaaccaagcatacggtcctcccaactacggaatagcagtccactcccaaactgctcataaaatgtacccgctgttacggaaaaatccttgtcggcccaagatacgtaatagttggttagttttgctttctccaattctgtcgggtatcccaccagtaccggttcataggcttccaactgtacacctacggcaaacttaccttgatagtaatccagtttcagataattgttcgaaccgaaatgatcttccggagattctgcttttgtcttactatcatccttgtagtaaatcgtattcgtttcaaagcttcctgtcagataaccttttttgttatcttgctgcgcataggttagagtagacgctaacgctactaaagccaacacctgaattcttattctagtcatgtcattgcgtttatctatgaataataacagtttctatttctgtagtttttttatcgctttcagtagttccagctcacttcccggcgcgtacccggtgtgtgaatagacaatcttcccatctgcatccactacatatacctgtggagtcaggctcacattcatagctcgcatgaattcctgatttttatcatacaacatgataaaatcatcccatccatgtccctctgccaatgcacgcgctttagcagtagaacggctgtcatctgtcgaaacagctacaacacggaatttggcttcttccaaccaatcgggcaattgttcatttatggcgtccaattcacgaatacaaggtttacaggttgttgcccaaaaagaaataatcataggtgttttgtgattaaccagggaggaggtatttacctgtgctcctttcgcattttcaaccttgactgatggtatttgtgccatggtacaagttagaaaagcgaacaacaacgtaatgcagacaattaatgctctcataagttcttttatttgttatgttaataatcttgttttatctgatgtgttccatcttacagccaaatagcctgaatttctgtatttgtatcaagccgtccttatacatatcgcctatcaaattggcattctcgaaagtgacagttttagtttcagcatcatattctccgcgatatacgtcagaagtacttccgtccaaagccagtctcctgaaacgaatagtataagggccataagaagcgacatcttcacccggtacaatggacaggtaagttttctgcgcctccgaatcatattcataatgcaaccgccaactaaattcccattcaatatcattatccggatcaaatccattcttattcgagcagaccagatagtgttcgtatgcctccgtgccttcttccgctgtatttactctaacggagaatcccactggcacattggaaacattggtggcagaagccgttccggtaaatacccaagttcctgaaagcgtttcataaaaactggaatcattgtctttgatagtcaccgtcagtcgcttgttctcaccaatagacgcccctttcacatcggcaatttcaacatcaaaagaacggtcgtcattaacaagcttgtcatcaacggtcttaaactcaaaattcattgtttcctgcccggcaggaataagtaacgttttggttgtgacaatatagttttcatcctctttggcattatgatcttttaattcgaacgtcacacggatagttccggtatgttcgcccgtcacaacaacaggcacagtacacaaaccggcagattctttcaccgtcattgcagtttcctgcaagtttaccgtagccgctccggaattaaactgttcctcatcgtccgaacaggcggcgatcagaacggcacatagaagaagggtgtatattttcagatagttcattttactcaagtgtttgataatttacgttattcattgattaatatcccggattttgctgacctgccaattgagggttggcatccatttctgttttaggaataggccaaagcattcgctggtcatccacaggtttatccagtccgtcagtacttgcttgtcccgggaaaagcaccagtcctttgctttgcggttttccacgcttcacacctttcccccaacgtttcaggtccatcaaccggtatccttcacctacaagctcccgttcccgttcgttcatgatttcatttaataaagcttcttgatcgtaggttgcatcagtccatccctcgattcgcgctttttttaatgcattcaaagcgtcattaccctttttcacagcagctgccgttccaatcttagcattagcttcagtggcaatcagatacatttcagcaattcggaatggtttcggctgattcaaatagcgtgtttcgcttcctaatgcattgtaatattcattgcccggatatttattaaagaaatagatgtctgccgcattaccagatgatacggttaagtgatattttccgaaataagactttaaccggatatctttttcattgtataagtcaatcagtgtttgtgtaggaatataatccttctttgtagtcggataaccgataaaaatagtccccagaggtacaccggcatcgtcggcactagtcatggcaatctgccagatggtttccgttcccttgtcattcttccatacgctttcaaaatctgttgctgtgttcgataatggatatctgttcgaattaaccaggtcacctgcatatttggctgcattttcatagtcgtccatttgcagggcaacacgcgctttcaaggcagtcactacatctaccgtgatataattcccacaattcttgggagccgtgttgactgtcacgtatgcaccattaatatacctgtcataatcagcaatgccattttttgcagtctctatacgttcttcggcttcttcgaggtcctccaatatccgtttgtaagtatcttccagtgaagatcgtcccggatattgggtagcagaaagtttaggctcatattttatctgaagcggcagtcccggagtacttgctgcggtagctacatcgtaatcgcggcaaaataaagtagccagataaaagtagcagtatgctcttgtaaaatacgcttccccctcatacacattgatctgttgtctctgggtttcagtcaattcgatttccgggttctcatcgatcttacctaccccgtcaataaagaagttgacacgtccgatagcggcatagtagttcgaccagattgtttctacggtagagttggtactctcgaaagtccaacggtgcaactcaccatatttattagagaaatccgccactgcattaaaggcatctgcctgaacttccggagctaatacatagcttcctcctgtcagtcctaaatatacggaatagataccggcacgtgcttcttcaaaaccgactatggtcgttaacgcttcttctgtaggaacagcatcgtatggcattttatccatatcacaagaagtcaccccaagtgtcagtatagtcaatgctatcatagatattttcttcatattcaccattctttatgtttttagaaagttagttcgactccgaaagaatattgtttcgtattgggatagttacccaattggatattactgtctacttccgggtcatatcctttatatttagtcactgtgagtaaattacgtcctacaaagtagattctggcgttactgattactcctgttttctgaatcagtttggccggaagggtgtacccgatagtcaggtttttcatacgcataaatgaagcattttccagtaaatgcgtatcaaactgcatcggggagtcgggagtggcaattctggttatatctcccggcttctgccacatggtaagcatttctacagtttgattgtccgaacctgcaaaagtgggattctctgtaaaaaagcgctcattattcaacatatactggcctagcataaaagagaagtcggcactaacagaaatccctttccatccgaactgggtgccaaagccaccggaccatggtgcatagcgttgtttaccgacaaaaactgcatcttcttcggagtaactcttcgtcagatttccatttttgtcgtaccacatattatatccgtcacgcggatcgactcctgcccatttcacatagtaatattctccccaaggtttgccgaccttcatcttcaaaccggtatcaggcaaggtatattcatccaatccgttaaacagtttagttatttcattcttattataattcaggtttccggagacactccatgaaaaatctctcgttttcagaatatccactcccagagtaatatcgaaaccacgattacgcatacttgctacattttccacactgcttccgtgtccggtagtatatgacaatggataccccatcaacatatcatccgtctgacggttataaaattccagttctacagaaaagcggtcaaacactcttgtactgatgcctacattcagtgttttcatactttcccatgtcaggttatcatttccgacggtagaaggagcaatacccggttgtccgttatacagcaaaccggaaccaaccaatgccaacgcattataggcgctgataccggaattaccagttgttccatagctcaccttcaactgtaaactgttcaaccatgaaacgttctgcaggaaattctcttttctcatatcccacatggctcccaaagaataaaagtttgcccactggttgtttttggcaaacagagaagaaccgtcccgccgtgctgccaaatcgacataatagcgatcagcaaaactataactgattgtgccgaaataagaattgaaaaccttgtcatacatcgaatgtatcggcacttctgactctgctccagctgccatcagcatcatttgtgagtctaccatttttttagaagttgccgagaaattctcattctttgtgataatggactcctggcctgccaacacggtaaaaagatgcttgtctgacagactgaacttatattccgccgtattggtgaaagtaaatgaataataacgttcgaaagactcggacgccacccctgccccttcaaaagggccttccggataggctttatgggagttacgataatcaaaggcatctactgcctgcgaggtacgtatattcaatccttttatcgggtttatattaaagaaggtattgccattgatacgtaccgtactccggtcattaggttgaagttctgacaggtaatacggattataatatcccatatcgtcaaaatagtccaatcgttttccatatcctgtaaagttgccttcttcgtcggtcaatatctcgttcattgtttggtcgggacgataaatacgggcagcatacgctttattataaacgctgttagcttccgttccgaaagttgtcgtgttatatttctgataggaaaggttcacgttaatcccagctttcaaccagtcggtcacctttacttccacattactgcgcaaagtctcacggcgcaatgaagaatcgtccataattccctctgtatcataatgtccaaatgaaatatagtagttgatcccttcggaaccaccaaccacatttacatcgtattgttgggtaggagctgcatctccgaagaaaacatctgcccaatctgtagatataccattatctatatagaacttcttccgtttttgaaatgtagtgtcgtatgcttttcccgggtccagcatttcctgcaggttaagccattgttcggtattcatcatctctatattatctcccgtcattttcgaccagccatattgcgcattgatactaacacgggccttctgtcccatttttcctttcttgctagtcattatcaccacaccattagcagcacgggaaccatatatagctgttgaggaagcatctttcaatacggtcatgctttcgatgtcgttcggatttaatgctgtaaatgctccggatgatataggtgagccgtcgagaataaagagaggttctgtatttgaattgatcgagctgactccacgcaatcgcattacaacacttccacttggttctccactgggagtaaatacttgtaaaccggcaacttgaccttgtaatgcatctccggcattagcaaccggtctattggctatcttgctattatttaccgttgttaccgaaccgactacagaccctagtttctttgctgatccgtaacctaccacaacaacttcatccatcagttgtgtatcagactttaagataactctaacagtcggttgaacagaaaccgactccgttttcataccgatataagagatttgtaatatttttgctgaatgtggtacatccaataatgtgaaatgcccgtctatgtctgttattgtacctaagttagtgccttttacgacaattgaagcccctacaacaggttgtttgtcatcatcggaaatcactgtccccgtgactttctgcgtttgagctgttatcagcccgatacctataaaaaggtatccaaatagcagcgctaattttttcttcataaatctctttttaaattattaaatagccctaaaacatttaaactcactttttacacttagataagttctatcagaacttaattataatccattgtttttgtagtgtttttacatcaaatatgtaattctggaaagaaatgttgcttgattttactttttcaatcaatttagatgactattccataaaaaaaatatgtcttttcgttgttttttgcaaaaagaatatatacttttgttccattatataataccaaaccggaactgttaataaatacaatccgaaaaagagatataatttgtattttaagaactatatatttattttaataagaatagaatatgaaaaagcactaagttctgatagaacttagtgctttttcgttttaaggagctattattagccattttacttggatttccttcctattctacttttcagttacattataattatattttaaatctccctcaaacataaaataaaatcagaaatataaaagaggctcatttaaactatgttaaatagacttcatctaaaatttcttcatatatgacactctgtatatttctttatatagataaaaacaagtaaatatacaatagtactatttatttacatcaaaaacaaacaagttattttatgatttcaaaatttcgagagatttattctagctttatctcttgattttaaggagcacctcgttgcattaaaaccaacgaggtgtttctcggtgtgcaacgggtcgttcctttaaaaggaacgacccgttggtttaaaaccaaaacccacttatgtaactatctgaaaagcaaagcattacaaaagcgtcctcccggcctttctttttaagtaaaattttcaacaaaagaaaacggataccaatatcaaacacggtactccactgataaatattttacaaatcaaatctaaaaacaatggttacagttacttttcagatcaagccctatctagcggcttacatgtacatgcgctacaaaaatcacctcgacgtacctccagaccgctcttcttcctcactttccgcgatccatcttctcgacacccagcccatctaccactttctccaccagctatccattccccaccctcccaacgcctcatggcacgaaaccggaaatattaccttcaccctcccccatcccagaaacggcaaaaatccaaatgtatataattatataggtcataacagtgcacttatcattgaaaaagcaatggaagtagaaatgagggccgaactttatgaatttctactggaaaataaatactgccacggcatcatgttcaaaaaatcaatggaaacttttgtcgaacattataatatggtagggttagtggaagaagaaagtttaatgagggcgtttcagaggtggaggaagatgatgaaggaggagaaaaataggtgattcttttatagggtgtcacataaaatgagacaccctgcttttacttttgcaccaaacttcattaataatcaaaacaaaagtagtatggcaataaaaaaaagtatcgaaacagcagacatcccttttaagtagctattg

SEQ ID NO: 8103 - DNA, 9687 bp, Unknown
  gut microbiota DNA sequence
gtattagtgattacttattttatttatttgaaggataagaaaaataattaatctggtcacaaaggtagaaaaaaactgtgacaagcctaaattataggcttaatattttttaagagagacaaatagacttctacatccggtcgatattcctcggtgccggatagtgcttatcggtgcctcgattagtgtaatatttaggcgcggatttcgtagattacacggttttaagaataaaaaatccgtgtaattcgcgtaatctgcgcctaattttaaatctttatgtaaaacgagcctattatctttttattagactccttttcatttacttttagattcctgctagctccagtactttttcaactgctgccggtagtccatcagcatttttacctcctgcggtagcgaagtgaggttggccaccgccgccaccttgaatcagtttggcagcctcttttaccagattaccagctttcagaccaccagcaaccaaattatcgctaagcattactgtcagcatcggtttgccattgtctgtacttccggctacgaagaacaagttttctgtgatttcaccccgaagttggaaagcgatattcttcactacttctgccggtagcggagcacagaacttgattactttgataccgtggatctcttgtacatttttcagtagtctttccttcaaagctgcttctttctctttcatgaagtcttctacctgctttttcaatcctgcattttcatccagatatttacggattgcaattctcaagtcaggagcattgttaaagagagccttcaagtcgctaagtgtatcttgtattgtatccagcatttcttccacgcgtgctccggtataagcttcaatacggcgaacgccggcagcaacagaactttcggagatgattttcaccataccgatatttccggttgcagctacgtgtgtaccaccgcagaactcgatagaagtgccgaactggatcacacgaactctgtcgccatacttttcaccaaagagagcgatagctcccaattccttagcttcctcgataggaatattgcgatattctttcaatgggatattagcgcggattcttgcattgacgatatgttcaactttacggatttcttcatcggtcactttctggaagtgagagaagtcgaaacgtaatgaatccggtgtaaccaatgaacctttctgttcgatgtgttcacccaatacttcacgtaaagcagcatccagcaagtgggtcgccgagtgattggctgcgcaggcagcacgtttgtcggtatctacacaagccatcatcggagcttccggatgttcgggtagctttttggtaatatgtatcggaagattattctctttctttgtgtcgaccacttcaatcgtctcgaactcgctcaccaatacacctgtatcacctacctgaccaccactttctgcatagaacggagtatagtcgagtacaatctgatacaatgtctggttcttttgtttgatctgacggtaacgaaggatagaagcctcgtattcagtgtaatcgtaaccaacgaattcagtagttccttctttcagtacaatccagtcaccagtttcgatggcggcagcattacgtgcacgctgtttctgttgctgcatttcttcattgaactcttcaatgttgacagtcattccgttttcacggagaatcagctctgtcaagtcgagcgggaaaccgaatgtatcatataaagtaaaggcatctttaccgctgatttcagtttttccattggctttggtatcttccattgtcttatccaataaacggataccagtttccaaagtgcggaggaatgattcttcttcttccttgattactttttcaatcagtgtcttttgtgcaaccagttcaggataagcctctcccatgttatcaatcaatacaggaagcaacttatacataaatgcctgtttctgtccgaggaaagtatatccgtaacgaacagcacggcgaaggatacggcggatcacataacctgcctttgcattagacggcaactgaccatctgtgattgagaatgcaatggtacggatatggtcggcaattacacgcattgcaatatcttgctgcttgtcttttccatattctgtacccgacattgctgcaatagctttcaacattggctggaatacgtctgtgtcgtagttggatgttttgccttgcagagccatacaaagacgttcgaatcccataccggtatcaataaccttggcaggaagcggctcaagactgccgtctgctttgcggttgtattgcatgaacacgaggttccagatttcaattacctgcgggtgatcgtggttcacgaggtcgcgaccggagatcttggcacgttcttcagcaggacggaggtcgatatggatttcggaacaaggtccgcaaggtcctgtatcacccatttcccagaagttgtcgtgtttgttaccgttgatgatgtgatctttcggcaagaactgttcccagtaggaagcagcttcgtcgtcacggctcaatccttcttcaggacttccttcaaatacggttgcatagagatgttccggattcagtttcaagacttctaccagatattcccacgcccagctgatcgcttctttcttgaagtaatcgccgaacgaccagttaccaagcatttcaaacatggtgtggtggtacgtatcgtgtcctacttcttccaggtcattatgctttccgcttacacgcaaacatttttgcgagtccgcgactctttggtatttcgccggatggttacccaaaataatatctttaaactggttcatacccgcgttcgtaaacatcagggtagggtcatctttaatcaccatcggagccgagggaacgatgtggtgtcctttcgactcaaagaaattcttgaatgaatctctgatctcttttgcagtcaacatataatgaagaattatgatttatgaattatgaattatgggctgtgggatatgagagaggggaggaatccccaataaatcataaatcacaactcataaattcgtaaaaactgtgcaaagatagcttgtttttattacttttgccgtattaacaagcgaaatatttccaaaaagatgcgcaaagtatactacatctataatccacagacccagacttatgatcgaatttaccctaccgtacggcagcgtgcgcttagtatcctgcgtcggcttttctatggaatggggttgggagcaggttgctttattgtattgcttttgatttttggttctccgtcagagaaggaattaagaattgaaaacagccgtcttttggcgcagtacaatgtgctttcccggcgtttggacgacgctatgggggtgcttcaggatattcagcaacgtgacgataatctgtatcgggtgattttacaggcagatcctgtttctccggctattcgtcaggcaggttatggcgggacgaaccgttacgaagaactgatggatttggcgaatgccaagctggtggtgaatacgactcaaaagttggacgtgctttccaaaaggctttatattcagtcgaaatctttcgatgatgtgattgatatgtgtaagaaccacgatgagatgctgaaatgtattccggccatacagcctatttctaataaggatcttcgtcagacagcatccggttatggtacacgtattgaccctatttatggtacgacaaagttccatgcgggcatggacttctctgctcatccgggaacggatgtatatgctaccggaaacggaacagtggtgaaagtgggatgggaaaccggatacggtaatactattgagatagatcatggtttcgggtatcttactcggtatgctcacttgcagggatttaatacgaaagtcggaaagaaagtggtacgtggtgagattatcggaaaagtgggtagtacaggaaaaagtactggcccgcatttgcattatgaagtgtacgtgaaagggcaggtagtaaatccggtcaattattatttcatggatttgagtgccgaagattatgaaaagatgattcaattggcagccaatcatggtaaagtatttgattaaaatcttaaaacaggagtgttatgcttaatacagacaaagaattgaagctatattattcaataggagaggttgccgatatgttcggagtcaatccgtcattgctccgtttttgggaaaaggaatttccgcaaatctctcctaagacagcgggaagaggaatacgtcagtaccgcaaagaagatgtagaaacgatcggacttatctaccatttggtaaaagaaaaaggcatgacacttcccggtgcccgacaacgtttgaaggataataaagaagctacggttcgtaattatgagattgtaaataagctgaaagcgataaaagaagagcttttggctattaaacgcgaattggatggacgggaataaatgctaatcgataatggattcgatagccaagaaacctcataacaaaatgaacggtgaacaatttgcatgatactgcaacttattcaccgttcatcgttttcttatttaccgtttgaaagctattcttctacgcggctcacctgtttgatattctgtattttcttcagattgttacagatggttttcacatcatccacgtcatgtacccataactgaatttttccttcaaagataccatcttcggtttcgatggtcagcttacggatatttacattgagctgtctggagataacctgggtgacttcattcaaaagtcccatgctgtctataccttttatatatatatataccaggaaagatagttctttgtgtgtatcccattctgttgctaatatacggttgccataactgctcttcagtttggcggcaacaggacattggcgtttgtggataatgatccggtcgttttcatccacatatcccaatacgtcatcaccgggaataggatggcaacattcggccatgatatatttcttctgcaaactttcttctgtcagcttgagcacttgcttcggattgatcttttctttttcttgcggctctttttcttcctgcttctctttattgttgccgaaagagaaagtcagatatttcttccagttactggtttgcttttctttcagttcattcttatccgcttctcccaagacgattgctttgctgccaatggcggccagcagttcttcttcattcttggcattatgcagtttgcgcagcttctcaataacggtttcttcagggcggatttcctcttttttcaaaaactcgttaaggatttcttcacctatcttctggtttgctttacgctctttgcggaggatggctgctatcttggcacgggcacgggcagtggttgcaaaaacttcccattgcggttgcacacgttgcgattttgaagtcaggatctcaacttggtcaccactttgcaatttatggcttaacggaactaatttgtggttgactttggcaccaatacaatggctgccaatatccgtatgcagggaaaacgcgaagtcgagagccgtagaattctgcggcatagtcttcagctcacctttgggggtgaatacgaatatttcagaagcaaataaattaagtttgatggtatccagaaaatcaatggcatccggttgcggatcatccaatatctccttaatggttttcaaccatttttccaactctccttcatcttcgctgcctcctccttctttgtatttccagtgagcggcgaaaccttgttcggcaacgtcattcattcgttcactacgaatctggacttcaatccattgtccgttattacccatcagggtgacatgcaatgcctgataaccatttgctttaggatggctcacccagtcgcgcagacggtccggatgaggcttgtatatcttggagatggaaacgtaaatgtcgaaacagtcgttgagttcttcttctatgttacgtggctcgaagatgatacggacagctagtagatcaaatatttcttcaaaaggaacatgcttggtctgcattttgttccagatagaatagattgattttacgcgggcaagtatccggtattttaatcccatcttatccaactgtgtacggataggagcagtgaagtcgttgaaaactttgtcgcgttcggcagctgtggcattcaacttctcttctatttccgcatattcttcgggatgttcatatttgaagcttagattctcaagctctgtttttattttatagagacccaggcggttggcgagtggcgcatagatgtaaagcgtttcgcctgcaatcttatattgcttgttgggcaacatggaaccgagggtacgcatgttgtgtaaacggtcggctatcttgataagaattacccggatatcgttcgacatggtgagcagtaacttcttgaagttctctgcttgtgctgaagcacggtcaccgaaaattccgccggatatcttggtcagtccgtccacaatttgggcaatcttcgggccaaagatattttcaatgtcttctactgtgtaatcagtgtcttctactacatcatgcaacaaggccgcacatatagaagttgaacccagaccgatctcattacatacaatacttgcaacggcaattgggtgcataatataaggttcgcccgaacgacgtttgatacctttatgcgcctgattggcgaagttgaaagccttcgtaatgatttcaacctttttgcgatgtttagtgttgagataatcattcagtagttcgtggaacgcctgattgatcatctcttcatcacttatttctttagggggcagattatccataattgttatcctttcacttgcttagttctgcaaaaataagcaaatttccgaacgatgcaagcaggaagctatttatttgtatattttcaatcgttttcctgcagcaattttggtgttggacattccattccacctttgtatatccttaattgtgacgccatactttccggcgatggttgacaaagtgtctccactttttattgtgtagtaggtcagtttacctttaccggcaacagctgctgtcgttttgcgggttgagggggtaatttcctttactgcaacggtttttcggttgcggaacaattcgtcggcacgatgtgcgtaaattgtgtcttgcttatctataaaggtactgatagcatcgataggaagtcttaaagtataaggcttgctgtcacccggaatcatgtgcttcttatattgcggattcaaactcttgatttgatccaaaggtacgttgcaaagatcagcaatctgttcgaagtgcagattcttgttcacttgtactgtgtcggtacttgccgggatatttgtttccatcggacaaatattatggtcacaatagtaagtcatcacataattagcggcgataaaggcaggtacgtaaccacgtgtctctttaggcaggtaattataaattttccagtaatccgtttcgccattggcacggcggattgccttgttgatagtaccggggccacagttataagcagcaatcacaagattccagtctccatagatatcgtacatttctttgagataacgtgcggcagcccaagttgctttaatcgggtcgcgtcgttcatctaccaggctgtttgattccaagccatagatcttacctgtaccaatcataaattgccacagaccggaagcgcctgcgcgtgacacggcagaggggttcagtgcagattcgataatcgggagatatctaagttccagtggaagtccgtatgcatccaatgcttcttcaaaaatcggcatatagaagttgcaggcactcaacatgaaagaaacctgattgcgcaagcgtcctgcatacatatcgatgaatttgcggataatatcattataaggcatttccatgatagccggaatgcgtgacaagcggtcgatgtagacagagtcgctgaataaagggttgatttcagctgtactgcaatctttgcctaagtcaatataatttttagctttccagtcgttcaacagactgtcaagtggatatgtcatacttttaggcaggtcgatgctttctttgcgttcagttccattttcacgaatcactacatctacactttgcgcttttacctgcgacgttgccaccagtaaaagaaaaataatcgaacaatagttaactaatttcttcatgcttcaataataagatcaatctaaattgtgtttttaaaatcgtaatacgcattgcagaccaaccgacttgctttttaaactgctggagcggaactggttgttattgtcgataacagccggttctactttcatgctcaagtcgggggttatatcgaagttagacaactctgcatctacataagcgtcgatgatagagatcagataaactccgataaaagcaaatatactaaggtcccgataacgacggaacatatcttttcttcgttttagtgtgttttttagctgctcctcattataagtggagttcgggggcaacaaatcttcgtaacttttcgtattcggattgctgtccataatgtccagataggcttgcgaatagtctttgtacatcttaccgttccaacttaaggcgtaagcacaaccagcaaatcctccatatataataggtaatttccagtatttacggttgtaaatctgtcctccaccggggaatacgactgccaaccacgttgctttggtcggattcgggataaatattttcttgttaatatcttgagcaggtggcggcacagtgtcggtctttacaacaatggaggcaggttgctctatctttttcagctcttttttattggctgcatccaagctgtccgctatctgtattttagcagctgacaaactgtcgatggccggaagttctttggatggtatgatttggatagaatccttcttcaccgagtcctgtataatcggatcacgatgccttcgtgcacgggctttcggcgcttcgcgctgtatgattgttgtatctttccgtgccggagtaacagtggattgtgcatacacatcaatccctgccacctgtaaaaaacagagaagcagggcgctgactagtaactgatatttcttactttttcttgtcatttacttctttagcgtatcgaagatttccatgatacgttccagttcctcctcgttcccgaaaggaatactgatcttgccttttcccttttcagagcaggtgagttgtaccttggtgttgaaaaagccggagagttgttgcttcaataagttgaattcttcaggaagtttgccacgtttgggtgttattttccgtgtgccgcttttcacagcttctccttcgcttaatgatttaacaatttcttctactttgcggactgaatatccgtgttcttgtatttcttcgaatattttaacttgtagtttagggtcgcctaatgaaatcagtgcacgggcatgtcccatgtccaactgcttgttttgcagggccatctgtataggagccggcaatttcagcaagcgcaggtagttggcgatcgtcgttcttttctttccgatgcgttcgctaagacgttcctgtgtcagttcgtactgatcgagcagatgctggtaggcaagtgcgatttctacggcattcaggtcttcacgctggatattttcaatcagcgccatttccatcatgttttcgtcgtcggcagtgcgtatataa

SEQ ID NO: 8104 - DNA, 49377 bp, Unknown
  gut microbiota DNA sequence
gaaagacgttcgtgtgccaggatggcacttccgcctacatagattccgctccagtccggtccgcgatgacggatcttctgggccattttcagtgctttatctcttagttctttcgtttgaactttgatgttgagtatacctgctattccacacataactttaatttttagagggggtaatgtaatctgttgattgtttattcgctatttctaagaagctgattagctattcttaattcgttccataattgttatcgtttagttccacaactgtttccctttagttccatatctgttatcctttagttccacagatatggaacgaaccgataatagtaatcgagcttcttgttgtacactgttgcaaaacttattgtattagataagcatctatttccgcagcagcctttcgtcctcccgccatggcgcgtaccaccaggctggcgccagtctcggcatcaccggctaggaatacattctttgcaaatttcggttgttccggtttcaggaatcccattgccaataataccatatcagcttcgatgacttccttcttccctgttggtttcatcgtgggacgtccgccatctgctgccggaatccattccacttcttccacttctacacctgtcacttttccattctttccgaggaactgattggaagccaggcaccagcggcgtgtacaaccttcttcatggctggaagtcgttttgaagactgccggccattgtggccaaggagtagccggattgtagccgacaggaggtttcggcatgatttcgatttgagtgacgctgacggctccctgtcttacactggttccgatgcagtcggaaccggtatctccgccacctatcacaagtacttttttgcctttggcattcaccaatttatctttcgggaaagtctgtcctgccagaatcctgttctgctgtgccagcatttcaagtgcgaaatggatgcctttcagttcacgtcccgtaatattcaaatcacgtgcagtaggcgttccggtgcagatgcagtaagcgtcgaatccttccggcaaatgattgacgtctatttctactcccatttcaaacagtattccttctgcagccaatatcttcatccgtcggtcaattacattcttatccagtttgaaattaggaataccgaaccgtaataaccctccgggcgcttcgtccttatcgaataaagtaacgctatatccttttaaattcagctgattagccaccaccaatccggcaggacccgcaccaatcaccgccactttctttccgtttcttctcggcgtctttacctgtatatatccttcacgaaaagccgcttccacgatagctgcttcattctcgcgaatagtcaccggctgatcgcaggaaagtttcaacacacacgatttctcgcaaagggcaggacaaatacgtcccgtaaattccggaaaatcgcaagtagacgacaatacttcgtatgcctccttccattttcccctgtataatgcatcctgccattccggttgtttatttcctatcgggcatgcccaatgacagaaaggtacgccgcaatccatacagcgtgacgcctgcaatttacggctgtttgtattcaaagtctgttctacctgactatagtcagcgattcgctcgtttacagggcggtatcccgcctcttgtcgaggtatatttagaaatgctttaggatctcccatcttgttatttactatttgacgatttactatttactatttttagactatcttgtcatttgctatttgactatttacagactatacattcaaatagtaaattgtaaatagtcaaattgtaaatctaatagtctctttgcatgtctgcaattttttgttgtaattttctcatctgttcctcctgcaatacttttttgtattcgatgggtactacttggatgaactgttctgcataatgattccagttgtcaagcatggtacgggctagttttgagcctgtgtacagatagtgttggcggattagttcgtgtagctccttccggtagctggcttcttcgatgagtgacagttccaccatttccatgttgcagaaataatcgaagttgccatccttgttccatacgtaagccacaccgccactcataccggctgcaaagttacgtccggtttgtccgaggactaccacacgacctcccgtcatgtattcgcaacaatggtcgcccacaccttccactacggcaactgcaccggagttacgaactgcgaaacgttctcctacacgaccgttgatatatacttcaccgcttgttgctccataaagcaaggtattaccggcaattgtattcttttcggcttcgaagttgctgcggataggaggcaatacggagatgcgtccgccgctcaatcctttacccagataatcgtttgcttcaccttccagtttaaagttaactcccggtacgaggaaagccccgaaagactgacctgccgatcctttgaacttcacattcagcgtatgttccggcaatcctttggcaccgtatttcttggcaatcactccggagagcatcgcacctattgcacggtctgtattggcaatcgtatattctaaagaaatctctttttcatgttcaatagcttcttgtgccgcatcaatgagggttacatcctttacagtagaaacaccgtggtcctgatcgatgacatggcggatagccgcgttgttatcaatgcgtgccagcaatttggtgaagtcgattaacgcatgtttcggattcgggtcattggcaacggatttgcgttcgatcaagtctgtgcgcccgataatatcatccatcctggtgaatcccatttcggccaaatgctcgcggacctcctgcgccaggaatgtgaagaaatttaccaaatattcactacgcccatgaaagcgtttacgtaattcctcattctgtgtggcaactcccaccggacaagtattctgatggcatttgcgcatcattacacaccctaatacaatcaatgccgaggtggcgaagccatattcttcggcacccattagcgccattaagatgatgtcacgtccggttttcagttgtccgtcggcttgcagaactacttgaccacgaagtccgttcaaaaccaatgtttgttgtgtctcgctcaatcccaattccggtgagatgcccgcataacggatagaagaagctggagaagcacctgttcccccttcagcaccggagatgacaatcaggtccgcctttgcttttgccaccccggcggcaattgtaccgacgccgctttctgctaccagtttcacactgattttggcctgtggatttacatttttcagatcgaagattaattgtgccaaatcctcaatcgaataaatatcatgatgaggtgggggagaaatcagtgaaattcccggaatggaatggcgtgtttttgcaatcacatcattcactttaaatcccggaagttgtccgccttcacccggctttgccccctgtgctatcttaatctgaatctcatccgcattaaccagatattctgccgttacaccgaaacgtccggaagctacctgcttaatcgcacttcgtaaagaactgccatcgggcagcggttggaaacgggcagcgtcttcgccaccttcaccggtattactgcgtccgtgaattttattcatggcaatagccattgcctcatgagcctctttgctgatagaaccaaaagacatggcccccgtgacgaaacgatgcagaatgttttccaccggttctacctgatcgatcgaaatcggattacgacggaatcccagaaagtcacgaaggaaaataggcttctctttttcgtctaccaaatgagtatattctttaaacttcttataactccccatccgtgtagccaattgcagcgtactgattgtttccggattccatgcatgctcttctccgtctttacggaaagcatacaaaccggtaagaagttgagaatggagagttgagagttgagagttgccatgcggagcctcactctccactctcaactctccactctcaacttctcccactccttccttgtggaaagcaatggcatctctggctatttcttccaagcgaatacctccgatgggcgaaccgagtccaccgaaataggccttactcaattcttcgctcaaaccgacggcttcgaagatctttgcaccacgataagagcggatggtagagatccccattttactcatgattttaaacaagcctttgcagatggatttgatataattcttttcagcagtggcataatccaactgaatatccctgtctttaaccaagcggtcgagaacagcgaatgccatgtaaggattcagggcacttgctccgaaacccagtaataacgcagcgtgcatcacctcacgtatttcaccgctttctacaatcaatgctgtttgtacacgtttgccgactgaaatcagatggtgatgaacggcgcttactgccagcaatgaaggaatagcggcatgggtaatatccacgtcacggtcggtcaggacaatgtagtttacgccttccgtcacagattcttccgccattttacagaggctgttcagtgcctcctgcaatccggctttcccttttgctgcttcaaataacatgggcagtttgaccgttttgaagcctttatagcggatattacaaagaatatccagttgtgtgttgctcaaaatcggatgattcaggcggaccattttgcaatgactctcgctgggtgtcagaatattcatgccgactgccccgatgtattctgtcaatgacattaccagttcttcgcggagcgggtcgatgggaggattggtcacttgtgcaaattgctgccggaaatagttgtaaagcaattgcggcttatccgaaagtacagctaacggagtatcattacccattgaatggatcggttctgctccggtgcttgccatcggcataatcagtttttcgatatcctctttggagtagccgaaagtgcgaagcatacagtcgtagttttcgacatgatgaggtactttgcgtccgctcttcagttcatccagttcgattcggttcgtagacaaccaggtgcggtaaggtttggcttcagccaactgttttttcagttcgccatcataataaatttcacctttttctgtatctaccagcaaaatcttaccgggctgtaagcgacctttttctttgatgtctcccggttcgaaatccatcacaccgacttccgaagccactaccatcatatcgtttttagtaatcagataacgggcagggcgcagaccgttgcggtcgagcatacctccggcaaatcgtccgtcactgaagagaagtgcagccggtccgtcccacggttccatcaggatagagtggtattcgtagaatgatttcagatcctcgctgatgggattcttttcgttgaaagattccggcacgagcatagccatggcgtgtggcaggctcaatcccgacatcaccaggaactccagtacattatccagggaagcactgtcgctcatgcccggttgtataatcgggcgaagttcttttatgtcacccaaggtaggagtggagagtacgctttcgcgggcttccatccatccgcggttaccacggatcgtgttgatttcaccgttgtgtgccagaaggcggaatggttgtgccaatccccatgtagggaatgtattggtactgaaacgggagtgcaccagtgccagtccgctggtaaaatagctattcgtcaggtccggatagtagttgcgcagttgcaacgacgaaagcatacctttatatataatgttttttgtagaaagcgaaacaacataaaaatcgtcctttgtcggaatggatgacaatctgaccttattctcgattcttttccggatcagatataacttccggtcggccgtttccgtttctgtaaatccggtgataaacacctgcttgatgtcaggttcgtttgccaaagcagattctcctagaatttcagggcaggtgggcacattgcgcagatgcatcaatgtgagtccttctttttcaatttcttcaataatgatacttaaaatggctgcctggtctttctcatttttcggcaaaaatagcaatcctgtgccgtaccgtcctttttcgggtacaggaataccttgcaataaaataaactcatgcggaatttgcagcatgatacctgcaccgtcgccggttttgttatccgcaccttcggcgccgcggtggcgcatgttctctaatacctttaaagccgactcaacaatgtcgtgtgacttttctccatgaatgtttaccagcataccaacaccgcaggcatcgtgttcgtatgccgcattgtacaagcccatctgtttgggctgtcgttggtaaggggatccttctgttacgttgttaaaaagttcttgtttcttcattcttactagctttattgtatgataatacctaattgaagtgtcaatttgttcggcaaagttagtagtttaatttcaaaatgatagtaaaatataagttttctgtaacgcgaaattaaaagaagagcctgtcttcttctaatttgtaattaaaagaaggagatttacttttaatttgttagctcttttaggttaatggtgaactaattgtaatttgtttctttttgagctaaaaataatatattatttaactttttgatgtgtttgcaacttttttatgcgtttctgtcaaataaatatgctttttgttgtctttatgttatttgtaatgtgtatatttgcagtcgaaataaaaatatcataatatgtgtggaatagtaggctatattggtaaacgaaaagcctaccctatccttataaaagggctgaagcgactggagtatcgtggatatgatagcgcgggggtagcaatcatcagtgatgaccgacagttaaatgtgtataagacgaaaggaaaagtctccgatcttgaaaatttcgtcacacaaaaagatatttccggtacaatcggaattgcccatactcgttgggctactcacggggaaccttgttccgctaacgcccaccctcattactcttcttccgaaaagctcgctctcattcataacggtattattgaaaactacgccgttctcaaagaaaaacttcaagccaaaggctatatttttaaaagtagtacagataccgaagtccttgttcaattaatagaatacatgaaagtcactaatcaagtcagtttgctgacagccgttcaattggcgttgggagaagtgattggtgcctatgcgattgcgattcttgataaagagcatcccgatgagattattgctgcccgtaagagtagcccgctggtagtggggattggagcggacgagttcttccttgcttcggatgccactccgattgtagaatatacagataaggtggtttatctggaagacggagaaattgctgttctccatctgggaaaagaattgaaggtggtcaacttgagtaatgttgaaatgacacctgaaattaaaaaggtggagcttaatctcggccagctggaaaaagggggatatccgcattttatgttgaaagagattttcgaacagcccgattgtattcatgattgtatgcgcggacgtatcaatgtggaagcagacaatgtggtactttccgctgtgatcgatcatcgggaaaagctactgaatgccaagcggtttattatcgttgcctgcggaacttcctggcatgccggactgattggtaagcatctgattgaaagtttctgccgcataccggtggaagtggagtatgcttccgaattccgttaccgtgatccggtgattgacggacaggatgtagtgatagcaatctcccaaagcggtgagactgcggatactttggctgctgtggaattggcaaaaagccgcggagcatttatatatggtatttgcaatgctatcgggtcttctattccccgtgctactcacaccggttcgtatatccacgtaggtccggaaatcggagtcgcttccaccaaagcgtttaccggacaggtcactgtgttggcaatgctggcattgacgcttgccaaagcgaaaggaacaattgacgaacggcattatctttcaatagtacaggaattaaatcatattccggagaagatgaaagaggtgctgaaactgaatgataccctggcggaattatcgaaaactttcacgtatgcgcataactttatttacctgggacgcggatatagttatcctgttgccttggaaggtgcattgaaattgaaagaaatatcgtatattcacgccgaaggttatccggctgccgagatgaagcacgggccgattgccttgattgacgcggaaatgccggtagtggtgattgctacgcagaatggactgtacgaaaaagtgctaagtaatattcaggagatcaaggcgaggaagggaaaagtgattgcattcgttacgaagggagatacggttatcagcaagattgccgattgtagtatcgaacttcctgaaacaatagagtgtctcgatccgttaattactacggtacctctccaacttcttgcttatcacattgcggtatgtaaggggatggatgtagaccagccgagaaatctggcgaagtcggtaacggtggagtaatgtgatttacaattagacaatttactatttactatttacgattgaagaatcaatgatagatagtaagttgtttgattggcaggtggtaatttaaatcgtaaatagtatagatggaacaattgaaacatgaatgtggcgttgccatgatacgcttgcttaaaccgttggagtattacgagaaaaagtacggaacatggatgtacggtcttaataagctctacctgttaatggagaaacaacataaccgtggacaggaaggtgcgggactggcatgtgtgaaactggaagcaaatccgggtgaagaatatatgtttcgtgaacgtgctttaggctccggagctattacggagatttttgaaaatgttcaaaacaactttaaggagctcactcccgaacagttgcatgatgctgcgtatgccaaacgagtcctgccttttgccggggaagtatatatggggcatcttcgttattccactacgggaaaatccggaatctcatacgtgcatccatttttaagaagaaataactggcgtgccaagaatctcgctctttgcggaaacttcaatatgacgaatgtggacgaaatatttgcccgtatcactgccattggtcagcatccgcgtaaatatgccgatacatatatcatgttggaacaggtgggacaccgtcttgaccgtgaagtggagcgtgtattcaatcttgccgaagccgaagggcttacgggcatgggcatcacgcattatatagaagaacatattgatttggcaaacgtactgcgtacttccagtcgcgaatgggatggggggtatgttatttgtggattgaccggaagcggtgaatctttcgctatccgtgacccttggggcatccggcctgcattttggtatcaggatgacgaaatagctgttcttgcttccgaacgtccggttatccagacagctttgaatgttccgtttgaggaaatcaaggaactgcaaccggggcaggcattgctgattagcaaagaaggtaagatacgtacttcgcaaatcaataagccacgcgaaaatcaggcttgttctttcgaacgtatctatttctcccgtggcagtgacgtcgatatttataaagaaaggaaacggctgggcgaaaagttggttccgaaaatactgaaagctatcaataatgatatcgatcatacggtcttctcttttattccaaacactgcggaggttgctttctacggaatgttgcagggactggatgattacttgaatgaggagaaagtgcagcagatcgctgcattggggcataacccgaatatggaggaattggaagttattctttcccgtcgtattcgcagcgaaaaggtggcaatcaaggatattaagctccgtacgttcatcgccgaaggaaacagtcgtaatgatttggctgcccatgtgtatgatattacatacggaagtcttgtacccggtgttgataatctggtgattatcgacgacagcattgtgcgcggtactacgctgaaacaaagtattatcggtattctcgaccgtctcggtccgaagaagattgtcattgtatcttcttctccgcaggtgcgttatcctgactattacggtattgatatggcaaagatgagcgagtttatcgccttcagggctgctgtcgaacttttaaaggaacgggatatgaaagatgtgattgcggccgcctatcgtaaatcgaaagagcaggtaggactgccgaaagagcagatggtaaactatgtgaaagacatttatgctccgttcactgatgaggaaatctctgccaaaatggtggaactgctgacacccaagggaaccaaggcgaaagtggaaatcgtctatcaaccgttggagggattgcacgaggcttgtccgcatcataaaggcgactggtattttagcggtaactaccctacaccgggtggtgtgaaaatggtgaaccgggcgttcatcgactatatagaacaaatgtatcaattctaacaaccatacaacgattcaataataagaatgagaaatgtgacattaatccttgacgacgggagccggttttccggtaagtcgtttggctacgagaagccggtggcgggcgaagtagtgtttaatactgccatgaccggatacccggagagcctcactgacccttcatacgccggacagttgatgacgcttacctatcctttggtaggtaactacggtgttcctccttttactatcgagccgaatggacttgccactttcatggaaagtgaaaagatccacgcggaagcgattatcgtaagtgactattcttatgaatacagccactggaacgctgtggagagcctcggtgactggttgaaacgcgaaaaggttcctggtatcacgggcattgacacacgcgagttgacgaaagttcttcgtgaacatggagtaatgatggggaaaatagtatttgaaaatgaagaattaagaatgaagaatgaagaatttccgtcttatagcgatataaactatgtagaccaggtttcctgtaaagaaattattcattatttccctagtggaacaagcagccacagcgcagctaattcttcattcttcattcctcattcttcattaaaaaaagttgtcctggtagattgcggtgtgaagactaatatcattcgttgtctgctgaaacgtaatgtagaggtgatccgtgtaccttgggattatgattataacggactcgaatttgacggactgtttatttctaacggaccgggggatccggatacctgtgatgctgcggtgcagaatatccgcaaggcgatggcaaacgagaaactgcctattttcggaatctgcatgggtaaccaactgctttcgaaagcgggaggagccaagatttataaattgaaatacggtcaccgtagccataaccaaccggtgcgtatggtaggcactgaacgttgcttcatcacttcgcaaaatcacggttatgccgtagacaataatacgttgagtgcagattgggaaccgttatttattaatatgaatgatggctctaacgaaggaatcaagcataaaagaaacccttggttttctgcacaattccatccggaagcagcaagtggacctacggatacggaattcctgttcgacgaatttgtaaaactattataacccatattcatcacggattataaaaaatctgtgttaatctgtgtaatctgtggtgaaccagaaagtagaatcaatgaaagaaaatataaagaaagtattgctgttgggttccggtgccctgaagatcggtgaggccggtgagtttgactattccggttcgcaggcactcaaagccttgaaagaagaaggcattgaaacgattcttatcaatcctaatattgctacggtacagacgtccgaaggagtggcggatcaaatctacttcctcccggtgactccgtatttcgtagagaaagtgattcagaaagaaaaaccggaaggcattatgctggcgttcggtggtcagacagccttgaactgtggagtggcattgtacaaagaaggtattcttgaaaaatataatgtgaaagtacttggtaccccggtacaagccattatggataccgaggatcgtgaacttttcgttcagaaattgaatgaaatcaatgtaaagaccattaagagtgaagccgtagaaaatgcggaagctgcgcgtcgcgcagcaaaagaactggggtatcccgtaattgttcgtgctgcgtatgcattgggtggcttgggctccggtttctgtgataacgaagagcaactggatattcttgtagaaaaagcgttctctttctctccgcaggtattggtggaaaaatctcttcgtggttggaaagaagtggaatatgaagtggtgcgcgaccgtttcgacaactgtatcacagtttgtaatatggaaaacttcgacccgctgggtattcataccggtgaatctatcgttattgctccgtcacaaacgcttactaacaaagaatatcataaacttcgggaactggcaatacgtatcatccgccacatcggtattgtgggcgaatgtaatgtacaatatgccttcgaccccgaatccgaagattatcgggtgattgaagtaaatgcccgtctttcccgttcatcggctttggcatctaaggcaacgggttatccgctggctttcgttgcggccaaattgggactgggttacggactcttcgacctgaagaactctgtaacaaagactacttctgctttcttcgaaccggcactggattatgttgtatgtaagattccacgttgggatttgggtaagttccacggtgtagataaagaattgggatcttctatgaaatctgtcggtgaggtgatggctatcggtcgtacttttgaagaagctatccagaaagggctccgcatgatcggacagggaatgcacggatttgtagaaaacaaggagctagttatttctgacatcgacaaggctttgcgcgaaccgactgataaacgtatttttgttatctcgaaggcttttcgtgccggctacaccatcgatcaggtacacgaactgactaagattgataaatggttccttcagaaattgatgaatatcatgcagacttccgaagaactgcatagctggggaaataatcacaaacaaatagccgatctgccaaacgaactgcttcgtaaagccaaggttcaaggtttctctgatttccaggttgcccgtgccatcggctacgaaggtgatatggaggatggtattctttatgtccgcaaacatcgtaaagaggcgggtattcttccggtagtgaagcagattgatactttggcagccgaatatccggcacaaaccaattatctgtatcttacttatagcggtgtggcaaatgatgttcattacttgggcgaccataaatccattgtcgtattgggatccggtgcttatcgtatcggctcttccgtagaatttgactggtgcggtgtgcaggctttaaatactattcgtaaagaaggatggcgcagcgtgatgattaattataatcctgaaactgtatctacggactacgatatgtgcgatcgcttgtactttgacgaattgacttttgaacgtgtgatggatattctggaactggagaatccgcatggggtaattgtatctaccggtggtcagattccgaataacttggctttgcgtttggatgcacagcatatcaatatccttggcacaagtgccaagagcattgacaacgctgaagaccgtgagaaattctctgccatgctcgaccgtatcggtgtggatcagccccgttggcgtgaattaacatctatggatgacattcaggagtttgttgaagaagtgggttttcccgtactcgttcgtccttcttatgtactttcgggagctgcaatgaatgtttgttccaatcaggaagaactggaacgtttcctgaaactggcagccaatgtatcgaaaaaacatccggtagtagtaagtcagtttattgaacatgccaaggaagtagaaatggatgccgtggcgcagaatggagaaattgtggcatacgctattagtgagcatatcgaatttgcaggagtacactccggtgacgcgactattcagttcccgccacagaagctatatgtagaaactgttcgtcgtattaagcgtatcagccgtgagattgccaaggctttgaatatctccggtccgtttaatattcagtatttggcaaaagacaatgatatcaaggtgattgaatgtaacttgcgtgctagtcgttctttcccatttgtcagcaaggtactgaagatcaactttattgaactggcaaccaaagttatgcttggcctgcctgtcgaaaaaccggaaaagaatcttttcgaattggactatgtgggaatcaaagcttcacagttctctttcaaccgtttgcagaaagccgacccggtgttgggagtagatatggcttccaccggtgaagtaggttgtattggtatggatacttcttgtgccgtattgaaagcaatgctttctgtcggctatcgtattccgaagaagaatatcttgctttccacgggtaccatgaagcaaaaagcggatatgatggatgcagcccgtatgttggtgaataagggatataaactctttgcgacgggcggtacgcataaagcgcttgccgagagcggtattgagagtactcatgtttattggccgagtgaggaggggcatccgcaggcattggagatgcttcatagtaaggaaatagatatggtagtcaatataccaaagaacttgactgccggagaattaagtaatgggtataaaatccgtcgtgccgctattgatttaaatattccgttgattacgaacgctcgtctggctagtgcatttatcaatgcattctgtacgatgagtgtggatgatatagctatcaagagctgggcagaatataaataagatgattatattctattgaaatgaaaagacaaaggtcgttcttattattcgagagcggtctttgtctattattgtagaaatacaattattcgattattcagttggaaaattaaatactcttggtctttatttgctgttttggacattttaatgtaacttgcgcgcttatttaaataatatttttttttacaggaggatgataggtatggataatcatgttgtaataatggctggtggcatagggagccgtttctggccgatgagcactccggaatgtcctaaacaatttattgatgtaatgggatgtggccggtcactgattcaattgacggcagaccgttttgatggtgtttgccccagggaaaatatgtgggtggtaacttctgaaaaatacattgatattgttcgggagcagttgccggaaatcccggaaagtaatattttagcggaaccttgtgcacgaaatactgcaccttgtatcgcgtttgcttgctggaaaatcaaaaagaagcatccccgtgctaatattgtagtaactccttcggatgcattagtcatcgatacgggcgagttccgtagagtgatggagaaagcacttcgttttacggatgatagcagtgctattgtcacaataggtattcggccgactcgtccggagacaggctacggatatattgctgctgccaaccagcttcaaacagataaagaaatttatacagtagacgcattcaaggaaaaacccgataaagagacagctgaaaagtatttggcggaaggtaattacttctggaatgcgggaatctttgtgtggaacgtgcgtactatcacttccgtgatgcgtgtatatgctccgggtatcgcacagatttttgaccgtattttcccggatttctatacggaaaaagaaaatgaaacaatcaaaaagttattcccgacttgcgaaagtatttctatcgactatgcggtgatggaaaaagcagaagcgatttacgtgttaccggcttctttcggctggtcggatttaggcacatggggagcacttcgcggtcttttgccacaggataaatcgggaaatgctactgtaggaaccgatatacgtttgtatgacagtaagaattgtattgtgcatgccagcgaagaaaaacgagttgtcgttcaaggactggatggatatatcatcgcggagaaagataatacattactgatttgtaaattggaagaggaacaacggattaaagagttctcgaaataaagattatttcgtttgctgatattcgtgtggtgtcattcctgtcattcgtttgatattcaattgaaagccggagttaagcactccggcattatttttataattgcacttcgatatttaattttccaccaagtccacgttctacaatatcaaataatgttttgagagtaatattttctccatcgttttcaacttttgatatgaatgtacgtttcttgtcaatgcgacttgcaagctctgcttgtgtcatctctaatttttctctggcacttcgtatcttaaagccaatgcgcaaagcctcaagttctcgctcaagcctgtctcgttccggtgctccaacttcaccgtaatactcatttttaatttggtctaatgtctttgtattcattctaaaatctccttttctttttctttataatagtcggtcataagccgttctgctctttttatttcttctggtggtgttttttgtgtctttttctgaaagccacttaacaaaacaaccaatttattaccgtcaaagaaacaaaaaatgcggaagatattattgcctagttgcacgcgaacctcaaatagtccattagtaccttctatgtattttagatatgtcgttgggattcggtctatctgctcgataatatctagcactttgatgattttatcgcgaaccttctgtggttgtttcttgaaaaaatcatcaaaatattctttatatgttatgacttctcttactttcattttacaaaggtaacttataaattacataaaagcaattttaggctactttttctttaatttttctcatcattttatccattatctcttcagaacattttgccaactcatagagagtgactgtattcaggaaatccctatctttgtctttcgaagaaaccaaagaaataatggatatgaaaagaatgattttcagtttctcctttttactgtatgtagcaggagcgtatgcgcagataacattggaagaatgtcagcggaagacgcaggacaattatccgctggtacatcagtatggtttagtggagaagacaaaggaatataatctggaaaatgcagccaagggatatttacctcaatttgctctttcggctaaggcttcttatcaaagtgatgtcacagaaattccggtaaaacttcccggagtagatttaaaaggattgcccaaagaccaatatcaggtcatgttggagttgcaacagaagatatgggacgggggaggaatccgtatgcagaagaagcagacgattgcagaggctgaagtggagaaagaaaaactgaatgtagatatgtatgcgctgaatgaccgcgtgaatgatctttattttggaattctcctgctggacgagcaaatcaaacagaatacattgttacaagatgagttagagagaaattatcgtcagattactgcttatgtggaaaatggaatagccaatcaagctgatttggatgcagtgaaagtggagcagttgaatacaaaacagaaaagaattgatttagtatcatcacgggcagcttatttgaaaatgctttcgctgttggtaggagaagcactgtctccggagacggtgctggagaaacctgtacctcaaagtacggtttcggctgtcagtgagattcgtcggccggagttggctttgtttgatgcacagggagccggactgcaagtgcaggagaaggctttgaatgtgcgtcatcttccgcagttcggactgtttgtgcagggggcatacggaaatcccggattggatatgctgaagaatgaattttctccttattatatagcaggtgtccggctttcatggaatttcggtagtctgtatactttgaaaaatgaccgtcgggtgatcgagaagaaaagacagcaactggataataaccgggatatattccttttcaatacaagactggaaatgacgcagcaggatcaggctatccattctttggagaagcaaatgcgggatgatgatgaaataatccggttgcgtacaaatatccgtaaagctgccgaagcaaaggtggcaaatggaacattgaccgtgactgaaatgttacgtgaactgactaatgagagcttggcgcgtcagtcgaaagccatgcatgagattcaacggttaatgggaatttatcaattgaaatatacaataaatgattaatataacttctccggatatgaaaagaataacaaaaataggaatgtgggggataacgctgatgatgttatctgcctgtggaaatggaacacctgattatgacgcaaccggtacatttgaagctacggaagtaatagtgtccgccgaggctgccggaaaattgctacgactggaagtagaagagggaacaaagctggaagcgggtgaggagatcgggttggtagatacggtacaattgtatttaaaaaaactgcaattggaagccagtatgaaatcggtagaaaaccagcgtcctgatcttgccaaacagattgccgctaccaagcagcaaattgtcacggcagagcgtgagaggaaacgggtggaaaacttgcttgctgcaggtgcggccaatcaaaaacaactggatgattgggacgcgcaagtcaaattactcgaacgacagctcgttgcacaggaatcatcgttgcgtaatagtacgaatagccttacagaacaaggcaattcggttgctatacaggtagcgcaagtggaggatcagttagctaaatgtcatgttcagtcacctatcgcaggtacagtattggctaaatatgcggaagccggtgaattggcggcgataggcaagcctttatttaaggtgggcgaagtggatcgtatgtatttgagggcttacatcacttccgaacagttgtcgcaagtgaaactgggagatcaagtgactgtgtatgctgactatggcaactcggagcagaaagcttatccgggggaagtgacctggatttccgatcgttcggaattcactccaaaaacaattctgacgaagaatgaacgtgctaatctggtatatgcagtgaagattgcggtgaagaatgacggagcgttgaagattggtatgtatggcggagtaaaattaaagaatgaagattaaaaattaaagtcagggagatggagaaggatgtacccatagtggttgtgaaagaagtcggcaagagctatggaacggtggaagcgctgaaagaggtttcttttgtggtagaacggggagagatctttgggctgataggtcctgacggtgccggtaagagtaccttattccgtattctgactactttgctgctggcagataagggaacggccacgatcggcggactggatgtggcaacagactataaacagattcgtacgaaggtgggatatatgcccggtcgtttttcactttaccaggatctttcagtagaggagaatctggagtttttcgctaccgtattccatacgactgttcaggagaactatgatttaattaaagatatctatcagcagatagaaccgttcaggaaaagaagggcaggagctttgtcgggtggaatgaagcagaaactggcattgagttgtgctttgatccataaaccggatattttatttctggatgaacccactaccggagtggatcctgtgtcgcgcaaggaattttggcaaatgcttcgtaacttgcgggaacagggtattaccattgttgtttctactcccatcatggatgaagcccggcaatgtgaccggattgcttttatcaatcatggaaagattcatggcattgatacccccgagcgtattcttctgcaatttgcatccatcctttgcccgccttctttggaacgggaggaggtgagacatgaaaccgctccggtcattgaagtggagcagctgacaaagtgttttggcaattttacagcggtagatcatatctcctttcaggtgaaccggggagagatatttggctttctgggtgctaatggagccggaaagactacggccatgcgcatgctttgcggattgagcaaaccgacatcgggcatcggaaaggtggcaggatatgatattttccgggaagctgaacaagtaaagaagcatattggatatatgagccagaaattttcgctgtatgaagatttgaaagtgtgggagaatatccgtctgtttgccggaatttatggcatgaaggaacaagagatagagcggaagacagaagaattgttggatcgcctggggcttgctgccgagcgggatactctggtgaagagtcttccggtggggtggaagcagaaattagctttttcagtttcaatcttccatgagccgagaattgtttttctggatgagccgacgggtggagtagatcctgctacgagaaggcagttctgggaattgatttatcaggcagccgaccagggaatcaccatatttgtcactacccattatatggatgaagcggaatattgtaaccggatatctatcatggtggacggtcagattaaagctcttgatacacctgcccgtctgaagcaacaattcggtacggaaacgatggatgatgtttttcagcaattagcccgcggtgcggtgcgcaaagcagattgattatgagacagtttatagcttttgtaaagaaggaattttatcatattttccgtgaccggcgaaccatgctgattttgttggggatgccggttgtacaaattatactattcggttttgccatcagtacagagatgaaaaatgtccggttggcggtgctcgatccttctaatgatgtggtgacacgaaagataattgatcgtttggacgccagtgagtacttcaccgttactgcacgttttcattcgccccaggaaatggaagctgcttttctgaagaataaggttgatatggcgattgtttttagcgaacgttttatagatgatctctatacgggtgatgctcgtgtgcagctggtagtagatgcgacagatccgaatatgtcgacttcgcaggttaattatgcaacgggaattgtttctatggtaggtcaggaaatgatgccgcccaatatgtcggctgcccgtttaacgtcggatataaaactgttgtataacccgcaaatgaagagtgcttataactttgttccgggggtaatggggttgatcctgatgctgatttgcgctatgatgacctcgatttccattgttcgtgaaaaagagacggggaccatggaggtattactggtttcgcctgtgaagccactatttattattttggcaaaggctgtgccttattttgtgttgtcgtttgtcaatctgatcactatccttttactttcggtctttgtgctggatgttccagtagtaggaagtttattctggttgataactgtctctttgttgtttatcttcgtatccttggcgttgggcttattgatttcatcagtcacgcgtacacaggttgcagccatgctggtttccggtttgatgttgatgatgcccacgatgcttttatcggggatgattttccctattgagagtatgccgttgatacttcaatggatctcggatatacttccggcacgttggtatattcaggctgtgcgaaagttgatgattgaaggagtgcctgttgtattggtatataaggagattggtatcttattattgatggcgacggtacttattacgatcagtatcaagaaattcaagtatagattggagtagataagaataatatgttaatgtgccaattggctgtgttatactacatggcattgacatataaacatatcagcaaattgaagaattatttatgataaagttcctgatagaaaaagagtttaaacaattgcttcgcaattcgtttcttccgaaattgattcttgtatttccatgcatgattatgctattgatgccttgggcggtaaatctggaaatcaagaatatacagctgaatattgtggataatgaccattcggctatttcacaacgtttagtgaataagattgctgcctccacttactttcgtttggtagaagtaccgacctcgtatgaagaaggtcttcgaaacattgaaattggaacggctgatattgtgatggaaattccaaggcatttggaacgggattggatgaatggagaggatgctcatgtattgatagcagccaatgccgtgaatggaacgaaaggcggtctgggtagttcttatttgtcttctatcattaatgattatgcagccgaactacgttcggaacatcccgaagcagctaccgtttccggcactttcccttccatacaggttgatacgcagggattgtttaatccgaatctgaactataagctctatatgattccggcattgatggtcatgttgttgactttgatttgtggtttcttgcctgcgttgaatgtggttagcgagaaggaagtggggacaatagaacaaatcaatgtgactccggttccgaagtttgtttttattttggcaaagctcctgccttattggctgattggttttctggtgctgacggtgtgtttcatattagcctggttaatttatggcatagtacctgtcgggcattttctgttgatttactttttcgcggttctttttgttctggtgatgtccggcttcggactagtcatttccaactattcagcaacgatgcagcaatcaatgtttgttatgtggttctgtttgttggtggtgattttgatgagcggtttgtttacccccattagcagcatgccggaatgggcacaaataataacgatattcaatcctttgaagtattttatggaggtgatgcgaatgatatatctgaaggggagtggtttctttgatttgctgccgcagttcggaatattgttgctttttgcagtcgtgtttaatagttgggcggtaattagttatcggaagaacaactgaagataataaggggtcagtccgaaaaccctgtgggtatgttatgttaataaggcggcattgcctgcaaagacaataaaaaacagctcgtttccctttaagggagagagctgtttttgatccttttcatcaccgtctccggtgaatagtaagtggttactgtattactttatttcgatttgtctatttggcttcttcacttcttcttcagagagtttcggaagttcgatatttagaacgccatgttctacagatgcagcaattttctctttgtctacattatccggtagaatcattgtttgctggaacttagagtatgagaattcgcgacgcagatagcgaccgtctttcttttcctccttgttttctgtcttcttctccatgctgataacgaggttattgtcttcatcaatgcgaacattgaaatcatccttcgtcatacccggagcagccaattccactttgtattctttttctgtttccaaaacattaattgcaggtgcagtagcatttgcttttaccatccaatcgttatcaaagaaatcattaaagatacttggtaaccaactttgagttcttctaacaggcatcataattttagtctcctatctttaagttaaacattcagttaattattcttgaacttcggtattttcacttctgatggtaccggttgtcccggtttacatcgtctgcttttgaaccgttgttcgcttctataagtgcaaaccttatgccaagtgatttttgagactaaaattgtctatttgtcattataataatgccaattttgcaataatgatgacaaaatgtattctatttttatttattttatataagatagatattaatttgataatatgtctatttcttctcgattagtttgaatctcattcttaatgtttgcctttcttcgtcatagtcatagctaatgattttgaaagttcccatttcagaagtatttgatacatgcaatccgatacaggcacaggcgtcataatctccaatgcggacaatgcgaagggtaggacttgcgtcagcaggtagtttgcttaaatctactatgtctttggcctgttcatgtgtcatatactcaacagtcacaggtaggttttgactaattgcttcatttactatctcttcaatggattggatctgttccgctgtcggacatgacgaaagtatataatcacatttgctcttttttctttcgatgtgggcattgcgagaacgtggacagccaaaggttttcaccatggttgcattaagtaaatgctctgctgtatgcataggaggatactcctgcttgttgtggtcgttgagttgaatttgttgttccataaattatttcaataactttttatttttgatatcttctagtatgctcatttgttgaattgctatttgatttaatttgataagtctgtctttgggtgtcaaaccttcatttatgaaaacggcatttaaattttccatgtttgataagcagataagttcattgattgaggcataatcacgaatattaccttttaaattagggtgtgtatcacgccattctaaggctgtcattccaaacatggctacattaaggatatcagcttcgctggcataaatcatggatgcttgctgtggagtgatttcttgagggataagatgctgcttgattgcatcagtatgaatatgataattaattttagatagttctcgctttgctgaccaaccaatttgagcttgctcttgctctttgagacgttggaattcttttactatatataactcaaattcaacagaaatccaacttgcaaatttgaatgcaatatctttgtgagcaaaagtgccaccatatcttccggatttggatatgagtccaatagcacaggtcgtttctatccatttttgaggagaaagagtgaatgcatttaaacctgcttcttttctaaacccctcgaattcgaggggtttaaaatgggggttatataatatttcccataatcctagatattcaatagtcattctattacgtagccagttggcaataacagtattagcatctgttgtcttgtatttagctatgtcggttaaagaaatataatctgtatcgttgatctttaagatagtaacgtctgtggtctgaactgtaatctttgccatattctgatttttcagtaaaggtaaagttatatttgggaataaagaaatgtatatcactttttattcaaggtatgttaaactcacttctaatatataggcataaaaaaaggagcaacgccttgctccaacctttgttaaccttaaatctaatactatgaaaaacacattgcaaagatacggactcttgggaaattagcaaataatccaagtaaaatagtatgttatataacatagattaagaaaaacttctttcgtcttaacggttattcgatattttgggcgtctatgtatggagtttttttatctttgcgcaaaatatcatattactaatacttaatataaacatggataaaagaagattaagccaatggatgttattggctgttgtttgcttgagtttctcaataggagaaagctatgcacaaaaaaatgattttggaaatttagctcgttattcaaaacaaaatgctgcacttccaaaggcgacgaagaaagacaaacgagttatttttatgggaaattccattacggagggctgggtacgtactcatccggactttttcaaatcaaacggttatatcggccgtggaatcagtgggcagacttcctatcaattcttgttgcgttttcgggaagatgtgattaatctttctcctgctttagtggtgattaatgccggaacaaatgatgtcgccgaaaatacacaaacttataatgaagattatacatttggaaacatcgtttctatggcagaattagcaaaagcaaataagataaaagtgattctgacttccgtattgcctgccgctgcatttaaatggagaatggaaataaaagatgttccacagaaaattaaatctttaaatgatcggatagaggcttatgcaaaagctaataaaattccgtttgttaattattataaggcaatggtggatgaaaatcaggccttgaatccccaatatactaaagatggagttcatccgacaggcgaggggtatgatattatggagccgttgattaagagtgcgatagagaaagcactctaaggtttattgatgtaaattttgaaatataaatgctgtctgataatcaagttgggcagcatttattgtgaatgtgcacttctatggatatagttgttgaaaaggttttagatgacgtatagacataaaaaaaggagcaacgccttgctccaacctttgttaaccttaaatctaatactatgaaaaacacagtgcaaagatacggagttttggcaactttgcaaattataagctgctaattggtgtttttataacactaattaatagattaaatcctgtgttacaggtttgttaagagttttatcctttggcaattctcatgtaatatatgaagagtgggagtttttacccccatttctctttcatcaaatcttccagtttcaacaactcgtcacggtattgtgcagcttcaataaattcgagtttcttggctgcttcttgcatcagtttgcgagtacgttcgatactcttttccatttgcgctttactcatatactgcactaccggatctgctgcaatgttcggagtagaaggttctacataagcatgtctttcttttagcagttcatccgcctcttttgcattaccgaataccgacaagtttctggcctttttaatctgttgaggagtaattccgtttgcttcattgtatgccaactgtttttcccggcggcgattggtttcgtcaatcgtcagtttcatgctatccgtcatcctgtccgcatacatgattaccttgccgtttacattacgggcagcacgtcctgcggtttgcgtcagtgaacggtgggagcggaggaatccttctttgtcagcatcaagaatagcaacgagcgacacttccggaagatcgagtccttcacggagcaggttgactccgataagcacatcatagattccttgccggagatcatccataatcttcacacgttccaatgtatcgacatcactatggatatagttacatcttacattattattaagaagatactctgccagttcttctgccattcgtttggttagtgtggtgacgagtacgcgttcttctttttcaatgcggagctggatttcttccattaagtcgtcaatctgattaaggctcgggcgcacttcgatgacaggatcaagcagtcccgtaggacgaatcacctgctctacgacgataccttcagactgaatcaattcataatctgccggtgtggcgctgacgtaaattacctgtttcgccatctcctgaaactcttcgaatttcaacggacggttgtccatagccgcaggcaatcggaaaccatactccaccagatttattttacgtgcacggtctcctccgtacatcgcacggatttggggtacacttacgtggctttcgtcaatgacaatcagaaaatcatccggaaagaaatcgagcagacaataaggacgggtaccggcagcacgaccgtcgaaataacgggaataattctcaattccggagcaatgccctaactcccggatcatttccatatcgtaagtcacccgttcatatagtcgtttggcttcatattctttaccgatagactcgaagaatgccacttgtttggttaggtcatcttctatttcgtggatagcacggagagtagcctctttggttgtcatgaacaggttggccggataaatcttataggcgtcaaatggagcaatggtgactcctgtaatcgggtctacttcttctataccatcaatctcatctccccagaaagtgacacggagcagattgtcggtataagccagatagatatccacggtatcacctttaacgcggaaatttccacggttcaagtcaatatcattgcggacatacaagctgtctaccagacgacgtaaaaagacattgcggtccatcatccgtccccgttctatttcaatgacatttttgtagaagtccgaaggatttcccataccgtagatacaagatacggaagaaaccactaccacgtcttttcgtccggagagtagggcagaagtggctgcgagtcgaagcttgtcgatttcgtcattgatggcaagatctttctctatataagtatcactgctcgggagataggcctccggctgataatagtcatagtaagaaacgtaatattctaccgcattattggggaagaaacctttaaactcactatagagctgggcagccaatgtcttgttatggctcaaaatcaacgtaggtttgttgatattggcgatcacattggcaatggtaaatgtttttcccgatccggtcactcccagtaaagtctgtgcgggaactccctgaagtaccccttcagtcagttgtgctatcgcttccggctgatccccggtaggtttgtaagctgatgttagttcataattcatagttaaatcctaaaaagtggagcaatattcggtaaaataatcgagataacaaatcatttttccaaataaatcctttactttgcaacatattaatatcaaaaaacagattcatacaactagtaataccagaaacacatgatttggaatgagagcattgagtgtatggaccgcgaaagtcttcgcaagattcaaagcatacgactcaagaaaattgtagattacgtctatcacaacactcctttctatcgaaagaagatgcaggaaatgggaataacccccgatgatatcaatagtatcgatgatattgtaaaactgccgtttaccacgaaacatgatttaagagataattatccgttcggactttgtgccgtgccgatgagccagattgtacgtattcatgcctcttccggaacgaccggaaagccgacggttgtcggatatacccgtaaggacttggcctcctgggcggaatgtatatcacgtgcttttaccgcttacggagcgggccgttctgatatttttcaggtatcatacggatacggactgtttacgggcggactgggagcacatgccggagccgagaatatcggtgcttctgttattccgatgtccagtggcaacactgaaaaacagattaccttgatgcatgatttcggatcgacagtgctttgttgcaccccttcttatgcgctttacctggcagatgcaattaaagattccggtttgccacgtgaagaatttcaactgaaagtcggtgcgttcggtgcggaaccctggacggaaaatatgcgtcatgaaattgaagagaaactgggaatcaaagcatacgatatttatgggttgagtgagattgccggaccgggtgtcggttacgagtgcgaatgtcagaacggcactcacttgaatgaagaccattatttcccggaaattatcgatccgaatactttgcaaccggttgaaccgggacaaacgggcgaactggtgtttacccacctcaccaaagagggtatgccattgctccgttaccgtacgcgtgatttgactgccttgcatcatgataaatgttcttgcggtcgtacattagtacgtatggatcgtattttgggacgcagtgatgatatgttgattatccgtggtgtaaacgtattcccgacacagattgaatccgttatccttgaaatggcagaatttgaaccgcattatttgttgatagtgggtcgtgaaaataataccgatacgatggagctccaggttgaagtacgtccggaattctattctgatgagatcaacaaaatgctggctttgaagaaaaagctgggaggacgtttgcaaagcgtactcggattgggagtcaacgtgaaattggtagagcctcgcagcattgagcgtagcgtaggtaaagcaaaacgtgtgattgataacagaaaaatataaataagtattaggtatacctaatgcttgttacctaatacttaatacttattacttaatactttaataaatatggtagcaaaacaactttctatctttttggaaaataagtcaggccgtttgacggaagtgactgaagtgctggcgaaagaaaatatcaatctttctgctttgtgcattgccgaaaatgctgattttggtattttgcgtggaatagtatctgatccggataaagcatacaaagctttaaaagataatcattttgcagtgaatgtgactgatgtagtaggtataagctgtcccaatataccgggtgctttggcaaaagtgctgggatatttatcagacgagggtgtatttattgaatatatgtattcgtttgccaataacaatattgcaaatgtggtaattcgccccagcaatctggataaatgtatcgaggtgctgaaagaaaagaaagtcgatctgctggctgcaagtgatttgtacaagctgtagatatagcagtaaacgataaacagggaacggtaaatagctgcgttgtctttgaatgggataacacatttgtttgccgttttttgctataaaaaacagtgacgctatccgatgtggatagtgacggtatacttcaccgataccgtcactatcccgggcatataccgtcactattttttttctgccttataacaagttcttttctgccttataacaaggaatctgatgtttgttcgtcagatttatgtcaatcatgatttctgtgtgattcgtttattacctgccgtttacagtttggtgtttgcaattcgacgtcattttctctccttttgtcgatgtttaacgccttttatgtattaaaaaacacagattaattgctaaattcccagcgaataagtaactttgcgcattatttttaaataggatgaagaaaaatatcattataactttgcttgcggcggctactctgacatcatgtggagagtacaataaattgctgaaaagcaccgattacgaatacaagtacgaagccgccaaaaactattttgcgaagggacagtataatcgttcagctacgttgctgaatgagttgataaccattctgaaaggaaccgataaagcggaagagtctttgtatatgttgggaatgagttattataatcagaaagattatcagacagctgcccagacatttatcacctatttcaatacgtatccccgtggcacttttaccgaactggcacgttttcatgcaggtaaagctttattcctggataccccggaaccacgtttggatcaatcaagcacttatcaggctatccagcagttgcagatgtttatggagtatttcccgaacagcacaaagaagcaggaagcacaggatatgatttttgctttgcaggataagctggttttgaaagaactttattctgcaagattatattataatctgggtaattatttaggcaataactatgagtcttgtgtaatcacagctcaaaatgcactgaaagattatccttatactgactatcgtgaagaactttccatcttgattctgcgtgcaagacacgaaatggctatctatagtgtagaagacaaaaagatggatcgttaccgcgaaacagtggacgaatattatgctttcaagaatgaatttcctgaaagtaaatatttgaaagaagccgagaaaatattcaatgaatcacagaaagtaattaaagactaaatttaaatagatttatggactacaaaaaaacgaatgctcctgctacaacagtaacccgtgacatgatggaactctgtgctgatacaggtaatgtttacgaaactgttgccattattggcaagcgtgctaatcagatcagtgtagaaatcaaaaacgatctttcaaagaaattggcagagtttgcctcttacaatgacaacttggaagaagtgtttgaaaatagagagcaaatcgaaatttctcgttattatgagaaattgccgaaaccggacttgattgctacgcaagaatacatcgaagggaaaatatattatagaaatccggctaaggagaaagaaaaacttcagtaatttattttctgacgaagaatttgatagtcaagtagtaagtgggatgattatccctactccttattgcttggctattattgtttaactcaactactatttagaatacttatgattcaacgaattcaaactgtttatttattgattgttgcaggattgctgattacagctatgtgtatgccgataggttacttcattgatacaatgggcgaacatccttttaaggcattaggattggaaataaacgacgcttttcagtctacatggggtttattcgggattctgatgcttagtactatcgttgccgtggctaccatttttttatataagaaccgtatgttgcagattcgcatgacgattttcaatagcttgttgttggtcggttattacattgctgcccttgctttttattttgcgttgaagaatgatgcaaatatgttccgggtaggctgggcgttgtgtttaccacttatttccatcattctgaatatactggctgttcgtgctattggacgcgatgaggtgatggtaaaggctgcggatagattgagataagacttttccctatatctgggtaattcgttaatatgattaatgaaaagcatcgctttataagagttaaagcggtgctttttgctctctaaagctatgctttagcatccctaaaacggtgcatttactgaatatccctgttttaaagatacaaataaggcaactaattcattgcgagttagttgccttatttatttaaagagtatccctaaagcgatgctttgtagatatttaagctccttctctcgaaagggaggagggagaggattttatttcttcaagtcaaataggtacgtgagctttatggtaattgttccatgcgctgcacgggcgaaatagtctttctttgtggtgctgtaaaagtcggacagcgcaaaatagtaacggccttcaacgatgaagctaccggctttctttgttcggagttctacaccgccgccaccggcaataccgtagtcgaatttattctgaatcttaactccatacaccgctttctgtgtattggataaggtgttcatatcaataccttttattgtttccgattcgcttatcagaaagctgatttgaggacctgcatgaacaaagaattgtaatcctctgtctcgtccgaaagcaagatgggctagaaaaggaatatcaatataggtcattttgcgggtataagttttgctcggatccttcgaggtgacttcatatccgttatcgtccaatgataccgtttcaaacaattggtcccaacccctttgtgatacattcaattcgacttgtgcaccgcaaatcatggcaaaatacttctcggatatataacgtgccgtcaagcctccggtaattcccatcaagctattttgcttgatgctgggagtgaaagaaacactgtttaagttgacacctccattgacacctactgataaattgctgcgtgcttctccaatttgggcagtggcaggaagagcaaatcccgtaagtaggagtgttgcaatcaaaaatggttttatctttatcattttcgtattattcgaagtcaagttttactaattcaaaattcttagtgaaacgtataaagaacactttcttgttaataaatcctccccagttgttcacgcgctggaatttgaatcctgtctggattggcgtcaggttcatcttaggcagattgttttccaattccgagccatagagcgataatcccttcaagaagaagaaaccggtgtcgaagccaagcattgcgtaattggggtatttgcttgccaaatctttactataccatttatgataagcgttggtgaattgcacggctgccgggaacaatgtattcgtatagaatgaagagtagaaatatacatccaactcaaagaaattttccagatgatctctggtgtaagtctgccattccgggtagccgaacaggtgaattttttctgcaggattctctctgactaacaacgttagttgaggaagtaccttaatcagtaaaacattactgcccgatgtcgggataaaaatgttttctttatcactgcgaagtgttgctttcaatgtttctttagttgcgctttcgctgacggttctcataggaattcctttgctcttcaactcttgtttcaagccgctgataaattccgctttctccttgtcagcactcgacggttcgatgaaaataacgttcgcattagggaattggcgggtgaaatgctcataaacctctgaatataaataagattgaggcgtattaatctgataaatagcaggatttttgaatacctcttctcctttttgagagaaagggatcaccaggcgtatatcgttcttctccgcgaagtctgacaatggttttatttgattctgatgcatcggaccgatgatgatattcatactcttcatctcgtttttggcaagaatcgtatttaatgtagaaatgtcttttccactgtcatatacatataaatcaagagaaacgcccgtacgtttcagactgtctactgccatcaggaaaccttcgtaatattccaccatgcgtttgtcttcctggaaaggcaacaacaaggcagccttaatggtagacaatttttggggagtctccttatttttgcggaaaagctcgctattgctgggaggaacagcgtatggatcttccttctgtgtaggttgtacggtggttgctgccgggtaggggatgcaaagaaattgtccctttttcatgccctttttcagttccgggttagcgtcaatcaactcctgctcgctgattccgtattcacggctcacgctgaatatagtctctttgcgctttaccttatgcatatctttgcatctcggaacgacaggaccttgaatagtcgattgttcagtaggcgtttgaactacggcgtcagtttgttcttcttttttctgcggaatcagaataacttgtccgatacggaaattctcggcactcaaacctgggtttgcttcacaaatatctttggcggacacattatacatcgttgtcagtttgtacaatgtttctccggcttggatcgtatggaatgtttctcctttctggctttctttcccggtaggaattttgatagtttgtccggcgtagatcttttcgtcacaaccaggattcagacgtatgatgtctgacgtagtgacattatacatcttggaaatggagtataaactttgtcctttttcgatggtatgcaagaaataagattggttttcctgtgcataactgatagcgtatgaaacgcttataaaaagcagaaataagaatattcggtttatcggtttcatcaaattataactattggttcttgaaatcaaggaacaaaggtacaaataatgccctatatcttcataagatttgagttaagaaaataatattgtgcttttttaggagcatatttcgggcggaaacattaattttgcaacatttatggaaggatatgaatatgcaggaaacagaatatattaatgtgtacggtgcgcgcgtgcacaatttgaaggatattgatgccgagattccccgtaacagcttgactgttatcaccggattgagcggtagtggaaaatcttctttagccttcgatacgatttttgccgaaggacagcgccgctatatcgaaactttttcagcctatgcccgcaatttcctgggcaatctggaacgtccggatgtcgataaaataacaggcttgagcccggttatctccattgaacagaaaacaacgaataaaaatccccgttctaccgtaggaacaactaccgagatctacgattatctccgtttgttgtatgcgcgtgcgggaatcgcttattcgtatctgtcgggggaagaaatggtgaaatataccgaagagcagattctggatttgattctgaaagattataaaggaaagaaaatatatttgctggcgccattggtacgttcacgtaaaggacattatagagaactttttgaacagatacgtaaaaaaggatatttatatgtacgagtagacggagaagtgcgtgaaatcacacatggtatgaagctcgaccgctataagaaccacgatgtagaagtggttatcgataaattagtggttgcagagaaagacgaccggcgtctgaaacagagtgtggcaactgccatgcgtcagggagacgggctgatgatgattttggatgcccagtctgaaagtatccgacattatagtaagcgactcatgtgtcctgtcaccgggttgtcttatcgtgaacctgctccgcataacttctcattcaattcaccgcaaggcgcatgtccgaagtgtaaagggttgggagtagtcaatcagattgacgtggacaaagtgattcccgatcgtgaactttccatttacgaaggtgcgatagctcctttgggaaaatataagaatgcgatgattttctggcaaatcggtgctttgcttgagaagtacgatgtaacgttgaaaacaccggttaaggagttgccggacgatgcgattgatgaagtgttgtatggctctgacgaacggattaaaatcaagagttcgctgatcggcacttcatctgattactttgttacctatgaaggagtggtgaagtatattcagatgttgcaggagaaagatgcttctgcgacagcgcagaaatgggcggaacaatttgccaaaacaacggtttgccctgaatgtaaaggggctcgcctgaataaggaagctctgcatttccgcatccacgataagaatattaatgaattggcaaacatggacatcaacgagctgtatgactggttgatgaaggtagatgagttcctttccgataagcagaagaaaatatcagtggagattctgaaagagattcgtacacgtttgaagttcctgctggatgtcggtttggattatctggcgttgaaccgtagttctgtcagcctttccggtggtgagagccagcgtatccgtttggctacacaaattggttctcaattggtgaatgtgctttatattctcgacgagccgagtatcggtctgcatcagcgtgataatttacgtcttatcaactccttgaaagaacttcgtgacatgggaaactccgtgattgtggtggaacatgataaggatatgatgctggctgccgactatgtcatcgatatgggaccgaaagccggacgtctcgggggagaggttgtttttgcaggaactccccaggagatgctgaagaccgatacgatgacttcgcaatacctgaatggaaagatgaagatagaaatccccgccaagcgtagaaaaggaaacgggaaatctatctggctgaaaggagcgaaagggaataacctgaagaatgttgatgtagagtttccgttaggtaaactaatttgcgtgacaggtgtatcaggaagcgggaaatctactttgattaatgaaactctgcagccgattctatcgcagaagttctaccgttctttgcaggatcctttggaatacgattcgattgaaggattggaaaacatcgataaggtagtgaatgtcgatcaatcacctttgggacgtacgccacgttccaatccagctacctataccggtgtgttttctgatattcgtaatctgtttgtaggtcttccggaagctaagattcgcggttacaagccgggacgtttttcctttaatgtttcaggcggacgttgtgaagcctgtacgggaaatggttataaaacaattgaaatgaatttccttcctgacgtatatgtgccttgtgaagtatgtcacggcaaacgttataaccgggaaacactggaagtacgtttcaagggaaaatcgattgccgatgtattggacatgacaatcaaccgtgccgtagaattctttgaaaacgttccgcaaatcttgagtaagataaaagtattgcaggatgtcggactcggatatataaagttgggacaatcttctaccactctttccggtggagaaagccagcgtgtgaaactggcaacggaactgtcgaaaagagatacaggcaagaccctttacatccttgatgaaccgactaccggacttcattttgaagatatccgtgtactgatgggagtactgaataagcttgtagataaagggaatacggttattgtcatcgaacacaatctggatgtgattaaaatggcggattatattatcgatatgggccctgaagggggtaagggcgggggagaactccttagttacggaacaccggaagaggttgcgaagagccctaagggatatacacctaagtttcttcgcgaagagctagggctctaatttgaagcatagagtgagggcgttcccccaataaagtcaactatctctaatcatattaattaaggcgcggattacatggtttttatttaattagagccgtgtaatccgtgccttaataaaagtcatagaggactttgtctcccgctaattctttatttatcagatatagaaagtataaatacaacgaaaatgaaaatcaataaaacaaatgccgcacggctgttagataaggctaagatagcctatgaactgattccctacgaagtggatgaaaacgacttaagtgctgttcatgtagcagcagatttaggagaaaacatagagcaagtgtttaagactcttgtcctgcatggcgataaaagcggatattttgtctgtgtcattccgggagaacatgaagttgacttgaaactggcagctaaagcttcgggtaataagaagtgcgatttgattcccgtaaaagaacttctgccacttaccggatatatccggggaggttgttcgcctatcggcatgaagaaacattttcctacttatattcatgaaaccagccgggaatttccgtatatttatgtaagtgccggggtacggggacttcagataaaaatagctccggaagatttgattcgtgaatccagagcagaaatttgtcgtttatttgaggagtagtttaacaaatcattgtgcaaaaactcaagaaaaagtatatatttgcaagaaatatttatttaaatcaatcatttattaattctaaaaacttatatctatgttcagtaaacaccctaaaggtctgattgctgcagctttagctaatatgggagagcgttttggcttctatattatgatggcgattttgacattgtttatttcagcgaaatttggattgtccgagacaactaccggatacatttattccgcgttctatgcttccatttatattttagctttggcgggaggtgttattgctgataagacgaaaaatttcaaaggcactattttagtagggctgatattaatggctatcggttatttgattattgccattcctactccgacccctgttcctagtatggctctttacttgggattaacctgtttcggacttttggtgattgcttttggtaatggtttatttaaaggaaatctgcaggctttggtaggtcagatgtacgatgaccctaaatattcaaacctacgtgatgccggtttccagatattttatatgtttatcaatattggagctgtttttgcaccgtttattgctattggtgtgcgcaactggtggctgaaggtgaacaactttgattatgatgctactttacctgaattgtgccatcaatatttagaaaaaggaaatgatatggctccacaagcaatggagaatctgacaactttagctaagagtgctgttcttgacggaactcctgtaacagatatgggtgtgtttgttaataactaccttgatgtgtttaaccgtggttttcagtatgcttttatggctgctattagtgctatgcttgtttcgctgattatttatatggcaaataagaaacgcttcccggatcctgcgactaaattggaaaccagtaaaggtactgcgactgtgaataaggaagaaatccaaatgagcgctactgaaatcaaacaacgtatctatgctttgtttgcagtattcggtgttgttattttcttctggttatctttccaccagaatggttattctttgacttattttgcccgtgactatgtggatttgagtgttattaatatcgacttaggttttacgcagatcaagggagctgaaatattccagagcgttaatccgttcttcgttgtattcctgactccatttatcatgtggatgttcggctcaatgaaaaagaatgctaaagaaccttctaccccgatgaagattgccatcggtatgggtattgccgcattagcgtatgtattcttgatggtattctcctttacattgccttcgaaagaggtgttgggtactatgagtgctgctgaaataaatgctattcgtgtgactccgtggattatgatcggtctgtatttcatccttacagttgccgaattgttcatttctcctctgggattatcgtttgtatctaaggttgctcctcctcatttgcaggggttaatgcaaggttgctggttggctgcaacagctgtgggtaattcactgctgtttatcggtggtattctttatacaactgttcctatctgggcttgctggttagtatttgtaggcgcaacaggtgcttctatgattgtaatgctttcaatggtaaaatggctggaacgcgtagcgaaatagaatccggtcattgactaaataacaaaatgccccggaacattcacgatacttgttccggggcattttggtttattaaatatccaatcccataatataatcattcatataatacccattgccaatcgggaaatcaccttcccgtaactttctcattcccatgtattcgtaaaactgcaaggctttattgttacgattcacgttgagttccatcagacaaggttctgggtgtatctccttgatgcatttgattgcttccttaaataagaaactgccgcaatgcgtaccctgaaagcgggggagaacatagattttctgaagatggaatacatctttttcctgttgctgcacagagacgtatccgcatggctcattctctttataggcgatggaatacacatgcccttcttcctccatttgcttgcgcacattggaaggagcatacatccagtccatcatataatccagttgttcaggagataaaatatccttgtaggtggcggggaatacctcctttgccatcatatgaataagctcgcaatcggctaccgttgcttttcgaattgtaaacatacgtattttctattttatggtttaacgggcacaaatatagccattatttctttttataataaggtaagcactctctaatgttttaattattattaatttatagtactttgtaatgcaaggtacttaagtaatgcatatatttgtgctatctaaaagaagtgaataatgaaagtagacaatgtaaaatcacagatgaggaaaggcatgcttgaatattgcatcatgcttttgctgcacaaagagcctgcctatgcttctgatattattcagaaattgaaagaagcccagctgattgtagtggaaggcaccttgtatccgttgctgacccgtctgaaaaatgacgacttgttaagttatgaatgggtggaatctacccagggacctccccgcaagtactataaactcactgaacaaggagaaacctttttgggagaactggaaatttcctggaaagaacttaacgacacagtgaatcatatagccaatagataattagaaaaagaagaaataaaaatgaaaaagacattgaccataaatttaggaggaatagtttatcatatagatgacgatgcctaccgactgttagacaattatctgtctaatttgaaacattattttcgtaaacaggagggtgcggaagaaattgtagacgatattgagatgcgtattgctgaactgtttgccgagaaagtaactgaaggaaaacaggtcatcacagtttcggatgtagaagaaattatcgcccgcgtaggcaaaccggaagattttggcattgctgacgaggatacagattcacagaaaagaacggagcaagcatcgtccgctaatcaaagtaatacgcaaacctctgcccaacgtcgctggttccgtgatccggataataaattgttgggtggtgtggctgcaggactggcagcttacttcggttgggacatcacattggtgcgtatcctgatgattattctggtgtttgtaccttattgtccgatgattatcctttatattatcggatggctcgttattccggaagcccgtaccgccgcagaaaagttaagtatgcgtggagaagcggtaaccattgagaatattggcaaaacagtgacagacggcttcgaacgggtagcagatggggttaataattatgtgaactccggtaaacctcgtacctttcttcaaaagataggcgatgtatttgtttccattgctgccgttctctttaagatatttctggtagctcttgttattctttgttgccctgtcttgttcgtattggctgtcgtattggtagcgttggtatttgcggcaattgccgtggcagtcagtggaggagctttactttatgagttgttgcctgccatcgactggatgccggttgcttccgtctctcctatgatgacattattaggtacgattgccggagttgccctcatcggtattccattaggagctttcttgtatactatcttgcgccagctattccattggtcgccaatgggaacaggtttgaaatggtcgttactgattttatggatattgggtgcggtcattatggttatcaatctttctgctcttggctggcaactgcctctgtatgggctacactgctgttaactaagcctcattctattaaaaaaggataatatttattcttttataagtaaatgtaccccgatagtgtgtccggggtacattttttgttttcccttattcatcgtaaatcgagattttttagtaagtttgtaaatacgtattcaggaaataaaatgggtgaacatatatgttttaggagaaacgaacgtttagcgacagtcaatccttattggagaggaaatccgatggtgcgcggacgtttttttaacaggcagcatcgcttccgtccggggatgggcagcgtgttgaaatggcgtctttcgcccaatccccaacgcaaagagaagaagacggtgaaatgggacccgaaagtttgttatcttcgctcattggatgcggtggtaggagattctctgatatggctcggacataattctttctttcttcaattagcgggtaagcgaatcatgttcgatccggtgttcggcagtattccttttgtgaaaagacagagcgaatttcctgctaatcctgatatatttacggagattgattatctacttgtcagccatgaccattttgaccatttggataaacagagtatagcatgcttactgaagaataacccgcaaatgaaacttttctgcggcttgggaaccggtgaactgattcagggatggttccctgaaatgaaagtgattgaagccggatggtatcaacaaatggaagatgaaggattgaagatcacgtttctgccggcacaacactggagcaaacgttccgtacgtgatggcggtcagcgactgtggggagcttttatgctgcaaggaaatgggatttctctttattatagtggtgatacgggttattccagccattttcgtgagattcccgatctgttcggagcaccggattatgctttgttgggcatcggagcatataaaccccgctggtttatgcgtcccaatcatatatcgccttacgaatccttgactgctgccgaagaaatgaatgcaggtcttaccattcccatgcattatggtacattcgacttgtctgacgagcctttgcacgatcctccgaaagtttttgcagcagaagcaaagaaacggaagattccagtggagattccctatttgggagagattgtaaaattgaaaaaacagaaataattagataagtacctgccatgaattaatcgttatttttctaggtacggatttcacggtttttagtgttgttattgttgcaaagtaaccgtgttaatctgtgtaatccgtgcctaaattattatataaactaattatgaatacatatttacgaataaagagatgaagaaattagaagtaaaagacctgaaagaaaactttttcgaagcgatcggaaaagagtggatgctggttacggccggaacaaaagagaagtttaacacgatgacagcaagttggggtggcatcggttggctgtggaacaagcctgttgctttcgtttttatccgtcccgaacggtatacgtatgaatttgtagagaagaacgatcacctgactctttctttcttaggggaagaaaataagaagattcacgctatttgtggttccaagtcgggacgtaatatagataaagtaaaagagaccggattgaaaccagtgtttacagaaaatggcaatgtgttgtttgagcaggcacgattgagcctggagtgtaagaagctttatgctgacggtatcaaaccggaatgttttctggataaggaatcattggaaaagtggtacggtggtgctcatggcggtttccacaagatgtatattgtagaaattgaaaatatttattcggagtaagatttagccgatttatgatggatgcaatggagaaggctctgaactcaagtagattgagaacagagccttcttttattttactttattggaaagtcgttaagcacagattatatgaaatatgcagttttagtgaatcaaatgactgtgagattcgtataatccgtgctttaaaattttacttagatggagctttcttcacccatttgtccagccattcgaagaatgtgcgttgccatagaaccccattctgcggtttcaatacccagtggttttcatctggataaatcagcaactctgcaggaacaccacgcatcacggcagcatcgaaagcagccattgcctgattagccaaaatacgatagtctttttctccatgaatacagaggataggcgtatcccatttctccacgaacaggtgaggagagttggcaaacgtacgttgtgccaccgggttttgtttttcccagtatgcgcctcccatatcccagttggcaaaccatttctcttcagtttccagatattgcatttccatattgaagataccgtcgtgggcgatgaacgctttgaatcgtttgtcatgatgtcccgccaaccagtatacggagaatcctccgaagctggcacctacacatcccaagcgatctttgtctacatacggctcttttgccatttcatcaatagcagtgaaataatccttcatacactggccaccgtagtcaccactgatctgttcgttccattccacgccaaatcccggcaagccgcgacgattcggagcaacaatgatataatcattggctgccataatctggaagttccagcgataagaccagaactggcttaccggactttgcggacctccttcacagaacagcaaagtcggatatttcttgttcggatcaaactgcggaggatagattacccatgtcaacatctgtttgccatctgttgttttcatccagcgaccttccactttacccatttccaactggtcgtagatctgcttgttttcctgcgtcagttgagtagtagagccatccagtgccactgtataaatctcatcacccatgctcatagaatgacgtttggcgatcagtttatccccgaaaagagctacactttcataatcgtacattcctgaagtgattgcctttaccgaatcattggctaaatccagcgcataaatctgcgattctccgtgccatacccctgtgaaatagatagtcttggcatctgcaccccagacaaaagcgtctacattcgattcgaatgctttgctcacaaaacgtttctctccggtttccaggttcatgatgaacagacggttcaaatccgcttcatatccgtcacgttccatgctctgccaggcaatatacttgccatccggtgaatattgcggattggtatcgtatcctttgttctcttccgtaatattttccgtcttcttggtgttcaagtcatagatataaatatcggagttggtggaaatcgcatattccagtcctgtctttttacggcaagtgtaagccactttgtccgaagtagtattccaggcaagttgctcaatgccaccccagggtttcattggactttcatacggttctccgttcaggatatccacgatattggaaataccgttaccgtcgaagtcggcaacaaaaggatgtggagctgtcgtcacccattcatcccaatgtttgtacatcaggtcggtcacgatgatacctgtggctttcggcaggtccggatatttatcagcagtgctttctttcgtctttacttgtgagataaacagtagctttttgccatccggcgaaatggaataaccttcgatgtctccgtcgtatttggtcaattgcttgcgcccgctgccgtccgggttcatttcatagagctggctgcttccgttgtcattacttaagaatgcaagtttggtgcctcctttaatccatgtcacttcattttcctgatacggggtatgagtgatttgctggttttcgcttccgtctgcgttcatcacgaaaacttcgcggttactcttgttttccggtacactgtaatacgctaccgtatacgcaattttctttccgtcgggcgatacggcgaatccgccgatacgtcccatagcccaaagtgcttcgggagtcatgcgcttcccttcgatcttaatatccgatttctcgataagcacctgatctgttttgcctgcgtctttggttcctccgcaggcagctaacaacattgctgccgacatcataaataaattagcttgtctcatatattttataaaatgtttattttcttgcgaagatagtgaaaaaaggatttaaatcttctttttctgccagtttcctttcttcatataccagtagcagaacaacagtataaaagtaccgtacacacattctgtcgtccaggcaaatgcgacatccattcgcagatacatgatgaaatatgcagagtatgtgacatagatagccagtacacagagttccatagccaatgcagtccgcgtgtttcctgttcctgataccgattggaaatacacattggcaggcaccagtaccagataggcagagcatagtacccacagtgaaggtatggatgccgctcttaaatccgggatgtctgtataaatgcgcagaatcagatccgggaataagcagaagaataccaggatcggcaatacaaagatatatccgatacggatatgctgtttgatagttccccgtacacaatcctgttcgcctgcaccgatcaggttacttaccagcgaaccgcaggtggaagcaaatgccattgcaatcataaacggtatccccgacacgttacggatgatgttggcaatcgccaatgaccgctctcccaaatgttccacaaacaggaagaacatgaaccaggtagacaaagaaacgaaattctgaatcattgtccacacagaaacattcagtatgcgtttcagtgtttttccatggaatttgggcaatatgttcaacgcatatttcttgcagtcaattcgtttccaggtatagatgatgaagaaaatcaccgataccatttcggccagtgacgaaccgatggcagcaccggcaattcccagttgcgggaagccgaatttaccgaagatcaggatatagttgaataccacattcgaaagcaccattacgatagagttcagcgtcagtgttttggtttgtgtcgtacctacaaagaaggcgcggaacatgaccatgacaaaagagaagaagaacccatacacacgccaatgaatataactttcggctgcatcgtaaatgtgaggagacgaaatgatattctttaagatatatggtgaaaatacgatggagaatgtgaataaaatcactgccatggcaagcaggaaataaatgccctgatagaaaatcggtccgatttccttgtagtttccttctccgttgcggcgggcgattaagatctgtgcgccgatgctgaagccgaatgccatcatgaagatagcaagatagtatacccctgcgatagcagaagcacccagctcgatttctcctacacgtcccaggaaggccgtgtccgtcatgccgatcatttgctccataatcagactgatcaggatagggaaggtgatcgtccagatttgtttatacgaatatttagttttcatcttattatattgtttagagaaagaaagtcgggcaaccaaaatagggtgtccggctttcttagaatatgattcaggaataattccttattttttattctgtctttgctgctgcagtagctcttgttgcttttgcatcgcttccaggcgggcagcaaatccggtctttttcatttgtttcgggtccttctttttcgcttcaagaatagccagcaatttagtttcgtcggtcgttttacgaagcagaatcatagtacccacgctaatcagcgttgacacgaagtagtaatagttcaaacctgacggatagtcgttcaagacaaacaagaacataatcggcatcagatacatcatccatttcattgccgccatttgtggttgcgctccggtatcctgcatagacatcgtatacttcgtgttcaagatgtttgtcaccgtcatcagcaagcagaacaagctaaggtggttgcccaggaacggaatatggaatgggaatgtgatgatagcgtcataagtagaaaggtcgtccgcccacaagaaactctgttgacgcagctcgatagcactcggcacgaacataaacaaagccatcaagatagggaactgcaataacatcggcagacagccgcccatcgggcttaccccgtactggctgtaaagacccatcacctcctgctgtttcttcattgcatcttcctgcttcggatatttcttgctgatttcgtcaattttcggtttcaatacacgcatcttggcagaagacatgtacgtt

SEQ ID NO: 8105 - DNA, 1983 bp, Unknown
  gut microbiota DNA sequence
ccggtagctcctgatatagaggtgactttgcctttaaactctttatcgctaatggcatctactgtgacaaatacttcctgtccgatatgcaggttctcgatttgtgtctccttataattggcaacgatccatttctgggtatcgggaagaatataggtgatggtctgccctgccgaaataaactgtccttcctctaatgagcgacgaccgagctttccgtcacaaggagctattacaaccgtataggaaagattcaaccgagccatttcaagcgcagctgttgctctttgaatagccgcttcggtattcatgcgacggtaagacacttcatctacaccggaaagagctgcttttttctgccttttcgtagcttccagtttcttacgcgtagcgtcataatcagtgacgatctgctctagttggataggagtagccgcatttcgtttcacgaggttctcataccgtttccggtctttttccagtttcgtcaaccgtacttcaatctcggcaatagacgcatcataaacagatgctgttgtctgcgtggtattgagtgttgcattgatgactgtcgcaccggcttgcgcatccttcaaggcagcttcagcttccattacgcggattttatattcacgatcatccagtatcagcaaagtatctcctttatgtacctcctgatgttctgtaaagtagattttgtcaatgtaacctgaggcacgcagattgataggagacacatattgttctatttgtgcatcgttactagtctccgtctggctataactcaaaaaaaggcagatcacttcaatcactccccaaacaataatagccactccgagaagactgatagcaatctgccagcgacgaagtttcttcattttttttgctttctcctgatgagtagcggaaggaatgttattttccattgtttccatatttatgattgttatttgactaatgattctatttgtccggtcagtttaagcaacatcaggttagtcacccgatagttataatgtgcgctgatatagttgttttgagcttcgctcatctgcatttcatcttgcagcacttccgtcatagaagcaatgccttcccggtaacggtcagaagtgactgcgtacacatcttcggcaagcaagtagttatccttctgtttcttaaagttacgctgattgttcatcaggtcgttcacagcattcagatattgagtttgcaaattcttccgggcatcttcccatgccagtcttttgttctctatatcgatcatcgccttctttattttataggttttatccagtccgtcgaaaatcggaatacgcaaggttagccccactccataggaacgaaaccattgattggacggaccggagtggaaccaatgataacctttatccgtatatgcagcatatcgccagctacctgtcagactaagggaagggatatatccattagtaatgatcttcttttgccgttccgccagttgcacttgcgattgtgagagttgaagttcatagatattttccgacaagccggtcagggctaccgtagtaatgctatcggtatttaccggtgtcaacgcgatttccttttcagccggataatccataatgtatttcagcatattcaattgctgtttcatcattgcttgtgcattgtcatattgcaccttcagattttccaaattgatattgactcttttcagatcgacttccatagacattccattatcgaagaaagcctgtgtaatatctctcaattcttccagacgggtgatatttgcttttatcagcatgatttgttcggccgtgacttgtccgagataatacatcttactgatttgaagaataacatcttccctggcttttccataagacagacgactgatttcttccatcactttagctatggacatagaagtataaagagtctgattgaaaagcggcatctgcatttccagtcctgcattagcagaatgttgca

SEQ ID NO: 8106 - DNA, 9795 bp, Unknown
  gut microbiota DNA sequence
cgagggttccacctcttcccattccgaacagagaagttaagcctcgtcacgccgatggtactgcgtaacagtgggagagtaggtagccgccgttttaaagaagcctcgcttgtctattgacgggcgaggctttctgtttttattactttggtatttataccgccctttttagcagatacaaacctcataatacctattaaaaaagtgaatatttactgataatttgtatgttatgaggatatttatttgtatctttgtcgcccgaattgtaagctaacgatttaaaaaagagagaagctttgggaaaatttgataaatacaaaattgacttgaaaggtatgcaagcagactctgctaagtatgagtttgtattggataacctttacttcgctcacattgatggtcctgaagttcagaaaggaaaggtcaatgttacattgactgtgaaaagaacctctcgtgctttcgagctgagtttccaaactgacggtatggtatgggtaccatgcgaccgttgtctggatgatatggagctacctatcagttcttctgataaactgatggtaaagtttggtcatgaatatgcagaagaaggtgacaacctgattgtgattcccgaggaagaaggggaaatcaacgttgcatggttcatgtatgaatttgttgcgctgtctattccgatgaagcatgtacatgctcccggtaagtgtaataaagcggtaactagtaaattgaacaagcatttgaaaacaaatgcaaatgaggatagcgatgatactttcgacacaggtggagatgacatcgtaattgaggaagaagtggaggaacaaattgatcctcgctggaatgaattaaaaaaaatattagataataattaaagttttaagaaaatggcacatcctaagagaagacaatcaagtacgagacaagcgaagagaagaactcatgataaggcagtagctcctacattggctatttgtccgaattgcggcgaatggcacgtttaccacacagtatgtggtgcttgtggctattacagaggtaagctcgctattgagaaagaagcagctgtataattagtacagttatactgaaaacagcctgagggtaaagctctccggctgctttaagtattatagtattgctaatttaaaataggtttgatggaaaaaataaatgcagtaatcacaggagtcggcgggtacgttcccgattatatcttaactaacgacgagatatcaaaaatggtggataccaacgacgaatggattatgactcgtatcggagtaaaggagagacatattctgaatgaggaaggattaggtagttcatacatggcacgcaaagctgccaaacagttgatgaagaaaaccggtgctaatcctgatgacattgatttggttgttgtcgctaccactactcctgactatcacttcccttctacagcttctattctttgtgataaactcggactgaagaatgcatttgctttcgatttgcaagctgcttgtagcggtttcctgtatttaatggagacagctgctaatttcatccgttcgggaagatataagaaaattatcattgtcggtgccgataagatgtcgtcaatggttaactatacagatcgtgctacatgccctatctttggtgacggtgctgctgcctttatggtggaaccgactacggaagattacggaatcatggattcgatactgagaactgatggcaaaggattgcctttcctccacatgaaagctggtggttcggtttgtcctccgtcttatttcacagtagacaataaaatgcactatttgcaccaggaaggaagaacagtgtttaaatatgctgtatctaacatgtcggatgtatctgctgctattgcagaaaagaatggtctgacgaaagataatatcaactggattgttccgcatcaggcgaatgtccgcattatcgaagccgtggctcaccgtatggaggtgccaatggataaagtgttggtaaatattgagcattacggtaacaccagtgctgctactcttcctttgtgtatctgggattatgaagataaactcaagaaaggtgataatatcattttcactgcattcggtgccggatttacatggggcgcagtttacgtgaaatggggttatgacggaaaaaaggaatcgtaacgtaagttactgaactataacactcaaaaacgcatcctatttcgattcgatgcgtttttttgtctcaaccaataaaatgaagagaaatgcataaagcaggttttgtaaacattgtaggaaatccgaatgtcggaaaatcgacattgatgaatgctttggtgggcgagcgtatttcgatcgctactttcaaggcgcagacaactcgtcaccggattatgggaatctataatacggatgaaatgcagattgttttttctgatactccgggagtattgaagcccaattataaactacaggagtcgatgctgaatttttctacttcggcattgacggatgcggatatcttgctttatgtgactgacgtggtggagacgccggataagaataatgagtttatggagaaggtacgccagatgacggtgcctgtgctcttgctcatcaataagatagatcttacagatcaggaaaaactggtaaagctggtggaagattggaaagaactgcttccccaagccgaaattattccgatttctgctacatcgaagttcaatgtggactatgtgatgaagcgaatcaaagaactgttgcccgattctcctccttattttggaaaggatcagtggacggacaagcctgcccgtttcttcgtgaatgagattatccgggaaaagattctgctctactacgacaaggagattccttattcggtggaagtggtcgtagaggagtttaaggaagagccgaagaagattcatattcgtgcggtgattaacgtggaacgtgattcgcagaaaggaattattatcggtaaacagggcaaggcgttgaagaaggttgctaccgaggctcgccgcgaactggaacgtttctttggaaagactattttccttgaaacgtatgtgaaagtggataaggattggcgtagttcggataaggaactgcgtaattttggttatcagttagattaagagtattcatgcgactgtgatagtcgtgaaaaaacaaggtattgaactatgggtaatttagttgcaattgtaggacgcccgaatgtgggcaagtctaccttatttaaccgtctgacgaagactcgtcaggctattgtgaatgaagaagcgggtacaacccgcgacagacaatatggcaagtccgagtggctgggccgtgagttctccgtggtggataccggcggatgggtggttaattcggatgatgtttttgaagaggaaatccgcaagcaggtattattggcagtggatgaagcggacgttattttgttcgttgtagatgtgatgaatggagtgaccgacctggatatgcaggtggcagctattctgcgccgtgctaatagtccggtgattatggttgccaataaaacggacaatcatgatttacagtataacgctcccgagttttataaactgggattgggcgatccgtattgtgtttctgccatgacaggaagtggtacgggtgatttgatggatttgattgtcagcaatttcaagaaggagtcttctgaaatcctggatgatgatattcctcgttttgctgtggtaggacgcccgaatgcaggaaaatcttccattgtaaacgcgtttattggggaagaacgtaatatcgtgacagagattgcaggaactacccgtgactcgatctacactcgttacaataaattcggatttgatttttacctggtagatacggcaggtatccgtaagaaaaacaaggtaaatgaagacttggaatattattcggtgattcgttcgattcgtgccatcgaaggttcggatgtttgtattctgatgttggatgcaacgaggggtgttgagagccaggacttgaatatcttttctctgattcagaagaaccagaaaggattggtagtcgtgattaataaatgggacttggtggaagataaatcagtgaaagtgcagaagacatttgaggaagctgtccgttcacgttttgctccgtttgtcgatttcccgatcatctttgcttctgcattgactaaacaacgtattctgaaagtgctggaagaagcacgtaatgtatatgagaaccggacgacaaagattccgacagctcgtttgaatgaagaaatgcttccgctgatcgaggcttatccgcctccctcaaataaaggtaagtatatcaagattaaatatatcacacagttgccgaatacgcaagtgccttcatttgtctattttgccaacttgccgcagtatgtgaaggatccgtacaaacgtttcctcgaaaataagatgcgtgagaaatggaacctgacaggtactccggttaatatttatattcgacagaagtaaagttcaccacagattaacacagatttccgcagattaaaaataaaaaacgggctaatcaatttacaagttttgtatcatttgattagcccgtattctttatgaaatatctgtgaaaatctgtgttaatctgtggtgaatctatttctccaactggaaatcttttctgcgtaaaacgaagctgttactcaagtatttttcacgcacaatctgattctccgataattcttccggtgttccctggaaaagaatctttccttcgaacagcagataggcgcggtcggtgatactaagtgtctcctgtacgttgtggtcggtaatcaggattccgatattcttatctttcagcttccaaacaatttgctggatatcttctacggcaatcgggtctacaccggcaaaaggttcgtcaagcatgatgaatttggggtcgatggcaagacaacgggcaatctccgtacggcggcgttcacctccggacaattggttacctttgtttttgcgtaccttttgcagacggaattctgctatcaggctttcgagtttctccttttgatattctttgggcttgttagtcatttccagtacggcggcgatattatcttccacactcatctggcggaaaacggaagcttcctgtgcaaggtagccgattcccgtttgcgctcgtttgtaaaccggatatttggtaatctccaggtcgtcgaggaaaatacgtccttcattcggagtaatcagccctacggtcatatagaatgaagtcgtcttaccggcaccgttcggtcccagcaaacctacaatctcaccttgcttcacattgatggaaacgtggcttacaacggttcgtttaccgtacttcttaaccaggtcttccgtgcggagcaccatcttgctttcttccatattctagttattttgcggcaaatgtagtaaaaataagctgaaataatgtacatttgcagacaaatagtgtgagttatgataaaagcattgagaaccgtcgggagatatttcatgctgatgggacggactttttcccgtcccgaacgtatgcgtatgttcttccggcaataccttaacgagttggagcaactaggtgtgaactccatcggtatcgtgctgttgatttcgtttttcatcggcgcggttattaccatccagatcaagttgaatatcgaaagtccgtggatgcctcgctggacagtggggtatgtgacacgtgaaattatgttgctggaattttcttcctctatcatgtgtttgattcttgcgggaaaagtaggatcgaatatcgcttcggaattaggaacgatgcgggtgacgcagcagattgacgcgctcgaaattatgggtatcaattcggcaaactacctgattctgcctaagattacggcgatggtaactgtgattcctattttagtgacgttcagtatctttgccggaattatcggtgccttttgcacctgttggtttgccggggtgatgaatgcggtcgatctggaatatggattgcaatatatgtttgtggagtggtttatttgggccggtatcatcaaatccctcttttttgcgtttattattgcaagtgtgtctgctttcttcggatatacggtagatggtggatcgattgctgtgggaaaggcttctacggatgccgtagtatccagcagtgtattgattctgtttgcggacttgatattaactaaacttttgatgggatgattgagattaaaggactttataaatcatttgatgacaaaacggtattgagcgatatcaatgctagttttgaaaatggaaagacgaatttgattatcggtcagagtggctccggtaagacggtattgatgaagtgtattgtaggattgcttactccggagaagggggaagtcttatatgacggacgtaaccttgtcttgatggggaagaaggagaaaaagatgcttcgcaaggagatggggatgattttccagagtgcggctctgtttgactcgatgacggtgttggacaatgtgatgtttccgttgaatatgtttagcaatgatactttgcgtgagcgtaccaaacgggcgatgttctgcttggatcgtgtgaatctgggggaggcgaaagataagtttccgggagaaatcagtggggggatgcagaagcgtgtggctattgcacgtgcgattgccctgaatccgcaatatttgttttgcgatgaaccgaactcgggactcgatccgaaaacgtcattggtgattgatgatctgatccatgatattacgcaggaatataacatgacgaccattatcaatacgcatgatatgaattctgtattgggaattggcgagaaagtgatttatatttatgaaggacataaagagtgggaagggacaaaagatgatatctttacctctaccaacgaacgactgaataactttatctttgcttcagacttgctccgtaaggtgaaggacgtggaagtgcaaggaatggaagggtaataaaaaaacttctgtcatcgggtgacagaagtttctttttttcttagctatattagcgtcggcaattaagctctaggtctagcttctttaactaccattgtacggcccatgtattcagctccgttcaattcagcaatagcttttgcagctgcagcgtcgtcttccatttcgatgaaagcgaatcctttggatttaccggtttcacggtccataacaactttaactgatgatactgctccgtaatcttccatcacttgttgcagatctccttccttaacacggtagttaaggtttccaacataaatgttcataatgaaaatgataaaaaataaataaataaatgaataaaactctctggacagatggttactaataaaaagattaaaacgacagagagtttacaaatgcgtttcgtaacggaagtaaaaaccttgtaatcaaatcgagaaactaatggtccatcaatccgcagcaaagaaaagaataatttttggattaaccatctttttggaaggttaatttgcggattatcagaaaaaaagttctttccttttctcttgaaagaaaagaaagaaccaaagaaaagttcaaggctgacttttttctcctactcgtttccttcacttcgctaaagggcagaaactcgctacgctcaaacagtctgcccttcttaacgcttcgttacgggcgctcgcttgacggagaaaaaagtaggccgggagacctgcggcgggggcgttgctgatggtttattgttgtttatatatgaggaattgatgaaataattaataaaagatgtgtgaaagatgggtggcgttgctgaaataaatctgcaatgtcttttgaaatttgaaagattagcactaattttgcaccctctttgagtatagaacaaagtataaatcaaataaataattgtcagaatgaacgtttcattacaaaacattgacaaagtaagcgcagagcttactgtaaagcttgagaaagcagattatcaggagaaagtagacaaagagttgaaatcactccgtcagaaggcacagattccgggattccgtaaaggtatggtgccgacaagtcttattaaaaagatgtatggtaaatcggtgattgcagaggttgtgaataaggcattgcaagaagctgtttacaattatattaaagataataaggtgaatatgttgggcgagccgttgcctaacgaagaaaagcaacagaatattgatttcgatacaatggaagagttcgaattcgtgttcgatatcgctttggcacctgaatttaaagcagaagtaagcgctaaagataaagtagattattattctatcgaagtttctgaagaaatgatcgacaaccaggtgaagatgtacactcaacgcactggtaagtatgataaggtagatgcttacgaagataatgatatgttgaaaggtctgctggcacagttggacgaagaaggcaatacaaaagaaggtggtattcaggtagaagctgctgtgttgatgcctgcttatatgaagaatgacgatcagaaagctatttttgctaatgcaaaagtaaatgatgtattggtgttcaatccgaatgttgcttatgacggacatgctgctgaactgggttctttgttgaagatcgacaaggaaatcgcgaaagatgttaagtctgacttcagcttccaggtagaagaaatcactcgttttgttccgggtgaattgacacaggaagtgttcgaccaggcattcggcgaaggcgttgtgaagactgaagaagaattccgcgctaagattaaagaagaaattgcagcaagatttgttgctgacagcgattataagttcctgatcgatattcgcaaagtgatgatggaaaaagtaggtaagttggaattctctgacgctctgctgaaacgtatcatgttgctgaacaacgaagaaaagggcgaagaatatgttgctgaaaactatgataagagcatcgaggaactgacttggcacctgattaaggaacagttggttgaagcaaacgatatcaaagtagaacaggaagatgttctgaagatggctagagaaacaacgaaggcacagtttgctcaatacggtatgttgtctatccctgatgatgtgcttgacaactatgcacaggagatgttgaagaagaaagaaactatcaataatttggtaagtcgtgttgtagaagtgaagctggctgctgctctgaaagcgcaggttactttggaaaacaagaacgtttcaatcgaagaattcaataagatgtttgaataatcattcggttgaatagaatataaagtcacagaaacacagagtttttataaaattataactctgtgtttttttgtgtctctgtattctttttcgtttctttgtacttacgtttatttttaatttataagaaaggaacaattaacatggatgattttagaaaatacgcaaccaagcatttaggaatgaatggcatggtattggatgatgtgattaaatcgcaggccgggtatttgaatccctatattctggaagaaagacagttgaacgttactcaactcgacgttttctcccgtttgatgatggaccgcatcattttcctcggtacacaagtagatgactatacagcgaatacgcttcaggcacagttgctgtatctggattctgttgatccgggtaaggatatctctatctatatcaactctccgggcggaagtgtatacgccggactgggcatttatgatacgatgcagtttatttcaagtgacgttgctaccatctgtacaggtatggcagcttcaatggcggctgt

SEQ ID NO: 8107 - DNA, 16843 bp, Unknown
  gut microbiota DNA sequence
cagaaggagctgaatattccggtagtactacaaaactatcatcaccggagcgtcacttactctaatctgacaggtgattataaaggtacgggaagaatggcagcccagttttttgccaaacggatgtttcgaaactttgcttatttcggcgttaaaggggtggtttggtctgacgaacgctgcgaagggtatcggcaggaagtgaaacgtatcggaggcgaatttttcagtttcgaatcggataagcaggaagacgagataagaatggaggcgagccagtggttgcagcaactccccaagccagtcgccctattttgctgtgatgatgcgcacgccctattcatttctgaaacttgcaaaatgacgaatattcctattccggaagaaattgctttattaggcgtggacaatgacgaactgatgtgtaatatttccgaccctcccatttcatccatagagctcgaagtagaaagaggcggatattctatcggcagacttattcatcaacaaataaaaaaggaacacgaaggtactttcaatattgttatcaatcctatccgcatcgaattacggcaatctacggagaaacacaatatcaaagacccttatattctggaagtagtgaagtatatagagtctcattacagttccgatttgaccatagagtctctgcttgcaaacattccgctatcccgcagaaacttcgaagtgaaattcaaaaacgcactgaatacctctatataccaatatattctgaattgccggtgtaatcatcttgcagatctactgctcacaaccgaccgtccattggccgatttagcaatggaagtaggctttacagactataataacattgcccggattttcaaaaaattcaaaggatgttcacctattgaataccggcagaaaaagactagacaaagataaaataaacgctttctgaagactgtttttcgttttgacattaagatcattcatgagaatgacctacctttgttttcatacctttcgaaatacattttagatattaatactatgcaaagacataccataagaggaaaaacaagaacgattatctatcctattattatttatttgggggtcacctcaataatggggtgcaaaagattagagattaaccagacaaaaagaaactgggagaagctatccgcctactttaccccaccaccactgtatcaggagaaatttggaacttaccgcaaccctcttttattttacaatggagatacagtcaaaaacgcagacgactggctaaaacgaagaaaagaaataaaagacaaatggttgaacctgatcggtcattggccggctatcatcaccaatcaaaaactggagattataaaaaccacagaacgcgaagatttcaaacaacatttagtgcgtttttattggactcctctggaacagacttacggctatttactggaaccaaataagaaagggaaacatcctgccgttatcacagtattctacgaaccggaaacagctatcggatggggaggaaaagctaatagagatttcgcctaccaattaaccaaaagaggattcgttactctctcattaggaactagacagaccaccaaagataagacttactctctctattacccgactattaacaactccactatgcaacctctttcagtacttgcttatgcggcagccaatgcatgggaagtattagccagagtcgaaagtgtcgactctacccgaattggtatcatgggacactcttacggtgctaaatgggctatgtttgcttcttgtttatatgaaaagtttgcctgcaccgcctggagtgatccgggtatcgtctttgatgaaaccaaagataattatatcaattattgggaaccttggtacttggggtattatcccccaccctggaaaaaaatctggagcaacaacggcaataactcttcaacaagtgtctatgccagactatgtaaagaggggcatgatttacatgaactccattctttattggctcctcgcccatttctcgtatcaggaggttattctgataatgtagacagatggattccattaaatcattctgtcgcagtcaaccgacttttgggttatcatcatcgagtggcaatgacgaacaggcccaaacatgatcctactcccgaatcaaacgaaactatatataagttcttcgaatggttcttaaaaagaaaaacgccaaaagaagattaacaatacattattcttcgttttttgaagatagtttttcgtttttgccaccgcacatgtctttgaaacagaatacttttgtatcattaactagttaaccggtctaaagagactattgttagaaattaaaatttcaaatcgacgatctaatatttaaaaacttatcatgcaatgaagaaaatcagatggaatccaaagttagtaacctcgttgtttattattcttttaatgtgcactctcgattgtcttgcacaagaagtaataaaggggtttgtgaaagatggtaatgatgaaccattacctggcgtatctgtagctgtcaagggtgcaacgaatgtcggtaccattacaaatgttgacggaaaatatagcattaatgcccataagaatgacgtattggtattctcctatatcggaatggtcagccaggaagtcaaagtaggtaataagacgaatatcaatatcactcttaaagaagatgtttcctcgctggatgaaatcgtagtggtaggctatggaactcaaaagcgcggtagcctgaccgccgccatatctactgtctccgataaagaaatccttaaagccccaaccatgggaatcagtaatatcatcggtgcacgtgttgccggtatttccgccgtacaagccagtggacaacccggtgcggataatgcctccttgtctatacgcgggcaaagtggtattatctatgttattgacggcatcagaagaagcgcaagtgacttcaacggactcgatccgaatgaaatagaatctgtgtctgtattaaaggatgcatcagccgtagccgtttatggtctggacgcaaatggagcattcattgtcacaaccaaaaagggacaaacagataaagtcaccattagctatacaggtactgtgggtatcagccagaatgcagaagaacaagaatggctcgacggaccgggatatgcttattggtacaataaagcccgtcttctacaaggtgatacggaagtgtttactgtcgacatggtgcgcaaaatgcgcgagggtgtcgacggatggggaaataccaattggtacgataaagtatatggaaccggtgttcgccaacatcataatatttcagcatcaggaggaagtgaaaagattcgtttcttcacatctatcggttatctggaagaaaaaggaaatatagataagttcaaataccgtcgaatgaatcttcgttctaatatcgatgcacagttggctaaaggacttagtctgtcattaggtgtttcggggcgtatagaaaaacgggatgctcccaaattttctgccgatccggatgattggatgaatattccccaacaggtatgctatgctttgccatacgtacaggacacttatgaatataatgggaaaatatacgatgtttcaaccccgacttccggttctccggtagctcctatcgcatccatatacgattcaggatataacaggtccaaccaatcatatatgcagtctaatttcagtctgaaatacgacacaccttggcttaaaggattaagtttaaaattccagggagcgtacgacttagttcatgggatgactaaacagttgaccaagccgaatgaagtcatgattatggatttacctaatgcagccactaccacactcacctaccataaggactacagtgtgttgaaagatacacctatattatccgaatcggcatcacgcgcccaagagttcactacgcaaaccagtatcacgtatgataacaaatttggagatcactcgatcggagtattattgctggccgaaacacgggaacgtaatagcaacaatctcggtgtaacgggaaccggattagatttcattcagttggatgagttgaaccaaatcacaggattcaccaaagaggggaaagagcaacctgctataccttcggggagaagcagccagacacgtgtagccggttttgtaggtcgtttgaactacaattacgctgacaaatattatttggaggcttcactacgccacgatggtagttatctgtttggtggtatgaacaaacgctgggtcaccctgcccggtctctctcttgcctggagaatcaataatgaaaaatggtttcatgctacttgggtagacaatctgaaattaagagcaggtattggaaaaactgcaaccagcggcatccagcctttccaatggagaaatacgatgagcacatcccccaattctgtagtaataggcggagccagtcaaacagctatctatccatccgtattgggaaatcccaatttgacatgggcgcaatgcctcaactataatatcggagtagatgtaactttatggaatggattattaggaatggaactggatgctttttataaatatgaatatgacaaattatcttccgtaaccggttcgcatactccttccatgggaggctattatttttcaactgcaaacgtaaacaaagcagattataagggttttgatgtcacttttacacatcagaacagaattggaagtttcagttatggagccaaattaatctggtcatacgcatacggaagatggctcaaatatgcaggtgactctgaaaatacaccggaatacagacgactgaccggaaagcaaatcggttcgaaaatgggattcattgcccaaggattgttccagagtgaggaagagatagccaactccgctaccatgcccgaccgaccggcttatcccggatatatcaagtatatggatagaaatggagacggtattataaccgtcaatcaagatcaggggtatgtaggtaaaagttcaagaccgacccacacaggttctttcaatttatttggtaactggaaaggattcgattttgatattttggcatcatgggggcttggcagcgatgttgcattaaccggagtatatacggcaaccggttcatccggaatccaaagcgctacggccttcacgcgtccattctatcagaatggcaatgcaccagtctatctggtggcaaactcctggacacccgaaaatacaaatgcagagttcccttgtctggaaatcaatccgagaagtttgaataacgggctggcctccacattctggtatcgtaacggaaactatttgagaataaaaacagcccaaataggatacaatttccctaaaaaatggttgagtccattgggagtggaagctcttcgcctctatgttgaggggtacaaccttctgactttcagcgctgtgtccaagtacaacatcgacccggaatctccagctgtaaacaatggatattatccgcaacaaaggacttatacacttggagctaaaattacattctaaaatatacgctatatgaaaaagttatctattaatatatcactcttctttgtgttgctgactttaagttcgtgcaacgactggctagatgaagtaaaacaaacgactaccgttagtgatgaaatcatctggcaagatgaaacccaggttgacaaatatgtgaatagtttctaccccctcctgcatgattacggtcaattcggggaggcccaattctacggaagttttacagaaagtctgactgacgcatttaagtatggttcatatacgctaggacacagagccggccatcctaatctttatgtacttacaccggatgctatctctccggataactgtctatacagtatctggctacgttcaacagcatacaaacagatccgagaaacaaaccaatttctatctctacaaagaaaatattccgaattttcagcagacaaaaataagctttgggaagctcaagtacgctttttccgtgcatttgtatatttccagttagccaaaagacatggaggtgtcatcttgtatgacgatctgccggtatcaactaataaagcccgcagcagtgctgaagaaacctggcaattcatagccgacgatcttgattttgcagccaataatttacccaaggaatgggatgcggcaaataaagggcgtatcaccaaaggagcagcctatgcactgaaatcgagagcaatgttatatgccaaacgttggcaggatgcctatgatgctgctaataatgtaattgcactcaaactatatggtctgacggacaaatatgaagatgcatggaaagggaataataaagaagcgattctggagtttgattatgatgctgccaacgggcctaatcatcttttcgaccgatattatgtaccacaatgtgatggttatgacaatggttcaacaggaactcctacccaggaaatggtagaatgttatgaaagcaaaaatggagaaaagatagactggacaccctggcatggcattactgatgagactcctccatacgaccaactggaacctcgcttcgccgcaactgtaatctatagaggatgtacctggaaagggaaaaagatggattgcagccttgacggaaagaatggtgtgtttatgccttaccgggaacagggtacttcatacggcaaaaccacaaccggttattttttaaggaaattgttagacgaaacgctgacagacgtcaaaaatgggaaaagcgcccaaccgtgggttgaaattcgctatgccgaagttttattgaacaaagcggaagcagcttatcgactcaataagatcggggaagcccaaagtgcaatgaatgaggtacgcgccagagtaaaagtgaatttaccgggtaaattctctacaggcgaggcttggttcaaagattacagaaatgaaagaaaggttgaactagcctatgaaggtcatttattctgggatatgcgtcgttgggaattagcccatattgaatacaacaactatcgcacacatggctttaaaatcattggtgctaccaatacatacgaatatgttgattgcgacggacaggaccgcaagtttataaagaaattatatgtccttcctgtaccgtctgaagaattgaagaataactcattgattgagcaatatgatgaatggaaataacaataaaactcttagaacaatgaaaaacaaaattatatcaatcatccaggcattagttcttctatggggagtaactagttgtcacagtcctgaagagttgggttctgacattcaacgcgaaggtatcaacagcatcactgcatcgtttccgaacgatgacagcagcgaaaacagtttcaaaggtgagatagattataccaatcattcaatcacatttgttttcccatacaattatcccaaattgtcggataatgtattgccgacctctgcactaaaacgggtaagattgagtgccagtttagcgaataatgtcagtgtaactccaccattactttatatggatcttacccaagacaattatatcacagtgaaagatcagacctccgggactagtaccgaattcaaagtaataggtgaaatccgtaagagcaacgaatgtagcatcaccaaattcgatattcctgccatagggctattgggagtcattaatgaaaacgaaaaaacaatttcattagtaaccatagataatgtaggggagcagatagctaacattgatatctcacatggagcaacatgcagtcccaatcccgaaacagaagcactagactatgaacaagaacagaccatcgtcgtcacagcacagaatggcatagataaagcaacatatacggtaaaaaaagatattccgcaaaaaactgttgcaggtattcgccaaggaagcggtaagctattatggtctaaaagactatctgaaataagcggtattctgctaccgggtaaagtaaccggacttgcagtagtcgacaaatatgttgtcatcaacgaacgtgccaatgatcgtgccatttacttaaatagccagaccggagaaatagcaggttctatggatatcagccaatttgccggtgataattcaaacttccatgcaacagcagatcggggaaataatattttattctgcagctatactccatcaggaggtactttcaccgtatggaaagctaatggagtgaatgagaaaccacagaaatatattgaatataaaactggcactaatataagatttggttggaagatctctatccagggagatttggatgccaatgcccttatcacaactccggtattccaaaaagatagtaaagtacaattcgcccgctggcgtgtcataaatggtactttacaatcacaaagtccggaatttgtcattatgagttcctctctactgacttcaaactggattaaatgggcggatgtgatttatgctgatgacaccgacactcaaagtgactatttcttggccagccatgtcacagacacttctgccaaacgctatttctactggtttaaaggaacagacaatagcataaaagcggcaaatacaggtgctccgggtaacacaattatcaatgccgtagactatgccgtgttcaacaaagtaccttatgtcatttacaatcatgtaaatagtttcaactatgccgtaactggttctgatgctgtccgtatgtatgaccttagcagcggttcattcgataaccagatagtagtatgtccggacaagatatatggaggtctcgagaattccggtcagaacaccgaaggaaccggagatgtcgtatttaaagttgccaaaaatggttattatctatacgtttatctcgtattctctaatggaggcatcgcctgctaccaatatgactgtattgatatgtaatacaaacaaccagtaatcaaccttataatataccactaaatatgaaattaaaaaatttatggttaatagcagttgcaatactcatatacgcttgcaatgcagaagaaacgagatcatgggaagttacttttgatccaaacaagcccaaagatccaaatgaacaaagcattattaatgtggcggcaggcaaattctataaaatgaatgttgtagccaacaatgcctacgctgataaagcccctctcgatccctggacatccggcaccaaactgacggatgaggagaccggtaccctctcgactaaaaacagaggagtcggttgggatgcacaaactgtagaagtaataattgatttgggatcattacgcagtatcacagaagtatcagtacatgctatttccgatccgacatcacaaattgtattccctgctcaaatagaagtatcaaccagcaaggacaaaagccaatgggaaaaagcagcctcaccaattacctattccgacagcaacggaaagtcggacgcttggggaaaaacagactttagtaatgtagcatgcagatatgtgaaagcgactctcaaatcttcagcttccaccagtacgatgatgctcatcgacgaaatcaaggtaatgggagaatttcataatgacatgaagtacgtccccgaaaaaggatgttatcatggagcattcccaccattatacggattcgatccggaagaccgcgaaggaagtactgaccagtgtgccgttgccttatttgaaaaattggtgggaaaacaactatctatgatcttatggtatcagaatatggaaccgggacgaaatttcagcgaaatgcaaacagtacgtgagaaatactggggaaaaaactatcagggcaaataccgattcttcctttacggatggctgcccgtcattcccacccagcaaatggcaaatggcgaacttgacgattttcacaaatcatacttcgccgaagtggctgcccaaaaagtacgtgacatgggacctatctggttcagaccagccaacgaaatgaatggaagctggactccgtattacggagatcccacaaactatgtcaaggcttggagacgtatgtataacattgcagaacagttgggtgtcactgcctacaatgtcttcgtatggtcacccaacagtgtaagcatgccgggtacggaagcaaacgcaatgaaaaactattatccaggagatatgtatgtagattggctgggagtaagctgttatccaccatcgcttagtgctacttatccggaagaaagaagatatccgctcacgctgatgcaaggaatcaagcaggtatcggcagacaagcctatcatgattagtgaaggaggatactccagtacatgcgaccaccagagatgggtaagagaatggtttaagctgaaggatgaagagccacgtgtcaaggccgtcgtatgggagaatcacgaaaatgcagagaatggtgaccgccgtctgcaaagtgaccctctggcacttgaactgtacaaggaactcgtccaggatccttactggcttgatctgatcccggatgctgtgtacagtgaaattgaaacaagaaaaaataactcaaaataatcaaagacaacaagtattctagtatgaaaagactgactccatatagctggctgattctgattatattctcctcctgtctgactggtaataaagtagcaagtactgataaacagatagaaagtttattatcacaaatgactttggaagagaaaattggaatgttgcacagtaacacgatgttttcaagtaccggtgttccaaggcttggcatccccgacctgcactactccgacggacctcacggagtaagatttgagggagtagccaatgggtgggaatccgcccgatgggataacgacgcatgtagctatctacctgcattaagcgccttagcatctacttggaaccgtgatctggcacagctatatggagaagttcttggagctgaatgtaaagcacgcggtaagcatgtgagcctggctccgggagtcaacattcaccgttccttactcaatggacgtaattgggaatatttcagcgaggatcctttcttctccggtgaactggctgttccatatatacaaggagtacagtcacaaggagtagcctcttgtgtgaagcattttgctctgaacagccaggcatacaaccagtacaaagtgagtgtagaagtagacgaacgcaccttacacgaaatttatcttccggcttttgaagctgccatacaacgaggtggagccatggcagccatggcggcatataacaaggttcgagggttgtggtgtacggaaagtccttatcttcttgatactttacttcgtgatgaactaggatttgacggattagtcgtatcagactggaatgcagtccataacacagagcgaacagctctgtgtggtatggatgtcgaaatgggaacaagcatcaaagaaaatgggaaatatgctttcaataaatattatttagccgatcctttattgaagaaagtacgtaatggagagattccggaagaagctgtcaacaaaaaagtacgtaatattctgaaattgatgattcgacttgatttaataggacaagttccttatgacactacaggtatggcagccaaacttgcaatacctgcccatactaaggctgccagagaaatagcggaggaatcattggtattattgaagaattccaaagatatgctaccactagacccggcacaatacaagaatgtcgcagtgattggcgcaaatgcaaccgaagtatttgcagcaggaggtggcagtacaaaactcaaagctaaatatgaagtcactcctttggaagggctacaaaatcttttagatggaaaagcccggatcgaatatgcacccggttatcaattgagtaaaaaggcgtataaggttggccattggttcacgaacgaatttgataaattcgatgaagagttatataagaaagcaatcaatacagctgctcaagcagaattggtaatctatataggtggaacctcccacgaacatggttctgactgtgaagggtatgataagccgaatttaaagcttccctaccaacaagacagattattaaaaggtatcctggaggttaatcccaacactgtagtggtactaatctccggtggccccgtcgagataggagaatggtataatgatgctacggcattactgcacggcagttttctagggatggaaggaggaaatgcactggcacgtacattgtttggagcagtcaatccttcgggaaaactgactactacctggtgtaagcgtctggaagatatgcctgatcacgtatttggagaatatccgggtataaacgacaccgtccgtttcaaggaagggcttatggtcggctaccgctacttcgatacttaccgtgtagtcccccaatttgaattcggttatggattatcctataccacttttacttattcaaacataaagatgaaacctgtatggaaagactcggacacagagtttgccgtatcattcaccattactaacacgggaaaacgatatggccaggaaattgcacagttatatttgcatcaaaacaaatgttctgtagaacgcccgtttaaagaattaaaagggttcactaaggttggcttaaaaccgggtgaatccaaacaagtcactatcaagttaccgcgccgcgccttacaatactacgataccgaaagtaaatgctggaaagacgaacctggcatgtttacagtattaataggcgcatcgtcacgggacatcaaattacagaaagatttcgaactgaaaaaataaaaacacatgggaaacaataaccttataagcagcaaaaagacatactacatatcaattgcaattctggcagggatgttctttatcttcggatttgtgtcgtgggtcaatgccatactgattccatacttccgcatatcctgtgaactgacacatttcgaatcctactttgtcgcctttgcattttatatcgcctactttgtaatggctatcccctcgggagtacttctcaagaaagtgggattcaagcgaggtattatgtatggttttatgcttaccgccttaggagctttcttatttgttccggcagcattagcccgtcaattcgagatattcctggccggtctattttccatcggcaccggattagccatattgcaaactgccgctaatccttatgtcactattatcggtcctattgatagtgccgccaaacgaatcagtattatgggaatatgcaataaattcgcaggtatcgtctcaccactcatatttgctgcattgatattaaatgttaccgacaaggagctttttgccactatagaatcggggactttagacatagtcacaaagaatgctatgcttgacgaattaatacaacgcgtcattgtgccttatgctgttctaggcgttattttactgcttaccggtatcggtatccgttactccattctgcctgaaatcaatacagacgaagaaaacagcacggaagatacaggtagccaccatcacaccagaaaaagtattttcgactttccttaccttatcttgggagcagtggctatatttcttcatgtaggaacacaagttatcgcaattgatacaatcatcaattatgccaattcgatgggtatggacctgctcgaagctaaaacatttccctcatatacattggcctgtactatgattggttatctgctggggatcctgttaatacccaaatatgtttcacaaaaaaatgcacttataggttgtaccatcatcggattactcctttcattcggagttgtatttgcagattttgaagtaactctgttcggtcatcatgccaatgcctccattttctttctgaacgcattgggtttcccgaatgctttaatctacgcaggtatctggccactttccattcatggactagggaaattcaccaaaaccggttcctctcttcttatcatgggattatgtggcaatgccattctgcctctgatatatggtcatctggcagatatgtatagtctgcgtttcggttattgggtattgattccctgttttttatatttggttttctttgcagttaaaggtcataaaatagactcctggaaataaattaaaaacgaaataatatggaaagactcatcataacaaatggaaaactcatcctgccaacaggcatagaaatgggccaaacattgatatgcgaaaatggaaaaattgagcagattattcccaatgaaagctatcaaccgctcgttggtgacaaggtaatagacgcccgtcagaattatgtttcaccaggattcatcgacatgcatatccacggaggaggaggacatgacttcatggatggtactgttgaggcttttctcggagtggccgagacacatgccaagtatggtactaccgcaatggttcccaccacactcaccagcactaatgaggagttaatgacgacgtttaccgtatatcggaaagccaaagaaatgaatatcaatggttcgcagtttatcggtttacatttggaaggaccttacttttcaccgaaacaatgtggtgcgcaagacccgaacttcctgaaaaagccgcaagcagaagaatataatgccattctggaagcctcaaaagatattatccgttggagcgtagctccagagttggagggtgctctagcactagggcaaactctgcgacaacatcatattctgccctccatcgctcataccgacgcgatttatgaagaagttgagaaagcctttacagcaggttatacacatgtgacccacctttattcggccatgtcatcagtgacccgcaaaaatgctttccgctatgccggagtagtagaagccgcctacttgattgaagatatgacagtggagattattgccgatggcatacatcttccgaaacccctgctccaattcgtatacaagttcaaaggagttgataaaacagccctctgcactgatgccatgagaggagcgggtatgccggacggtgaatcgatattaggtagcctcaacaatggccagaaagtcattatcgaagacggagtggccaaaatgccagatcggaaagcttttgccggtagtgttgcaacaaccgaccggctggttcgaaccatgatatatttagccggtgttcctctcattgacgccgtccgtatgatgaccctgacgcccgcccgtattcttcatattgacaaagaaaaaggttctttagaaatcggtaaggatgccgacatagtcatttttgataatcaaataaatataaataatacaatattaaaaggccatgttatctatactaaatgaaactaagaccaaagtttttcagcaggaacaattaacagttcgaattttcccgtccattcaagagatgggcagtgtagccgcaaaagaagtcggcgaccaaatttgtcgtttattggaaagcaaaccggaaataaatatgattttcgccgctgccccctcacaaaatgagtttttgagtcatctgattcatgacaagcgcatcgactggaccagaataaacgcttttcatatggatgaatacatcggtatacatccggaagccccacaaagttttggacatttccttagaattcgtatctttgacaaagttcctttcaagaaagtcaactatctgaatggtctggcggaaaaccttgaagaggaatgtcagcgatatgcagacttgctgactaagcatccggttgacatcgtttgtctgggaattggagaaaatgggcatattgctttcaatgatccggatgtagcagactttaatgatcccaaacttgtgaaagtagttgagctggatccaatatgtcgccaacagcaagtcaatgaaaaatgcttcatgacactagacttagtacccaaagaagctttaacactcacgataccggctttgctaagagctgaatggatgttttgtatcgtcccgttcaaaaataaagctcaagcagtctatcagactgtttatggtgaagtttcagaaaaatgtccggccagcatattgcgaagaaaagaaaattcttcattatatttggacccggaaagtgcagaaagaattaatttataaaggattatgaaaaacagaatctcacttcttcttatactactggctattagcttcagtatacacgcacaaaaagttatgcggatcggaattattggtctggacacatcccattccaccgctttcaccgaactgattaatagtggttcggatgagaccttttccaaaggttttagggtagtagcagcgtatccgtacggttcaaagactattcaatccagttacgaacgaatccccggatacattgaaaaggtcaaagcaaatggcgtggaaatcacctcatcaatagcagatttactggaaaaagtagactgtgtccttttggaaaccaatgacggcagactacatttggaacaagccgtcgaggtattcaaatcaggtaagatatgctatattgacaaacctatcggagctactttaggagatgcaatcgctatttatgaaatggcagaaaaatacaatgcgcctgttttttcctcttctgctcttagatttactcctcaaaaccagaaattaagaaatggagaatttggcaaaatccttggagccgattgttattctcctcacaaagtggaaccaacgcatccggatttcggtttctatggtattcatggagtagaaacattatacacaattatggggacaggatgcgaatcagtcaaccggatgtcttcagatagaggggatatagtagtaggacgatggaaagatggtagaatcggaacttttagggctattataaagggaccgcaaatttatggaggaacagcctatacttccaaaggggcaataacagtaggagg

SEQ ID NO: 8108 - DNA, 4428 bp, Unknown
  gut microbiota DNA sequence
tttcagggcgcaaattcagattgtcgtttttacgtagggcgttgccctacgctatataattaagccctttcagggcactccgcaaaattatcatttagctcatttatgcacggttatgaatcaaattttggtgcagttgccctgtattttatctgataagtctaaatatcaatctagttttttataacttcgcagcgcgaagatcaagaattagaattaaaatgaatcagacagcacaatcatggtggtttatcttttacaaagaccaactgcttcttgagaaaaaagaggatggcatatatgccatcccgtgtggagaaagctctcctattgttattaaagaaaaaacaaccgtacacaatatcactacactggaagggagaaactgcaaggctttctccctctcctctcccattgaagaatcggagcaatggatcatgatagggcttcgtgcctcctatgaatatcttcctttgtctcattatcagacagcaggaaaagcatatgagattctgcattgggatagaaacagccgcttttgttccgcctgcggcacgcctatggaacagaaagaatctatcatgaagcgttgtccgaaatgtgaccgggaggtatatccttccatttccacagcgattcttgtattagtgagaaaaaaagattcactacttttagtgcacgcccgcaattttaaaggaacattcaacagtctcgttgccggatttctggaaaccggagaaacgctagaagaatgtgtagcacgtgaagtgaaagaagaaaccggactggatgtaaagaatatcacttatttcggtaatcagccctggccttatcccagcggactaatggtcggctttattgctgattatgccggaggggaaatcaacctccaagatgaagaattgagttcgggagacttttatacaagagacaatttacccgaacttcccagaaaacttagtcttgcccgaaagatgattgattggtggatagagcatccaaatgaataaatcaaacatggaaaatatcatcaaaggaatccgtcagtatgttcccgaagcctgcttagagatgggtaaaatgaacatttactaaaaacaatcataaattagccccatggaattatcaacaaaaacaccccgaattgaagtagtagatgctcttagaggatttgctgtaatggccatccttctggttcataacctggagcatttcattttccccgtatatccggaaagttctcctgaatggctcaccattttggatgccggagtatttaatgcgacattttcactgcttgccggaaagtcttatgccatattcgctctgcttttcggattcactttctatatccagtcgcacaaccagcagttgaaaggaaaagattttggttaccgctttttatggagaatgatattgctggcaggattcgccactttgaatgccgctttcttcccggcaggagatgtcctgcttctgtttgttgtagtcagtcttgtactatttatcgtacgtaaatggagtgacaaagcgattctaatcaccgccatcttgttttcactgcaaccgattgaatggtttcattatataatgagccttttcaatcctgcatataccctacccgatttgaatgtcggagccatgtatgctgaagtagcagaatacaccaaagccggaaacttttgggattttctgataggtaatattactttaggacagaaagcaagcctgttttgggctatcggtgccggacgtttcttgcagactgccggacttttcctgtttggcttatatatcggacgcaaagaattgttcgtaactaccgaatctcatttgaagttctggatgaaagcacttattattgcagctatcagtttcgcgccactgtattctctgaaagaacagatcatgcaaagtgacagcagtttaattcagcaaacggtaggtactgcctttgatatgtggcagaaatttgcatttacgattgtactcgttgcttctttcgtgttgctttatcagaaggatcagttcaagaaaactgtatctaatctgcgattctacggaaaaatgagcttgaccaattatatttctcaatctattttgggagccattatctatttcccattcggattctatcttgctccttactgtggatatactcttagcctgattatcggtattattcttttcctggcgcaagttcggttctgcaaatggtggttgtctaaacataaacaaggaccattggaaacaatatggcataaatggacttggataggcacgaagaaataacagaaaaaaaagaaatagcactgactgaaaaatagactaagaaagcaggccacgaaatacacataactacaaacgaacaacttacgaatatgaaactgaacgtatcactctaaagcatcaacaaaacatgtgtatccgcagcctgcgggttgaaattgagatgatgccaatacaacaagattctcgcaagaaggattagcaagtggacttaaagaatgcaaaggaaatgaaagaactgtgccaaattggggaaaaagcccgaaaatagacagaatcagggctatgtatagagaaaaagaagcgcctccataatcttcgaaaagacgatggaggcgctatttattatttatctttcgttgtctattgctgaaatatcaacagaaaccaaatcagatacccaatgatttcttcactgcttcaatcttttccattgcggcagattcggcagaagcataacaattgcggcaacccatttcaccctgaacttccatatagaacttaatcttcggttctgtacctgaaggacgaacggaaactttgctaccgtcttcagtgaaatattgaagtacgttagatggttccggcatatcgattgcagttacgttacctttatcatctgtctgtttcagtgtcttataatctttgcttaagatcactttagagccacccaattctttcggaggattggcacggaagttctccatcatagctttgatttcttctgcaccactcttacccggtttcactacgtttacagtaaactctttagagaatccgtattctacgtagatatccagcaacaactgatacaaggatttaccattatcttttgcccatgcagcaacttcagcaatcaaacagcaagctgatacggcatctttatcgcgaacgaaatcttcggcaaggaatccgtagctttcttcaccaccaccgatatatttctgtttgccttcacgcagacggatttcacgggcaatccatttaaatccggtgtagcagtcaagcatttcgatattgttcttatctgcgattttcttgattagttcagttgtaacgattgtcttcacgcagaactcgccacctttaatcttacccagttgtttgtactgtgtcagaatataataaaggtacatcatacaagtctgattaccattaatcagtacccattcgcctttatcatccttgcaagcaatacccacacggtcagcatccgggtcggaagccattacgaggtcagcgtcaatttctttggcaaggtttacagccatagaaagagcttccgcgttttccgggttcggagatacgacagtcgggaagttaccgtccttaatcatctgttcgggcacagtaaatacgttttcgaatccccacattttcaatgcacgaggaatcaacatcatacctgtaccgtggatcggagtatagacaatcttcatatctttgtgacgggcaatagctgccggatcaatagaaacagttttcaccatatccagataaatcttatcgatgtcttcaccgataatctgaatcaaatccggatttccctggaatttaatatcggcagcagaagcaattgcattcacttcgtcgatgatacctttatcgtgtggagccaatacctgtgcaccatcgtcccaatatgccttgtaaccgttgtattccttcggattgtgagaagcagtcagaatgataccgctctggcaaccgaggtgacggatggcgaaagacatttccggtgtcggacgcatgtcgtcaaacagatatactttgataccattggcagagaaaatattagcagaagtctccgcaaacaaacggctgttgttgcggcaatcgtgacctactactacagaaatctgcggcaggtctttgaagttctttttcagatagttggaaagtccttgagtggcagcacctaccgtatagatattcatacgattgctacctacccccataataccacgcagaccaccagtaccaaattcaagatctttgtagaaagcttcaattagttcggttttatcatcgttttccaacatacgtttcacttcagcctgggtttcagcatcataagccggggttagccatttttcggctttttcagtgacctgtttaataagttcctgattttccatt

SEQ ID NO: 8109 - DNA, 16315 bp, Unknown
  gut microbiota DNA sequence
gggtaaatagactttctgcgaacgggggaattttattttttgttccatagtttatttgttttaatcaagaaaagccgttagaggtgaacttgcttctgctacgaagtcgacggcttgtaatcctaatcctgctttgtaagcctgtcttccggcttctgtagctgctttgaatgctttagccatttctaccggatttccggcaacggctattgcagtattcactaatacagcggaagctcccagttccattgcttcggcagcatggcttggcgcgccgataccggcatccactaccaccgggatacctgcctgttcgataatgatttgcaggaattcttttgtctgcaatcctttgttcgtaccgatgggtgcaccgagcggcataacggtagctgcgcctgcttcttccagccgtttgcagagtacagggtcagcctggcaataaggtaacacgataaagcccagtttcaccagttcttccgtagctttcagtgtttcgatagagtcggggagcagatagcgcgggtccggatgaatttccagtttcagccagtttgttccaaaggcttcgcgagccagttgcgcggcgaaaacagcctcttccgcgttacgtacaccggaggtgttgggcaataactgaatattcggatgaatgatatgtttcatcatgtcgtcctctttgttatccatgtcgattcgtttcatggcaacagttaccatttccgtacccgaagccagaatagcttgttccattacttcattggaattgaattttcctgttcctagaaaaagacgggagttaaattcgcgtcccgcaattactaacttttccattctatatattttagttgattatttaaatgctgattttttgagacagaagaacataagaacaaaaataaaacagtaggaataattatctaagtgcagcttttatgttcttttgttcttctgtctgaattaaaattccatttatcatttgacaaattatagatcactttcaatgattctacgtgtttcttctaccggattatctgctccgagaatagttcctgacagggctattccatttactcctgtatgaagtatggcaggaatatcctcaaaagtgattcctccgatagctacaacggggatttcgatattcgcttccttcatctgtgaaagaatagaagaatagccctctaaacccagtacagggcttagattctttttagtggtagtaaaccggaaaggaccgatgccgagataatcggctccggcacgatagtgttgtacgacatcttcgaaagtgtttgcagtgccgccgataataaaggcttcaccaagtatttggcgggcctggtcgataggcatatcctttttgcctagatgcacaccgtccacttccagctttttggccagttcgacgtggtcatccagaatcaggattgcttcgtgctctttgcaaagcggcttcagttgcagggctactgcttccacttcttcgagaagagcgtctttcatacgtagctggatccatttgcatccgccttcgagtgccatacgtgccgattcgaggtacgaataccgttcggtctgatgcgtgataaattgtagactaatcatctccttatcctccgcaagccgctttgataatcaccaggttatcgttctcgtgtagaatgaaacactcccattcgatacggggaatcattttgttgtttacggcgatagcaatgccttgaaccggaagttcgagctgtgctgtcagttgcgtaagggtagaagcaggagtcatttccacctctttgttgttcacttgtactttcattgtcctatcagaataaataagttgaaagtaaatacaaagagcgtgcttaaatggaaaggcgataagaagaaacacaatccctacgtcagtattaactgcctcaggttcctagggtataatctcagcccctcatggggcacccctttgtctttacgggagcaaagtaagcgaaaaagaaacagaaaaacactaaatcagtcgattttttttcatttttctgttgattcctgttttttgatgggatgagaaaagataaatcgggcgccatttttgtagctcttgtcaatccatatatcacctcccatatattggatggtcagtttacagatagccagtcccaaccctgtaccttgcacgaattcattcagcttttcgaaacgttggaatacgagttcctgtttatcttcggggattcccgtgccggtatctgtcaccgagaacagcatacattgcttttcttcgtccacttcataatccagcgtgatacttcctccggcaggagtgaatttcaaggcattattcagcaggttgataataatctgttgcagacgcaacgggtccgtgtagagcatgtaaggctccttaggcatttggagtttgatgtctacatccactgtcttgttccggttggtgagagtaatcatattctggcaatggttcaccagctcgcaccattcatagttgaattgcagctttcctgattccaggcgtgatatatccagtacatcgctaatcagttggagcaataaattggaattagtctggacgatatccgcatattctttcagttcatcattctgctctaccgaaccgataatcaggctggagaaaccgacaattgcgtttaaaggtgtccgtatctcatggctcatattcgagacaaaagcactttttaattgattagcttcttcggcgcgctctttggcgtcacgtaattcgatttcagactcttccagtttctttttatcttcccgcaattgttgcgtggttctttcaaggtgatttttcaggattttagtccggtaatagtaatacagggaaatcatcagacttcctactaatacgaggaagataatcaggataaattgcacttctgtcttgtaggctacaaagaaggggataggctgattgataaccattgagttgacaggcaacttcttgttttcaaatccccattcctttagtttcttcgcgtcaaatttatatcggttgggtaagacattgatgctgctgatacccgtttccttctggtctaaaaagcggtaagcatattctcccatattttttcccactccttcatattgcgggacatatcctccgatggcccaatagcctattgcggtggaagtcatactgaacacaggcaggagaggattggctttggaaaaagcataaacggagttgttcatgtaagtgatcccccggctgtcaattctccagataccaagaagcattgctgtgtttctgggaagattgcgcaattgattggcagccatatcgagtgtgtggatgcgaccgtcaatataggtgatggataactgcgggaaatgttgcaggtttttcttgaaccatgccagttcggcaagtccgttataggtattatccgatacaaataccaggtgctctgtgtccgggtagaaatcctgtatcatttcgatatctttgctgatgttatattcgtatgtatcacagtattttacgttgtactccttcattcgttccgttaagttgatacttacaggattatagttccgcatatcgattgaatcctccggaatacggatgccgttgcgtgatgccattgcgcagaaaacaggaagctgcttatatttctcatcttcaagatgaaggaaactgctccatgcttcaccacccaaaagaatcactaatttagctttcggatgtttgtctaaaatatcggttaatgtttttttccattggtgcgcctgcgttaaatccgtcgcattcatgttttctacaatggtcgagtatcttcctcccaattgggtgtaggtttctataaatgtgctgatgttatcgtaggtatatttagtgtcagaattgtatgaggtaatgaacaggatctcttcctctggttcttctgtggcggcagcgttgcagaaaagggggaagaaaagaagaacggcaatggagacaataaatcgtatctcttttcttttatatagtaccataattgtttgttatgctagtttatgggttgcaaaaatacaactaatgcgtttgatatacaataaaagtttgtttttttagtctgtaaaaaaggtcgctgtgaaaacacaacgacctttttcataagtatagttttgctagtaaatccggttacattcttttttcaaccacatcccagtcgatgatgtcccacagggcatttacgtggtcggcgcggcggttctgataatccagataataggagtgttcccaaacgtcaaatccgagaagcggtttcaaaccggcacgtaccggattgctgccgttggcttctttcgtgattttcagtttaccgtctttcccaacggatagccaggcccatcctgaaccgaacaatccgactgctgctgcgttgaattctttcttgaagttttcaaagccaccgaagtcacgtttgatggcttctcccagtttgcctgacggttccttctttgagggtttcggggcaaattgcaggaagtacagattgtgattcaatacttgtccggcgttattgaatatagctccgtccggtgcggttgcaacgatttcttctaccgttttaccttcatattctgttccgggtacgaggctattcagattatttacatacgtttgtagatgttttccgtaatggaaatctattgtttgctgactgattacaggttccaacgcattgtttgcgtaaggaagtttaggcatttcgtaagtcatggtcatcataattaaagacattaatatagtattcataatgttacaagttttaattggcttgttatactataataacagaagccttctgcaaaatgttcacagcatcttactttatttgtaaatgtactgtatacgttccacctctttcgggtgatcgcggttggtccggcagatccattggcccgtattgtcatattcataataagaattgccgtcaatccggttcccgtatttatcatacaggcaagtcaggcatccggacgttttttggttattacccaaaatccgttggtagacaatctgcgacagataaccgtatttatcgtattcataagcatctttttgtgaaataacctgatccggagaattggcaaaaagcaagttttgatgttgggatgaaatcaatcttcctttatcatcatatttgttggcggtgtatgcctgaagttctccgttcttattatattcgttggtttcggtcaataatccctgtttattgtaggagcttatgacgactcttccgtctgcatacttgagcgaatcactctcaatacttccatcggtaccgatgcggcgtgtccgccggtagagatccgttttggttttcggattcgtttgtacctcaaagatgcagtgaccttgcgggtcgtataatctattcgtctgtatttcattgcctggctgcccgttcttcatggtaagtgccagggtggagacgagctgtcctttatcgtcatacgaataagtggtcgaggtggttcctgtgctgtcgttttccgcagactttatcaatcgtcctccattatagtatttcacggaagtaggggtggatatgattgtttgcagaataaacggtgcccgcagtgcgttggcctggtcgcgaaattccttgtatctgtgtgtacaaagaaaatcctgcaacatacttaacgattcggaattgacaatggcaggttttaaaagctcaaaatcagctttttcactaagatattcaaggtcatccaggtgcgtacgtgctgtggaagtcaggtaaggtgattgcttataatcgtcaatgatctgccggatagctgttgcgtttcctttctcccggagactgtcaatcccttgaaacagaaagtcgtcgtataacgtgcggacttccgaaaggaagggacgtgtgtctttatcagtgaagaatttctgcatggcggcattatcaaagaatgctttaaaattcgcagaggtcggattactctttacgatctgataaagccgtttgttttccgcagtgttgatttgagagataaacttgccgttcggatattccgagatatacgtttgatagatgttcagcgcaggtgttttcagcatcccttccagtagggccagttcgcggatgtcccgcaccttttgcaagagggcggagtctgccggatagccgcttgactggatgctgtccatcaatgtcttgctaaagggaatctgctctttcgatgcttctaagatggagataacagcctgttccgctttgtcttgtacgttggaaagctgtattttctcttcttcgcagatattcggaaaataagctttcgtagcttgttcgtagcagccgaaatagttggtggcggcttgctcactttgtttgttccacaattcgttgagaacgtccaacaatgccagttcttcggcataataggtttgcgtctcgtcatctatcttatcacggtttttctgccatttgtcggcgtcattatcgttcagataccttagcagcttttccagacggctctgcttttgtgccattgcctgtggaatgcaggcaaccagaaacaaacttaaaataattgataaaaatatactccttttcattgctttttggggttaggttaaaatagttagtgatgaaaattcataaaaataccttcattctcgaatgaatattatacttttgtattgagaacaaatttgagtgccaagggtttgttaaaaatccacattgtttttataatgctgttatgaataccaattatatagatgaattgaacgagagtcagtgtgcagcagtgacttataatgacggtccttcgctggtgatagccggtgcgggttcggggaagacgcgtgtgttgacttataaaatcgcttacttgctggagcaggagaacgggtacaatccgtggaatatccttgcgctgacctttactaataaggctgcgcgcgagatgaaagagcgtattgcccggcaggtaggtatggaacgggcacgttatttgtggatgggtactttccattccattttctcacgtattcttcgtgccgaagcacaatatatcggatttacttcccagtttaccatttatgatacggctgatagtaagagcctgctccgttccatcatcaaagagatggggttggacgagaaaacttataagccgggagtagtgcaggcacgcatctccaatgcaaaaaaccatttggtcactcctacggggtacgctgccaataaagaggcttacgaaggagatatggctgccaagatgcctgctattcgtgacatctatacccgttattgggacagatgccgtcaggcgggagcgatggattttgatgatttattggtatatacctatattctgtttcgtgactttccggaagtgctggcacgttatcgcgatcagttccgttatgtgttggtggatgagtatcaggatacgaattatgcgcagcatagcattgttctgcaactgacaaaggagaatcaacgtgtctgtgtggtgggagatgatgcgcaaagtatctattctttccgtggggcggatattgataatattctctattttacgaaaatctatcccaacacgaaagtctttaaactggaacagaattaccgttctacgcaaaccattgtttgtgctgccaatagtctgattgaaaagaacgaacgtcagatccggaaagccgtgttctcggagaaagaaaaaggggaacccatcggtgtgtttcaggcgtatagtgatgtggaagagggtgatattgtggctaataagattgcggagctgcgtcgggaatatcactacggatatgctgaatttgccattctatatcgtacgaatgcgcaaagccgtattttcgaagaggctcttcggaaacggagtatgccttataagatttacgggggactctcgttctatcagcggaaagagataaaagatgtgattgcttatttccgtttggtggtgaatccgaatgatgaagaagcgtttaaacgaatcatcaattatccggctcgtggcattggagataccacggtcgggaagattatatcagcggctaccaatcatggcgtaagtctttgggcggcagtctgcgaaccattgagttacggactggatataaacaaaggaactcatgcaaaactgcagggctttcgtgaactgatagaaggttttattgccgatcaggcggataagaacgcttatgaaataggaacggatattatccgtcagtccggtattatcaatgatgtttgtcaggacacatcccccgagaatctaagtcgtaaggagaacatagaagagttggtgaatggtatgaatgacttctgcgctttgcggcaggaggaaggcaatccgaatgtgtctcttactgatttcctttcggaaattgcgttgctcaccgatcaggactccgacaaggcggatgatggggaaaagataacgttgatgaccgtccattcggcgaaaggattggagtttaagaatgtatttgtagtcggtctggaagaaaatctgtttcccagtgggatggtcggagattctccccgggcgctggaagaagaacgtcgcttgttctatgtagctattacccgtgcggaagaacattgctatctgtcttttgccaaaacccgtttccgttacggaaagatggagtttggaagtcccagtcgtttcctgcgtgatattgatgttgattatttgcggttgccgcatgaagcaggagtgagccgtgctgtggatgaaggagcgggacgttttcgcagggagattgaagggggatttgcccgttctgcttctccgtcgcgtgcgcctttcggtagtaattcttccgagcagcgtgaacgtccgaaagcacagattattgctcccagtgtaccgagaaatttgaagaaggtaagtgctgttggtggaagtagcagtgcgcagatggcgtcttccggttcagcatcggtagcaggagtacaagtcggacagatgatagagcacgaacgtttcggattgggcgaagtgctgaaagtggaaggaacgggagacaatgcgaaagccactattcattttaaaaatgcgggtgacaaacaactattgttgcgtttcgctcgttttaaagtggtagaataaataataacactaaatagagaggctcatgaagaaacaactaacagtaattttgctttccgctttgcttttgagtggatgtgcgtcggggcgtatgggaaatccgggagctatcatggcgggtgcttctatcggaggtagtctgggaagttcgataggcggacttatcggagataataatcatggctggaggggcggttatcgtggctctgccattggaaatattgtaggaaccattgccggtgcagccattggaaatgcgttgacggcaccgagacaagagcagatagaggaagatgcgtatattcctgaagtacgggaagtacgtgtgcaaaagtataagaagcagccgcaagtgcagccgcccatttctcaactgaagttgcgcaaaatccgtttcattgatgataatcgcagtcatgtgattgatgcgggagaaaatagcaagataatttttgagattatgaatgaagggagaaatcctgtttataatgtagttcctgtggtagaaacggtggggaaggtgaaacatctcggcatctctccttcggtgatgattgaggaaattcttccgggtgaggggatccgttatacggcttcgatccatgccggtgaaaggttgaaagacggtgaagtgacattccgtgtcgcagtggcggacgagaatggggtgatttgtgattcgcaggaatttaccttgcctacacagcgcggaaactagagttaaaagcccgaaatatccggtttaaatatagtgacggtatatgccttggatagtgacgctatcctgtgcatataccgtcactatgttggtgggatagcgtcactctttaatgatccattttcctaaattccgtttctcggcatcaaaggaaacacctacctttatgagcttcctgccgtcaacactataaggtaacatataacctttttcatctatctgccgtaaagcgtcttcggctgtaccctctagtttgaattcgaatacatagatataatcggcggtttttactactgcgtctgcacgaccgatagcggtacgtacttccgcctgtgtgaattgccccattagtttgaagaccaaatagaatacaacttgatagtgacgttccgttttcgaattcaattcgtaagggaagtcggcgaagaaacagttcaagcgggtaaggaatgcatcaacatcacccgtttccaattcatgaacaaacttgccgatataaaacgaagtatcggtagacgagacaggagtataaaagggggcggcaaaattaagaaagccatatttcacttcttcattaggaaatcccaatatatatacacgaaaacgttggtcgtaggactttatcgtcagatacccgctttgataaatcatcggtatgggattactgatattcgccctgtcgtcactcaaagaggcggaagaaacttcgatgccatcaagttcacgaaggtcaaaatcagtctttttaagtatctccaccaggaaagtgggagtgccgctggcaaaccaatagtcgccgaaacgcagtttgtcgagggcgctaagtacgctaaacgggttatatattggagcaaatcccttgctcggagtaaaacggtaaccgtcatattgtcgggtaagttgttccactacattgtcataagttgcttccgtttgtgcggccagtgcttgaagttcaggagcaaaagttgcttctatttcagggcgagtcatgccgcagagagcattatattcaaggtcaaagctgatatcgttgagttgattcagtgtgctgaatatccccatttgcgcaaattttgtcactccggtgataaagacaaactgcaagtaagcatcggtacttttgagcacggtataaaaggctgtcaatgttttacgatagtcgtcttgcaattccggattatcgaatgattgtagcatgggtttatcatattcatcaacgagcacaactaccctgcgtccgttttgttcataggcttgttggatgattgtggcgaacctgccggaaaatgtcattgttcctttatcaacaccgtattgtgtttcccaccttgtcaggtgaaattccaacattttctctaatcgttctttgctgtcatatttttcagcatttaagtcgaggtgaagtaccggatattcgaaccaattctgttccaattgttcgatagcaagtcccttgaagagttctttctgtcctttgaaataagcttcaaaagtagatagtagcagactctttccgaaacgccgcggacgactaaggaaacaaggagcacctgcttgtaccaaacgaaacaccaacgcagtcttatccacataaagaaaaccttcagagcggagtttttcgaagctttgtattcctatcgggagtttgcggagcatattaacggatggattcataacaactttcattttgatataacaatgatatgggcaaagataacaaattcggattgtattttgtccaagatatgcgtaaaaacgttatctttgttcatgtttcaacaaaaaacattagattgatatgaaagagatatttagaagatatcctatcgggatacagaattttgagcagttacgtaatatggattgtgtatatattgataaaaccgcattgatttatcaattagtccatactgatactgtgtatttccttagccgcccccgccgtttcggaaaaagtcttctagtctctactcttgacgcctatttctccggaaaaaaagatttattcaaaggactggcaatagaacagttggaacaagaatggactgtttatcctgtgttgcatattgatttcagcagaacaaaatataccgctatcgaagacttgcaagagcaactgaatctttatctaagcggatgggagaggatttatgggaaaaatgaagaagaaacgagctatgcagcgcgtttgacgggtttgcttcagcgaatttaccaacagacaggaaagcaggttgtcgtattgattgacgaatatgatgcgcctttattggatagtaatagtgactctgctttgcaaggacaattgcgaactgaaatgcggaagttcttcagtcctctcaaagcccaagggcaataccttcgttttttatttctgacaggtatcagtaaattcagtcagatgagcatattcagtgagttaaacaacttgcagaatatcagtatgagtgatgattacagttctatttgtggtattacagaaggtgaattgcggagtcaaatgcaaccggatattgagaggatagcgcagaagaacaatgagacttatgaagaagcctgccagcatttgaaacggcaatatgacggttatcactttagcaagaattgtgaagatatttacaacccgtttagtcttttcaatgctttttctcaaagggattataaaagtttttggttctctaccggtacgcccactttcttgattgaaatgttacagcgaatggacttcagtctcaatttattggagaagatggaagtgaaagatgaggactttgataaagcgacggaggttatcaccgatccgattcctgtactttatcagagcggttatctgactatcaaaggatatgaatctcttttccgtacatatacattaggctatcctaatgaagaagttaaaataggctttattgagacgttgattccctcttacctcaatcagccgacccgcgaaagtaatttctacgtagtctcttttgtcagggatttgatgaaaggtgatattgagcagtgccttcttcgtactcgttctttcttttcttctataccatacgatttggagaacaatcaggagaagcactaccaaactatcttctatttgttattctgtttgatggggcaatatgtggatgtagaggttaagaatgctattggcagagcagatgtggtgataaagatgtctgatgcgatttatgtgtttgagtttaaagtggacggaacacccgaagaagcgttggcgcaaattaatagtaaacaatatgctattccttatgagatagatcatcgcaaggttgttaaaattggagtaaactttgatagtacgacacggacgctgggacagtggaaaataaaataggaaaataatatgagaaacacactattagcagttggaattgtcctgatgggaatctctgtttcggcacaaaccagagtgattgaatatccggcaacaggagcacgtacaactgatgcactggagttatatcaagttgaggtttcagatacagctgttgttattaagggcgatatgtatagtcgtcccaattcatgggttagcatagcgtcttcctctgtactaaaaggaagacaaacagggaaaatgtatcgtctgatacgtgcgacaggtataaaattggataataaggaatatatgcctgtatcctgtaaccgttcatttacattacaattcgaaccaatagataaacgtgataaatcagtggattttgatgaaatgctgactggagacaatggctttcagataaatgacatttctttagagaagccggatcaaaagaagaaaatacattgtcgtattgaaggtaaagtgattgataatcccgcatacagtcgtttaatgttgatgccggaaggcactgatccccgtgtgcaggaatggatttctgtcccggtgcgtgatggaaaattctcttatgatttatatgttgataaagaagagccctatatattatatgcctggagcgatcagatgaatggtgcgtggcatccgatttctttcttttccgagaatggtaaaatagaattggccttgtattcaatggagaaagaaccggaaatacattcgaatgcaccgttgacaagtgaacttcttcgtttccggaaagaaacgaatgatcgatttatgtttcctcttgagaaagagagagaacgtttagagcaggaagggaaaatagaaactccggagatgagggttttacatgggcaatttgcaaagacggaggacaagcaggaattagatgcgattcgcaaaaaggcacgtcaactggaaaaagaagggaaagcatatacggaagaatataaagcatttgaacaaaagagccaggaagtgtatagtaaatatagggaatatcaaaatgagtatatccagtcaaatcctactttagtgggactttacttattgactcgtcaggcaagaagaatgcatgattccgatgaaaatatgactacttatatcaatctataccgtacagtatacgctgaaaaatttactgataatcctatgacggagtatatgaaattatggattgtaagtaacgaaataaagatcggcggaaattttgttgactttacagcacctgatttacaaggtgttcaatatacattatccgaagagatacagggaaaagtagcgttgatcgatttatgggcttcatggtgtggtccttgtcgtcgtacttctatcagtatgattcctgtttatgaaacgtataaagataaaggatttgtagtagtgggcgtagctcgtgaacgcaaggctgctgatatgaaaaatgctgttgctaaagacaaatatccatggctcaatcttctggaattaaatgatgcaggcaagatctgggagaggtatggtgtaggtaatggtggcggatgtacttatctggtggataaaaatgggaaaatattggctattcatcctactgcggaggaggtgagaacttggttggagaagctgctttcggattaaaccacggacataatataagaagagacattttattgggaatcaaacattttctgcttacctttgttagcatgaaacaagataacaagaaaggagacgaacttatgccgagtaattatattcgtttcgattgggctatgaagcgtttattgcgtaataaagccaattttgctgttcttgaaggccttctgactactcttttggatgaaaagatagtcattcagaaacttttggagagtgaaagcaatcaagaagatgaatttgataagtataatcgtgtagatatgcttgctgaaaactcgaaaggtgaacttattctgattgaagttcagaacaataatgagtatgcttatttccaacgtattctgtttggtacttctaaattagtgaccgagtatattaatcgtggagaaggctattataaggtacgtaaagtatatagtgtcaatattgtctatttttctttgggtagtggtaaagataccgtatatcacggtaaaacggaattccggggaattcatcagggagatatgcttgaactgactccttttcagaaacaaacttttaaagtggatacagtaagtcaactttatcctgaatattatattttgaaggtcaatgattttaatcaggtagctaaaagcccattggaagaatggatctattatctgaatacaggtgatattcctgatagtgcgactgctccaggtttaacagaagcccgtgaacgattaaaacttgacaagatgactaaagcagagcttgatgcttactatcgccatttggataatattgtcatattaaaagataatatatttacggaacgtgcagaaggacgtgcagaaggacatgctgaaggtcgtgtagagggtcatgctgaaggacgtgtggaaggtattaatgaaggccgtctggaagagaaaagggaagcagcaagcaatatgaagactctgaatattcctcttgatgttatttcgcaagtcacaggcttgtccatagaagaaataaaggcgttgtaataaacgcctctatataattgttagtatcctatatcatcttagacatgatataggatttttttatatatggaagtcttgaaatgagaacatacataaaaattggatatcttatgcgtttctcctgcttgaatttaaaacagagtcttgtatgcgaataaatatgtgagtaattagggattgtggaaatccgtggtgctttgtttttaggttatttggatgcttattgtttgctgtaaagaggctatttgcggatattcgtttgattatttgataagtactttctttttgctatatttgatttggatggaatatagtgtgaaatagctgaaaatataccgataaatttgggtctcaccgatgaatgtattgttcctcggtgaggaagggagcgacgcacaccgggcaacgagtcgttcctcggtgaggaacaaagcttagttagcggtaaataattcgttttttatcccttatttatgtaatatttag

SEQ ID NO: 8110 - DNA, 230 bp, Unknown
  gut microbiota DNA sequence
ttttttattgggacatcaagcccgttggacatatgaggatggggaaaccctatgacctcgtttttaccacaaagatagtcgcggtcttgactttcttatttaccgggcgtaaaaaatctgtttttttatatacctttgcaaactatagaagaacccgaaaaattcataccatgagccgattaaccctatttcgcgtaggatttcttttcctcattttgttctttaccact

SEQ ID NO: 8111 - DNA, 14370 bp, Unknown
  gut microbiota DNA sequence
gcagataagcaacgaagtcatctccgtagaatttcttcgcccataccagcatatcaatctccgaataatatccggcacgcagcggatcctctaccaatgtgaaccctgtgttatcccacaacgcatgcaggcgtcgatgaataatttcctgcatcttggctttataactatcttctttatccagaagcgagaagatggcaaacaaactcatctgcatttgttgaggtagagaaagccctgcggtatgattcagcgcaatctgccggctgtcagccaccatgcggtcgataaatttcatcttttccggttgcaggctaagactggaataacgtttgttcaatattgatttctgctcctccgacaggcgggcaatcattttgtcgtagatgttgtcttcgtgtaaagcaatcactgcggttctccatcccgtagctccgaaatatttggagaacgaataaacgcaaagcgtattgtgtggcaattctgccatcaatgaacggaaatgagggataaacgttccatacacatcatccgtaataatcatcaggttcggattgtcattcttcacaatgttaatgatacgttcggtagtctccctgctaagtgcgtaactgggcggattactcggattggtgataaatagcgctttgatccgcggatctttcaacttgtctatatcttcatccttatactgccaggtgtgcaatccgtcaggagtcatctggtcggcagaaatttcggtaacgtcaaactgatagcgtcgcaattccgggatttctatataaggagtgaacacgggaatcatcaaggcaatggcatctccctgattcaacaggaaattctcttgcaaagaatcgaacagataacacatggctgccgtacctccttcggtggcgaaaaggtcaaaagtccctttcggcggacggcggtcacacatctcttgtgccaagtaatcctgcacgattaactctgtaaaatgtaaaatacggtcgggcacaggatactggtcgccgatgaccgattccgcccattcgtgaatcagcgtatccggatcggcagcatgctccatcaacatataattgtagccctctttcagcagattagcacccggagctttttcattctctttcaggaaagcctcgaaacgggcggctattccagccttttgcggaatacctgctattccttcttccagtgaaaacgcatggcgacattcgcaaagtccgaattgtcccaacagaaaaaatgcttcgcgtggttcggtagcaatccagttcggattacctcttcccgcattcagcatggtatgtgctattttcttaatgctttcgtctgccatatcgatcagtttgtttttcagctcgaacgggctgatcgtttccattttcttggcataacttttcgtaatggcagggttatttgttttcttttccataatgatatttatttatatagttttacataagtaacacgatgacgactccccagataatcagtagcgtattgccgactgcatacgtcactgtataccctaatgcaggtgtatcactttccactgcatcctgaatagctcccagtgcagctgttgtggtacgtgctcctgccgtgcatcccaatgaaagggcagggtggaatttgaacaggtatctcgccatcagcaatcctgcgagaagagggatggctgttgccagtgcaccgacaataaacagactgattccgacttccttgaatccggctataaaactgggacctgcagcaatgccgaccactgcgataaacatattcagccctacattattcaatacccataaagagggttcggggatacctccgaaagtaggatgcttgctgcgtaaccaaccgaacagaagtccggcaatcaatgcgccgccactggtagaaagactgataggaacacctcccagatggatagccagtgcgccgaagagaccaccgagcaaaatgcccaggccgacgaaaatcatatccgtctgattggtcggacggtcaatgtaacccatttgtttggcagcgccttccacttcatgtttaagaccggtgagctcgagaatatctcccgaatccacaactgttttggataataccggaacattgattccggcacgcttgatgttacggatactgactccgtgcataaatttctgtgcccggattttggctaccgtttccccggcaaacgtccggtgagtcaccattacgggaagagtttccgccggaaaatccaataattgtgcgtcgatcacttccggaccgatccagtcttcttctccgataacaaactcacggcgtccgcttagtaccacttcgtcatttttgcgaagaatcaggttcggatcaacatctttcactactcctctttgacgaatccgctctacaaacagccgtttatcattcttgcataaatatgtttcgagttcactgactttctttcctttgccgaaccattcattggtgattttataggcacggaataccaccggacgaagagccggggaaaatccgggttcatcagcttccgatgttcccatttgagcctccagttctttgcagtcggctttcaccttatccagtccgcccagcattttggggccgagagaagctagaatccatgcagaaccggctgtaccgaagatataagttacagcgtaagctaccggaatcgcattgatgaatgttgctttttgcgcatcgctgattcccaattggttgattgtatcgcttgccacgccgatcacggcggatatggtctgtgagcctgccaaaagtccggcagcttcccctacatggtatcccatgattttggcgagtatccacggtgctgccaggctgacaatacacatcagtacagcgaatcccacctgtggcagcccatcctttttcaatccgcggaaaaactgcggacctaccttatagccgacggcaaacaggaaaagcagaaagaacacagctttcatcgggccatccacagtgatattcagttgcccgaccaacactccgaccagcagaacactggtgactgtccctaatgagaatttccctattttgagtctgcccagccagaatccggcaaagagtgtcaggaaaatagcaagttcagggtgtacccttagttgattaataatccattccataattaagttgttgttttaggttatgtcatttacaacagttattgcgtgaaaagagtttatagtgtttatgataaatagatatataaatatccgatgaactttaaatttctctatttcgcttttttgttatacttttgttctttcaaaaataaaactaatcatattctgtatgaaatcagacatagaaattgctcgcagcattgagctgaagaagattaagcaagttgccgaaggtgtcggaattcctcgcgaggaagtggagaattatggccgctacatcgcaaagatccctgaacaactgattgatgaagagaaagtgaagaaaagcaatctcatcctggtcactgctatcacggcaaccaaagcgggcattggcaaaactaccgtatctatcggtcttgctttgggactgaataaaattggaaagaatgcgattgtcgctcttcgcgaaccgtctctcggtccttgtttcggaatgaaaggaggagcggccggtggaggatatgcacaagtgcttccgatggataagattaaccttcattttacgggggattttcacgccatcacctctgcccataacatgatttcggcattgctcgacaattatctctatcagaaccaggcaaaaggtttcggattgaaagaaatcctttggcggagagtgcttgatgtgaacgaccgttcgttgcgcagcatcgttgtcggtcttggacctaaatccaacgggattacccaagagtccggtttcgatattactcctgcttcggaaattatggcgattctttgtctttccaaagatgtgagtgatttgcgtcgccgtattgaaaacatcctgttgggcttcacttatgatgaccagccttttaccgtaaaagatctgggagtggcaggagctattactgtgttgctgaaagatgccatccatcctaatctggtgcagactaccgaaggaaccgctgcttttgtacacggcggtccgttcgctaatattgcgcatggttgtaactctattctggccactaaattggcaatgtctttcggcgattatgtaatcacagaagccggattcggtgccgatcttggtgcggagaagttctacaatatcaagtgccgcaagagtggactccaaccgcgtctcacggtgattgtcgctacggcacaaggattgaagatgcacggaggtgtcagtctcgaccgtatcaaagaaccgaatatggaaggactgaaagaaggattgcgtaatctggacaaacatgttcgtaatcttcgttcattcggtcagacggttatcgtagctttcaataagtttgcgtctgacaccgatgaagaaatggaattgctgcgtgagcattgcgaactgttgggagtcggttttgctatcaacaatgcgttcagtgaaggaggagagggggcagtagacatggcccgcctggtggtagatacaatcgaaaataatccgtccgaacctttgcgttatacatataaggaagaagataatatacagcagaagattgaaaaggtggctactaatatttacggagccagtgtaattacttacagcagtattgcacgcaaccgtatcaaactgatcgagaaaatgggcatcactcattacccggtttgtattgctaaaacacagtattcattctctgccgaccctaagatttatggtgcggtgaacaacttcgagttccatattaaagatattgtaatcaataacggagctgaaatgattgtagccattgccggagaaattcttcgtatgccgggattacctaaagaaccgcaagcattgcatatcgatattgtggatggagaaatagaaggattgagctgatatacacttaaagaacacttgttctggcgctatgccggtaaaaataaatccccgtctttccctataaaatgaatgtggaaagacggggatgactgtatatagagtccagtgtgcttctcttttctcttcatgcacactggacggttgaattcgtacttgttgtgggtgatatatgacatcatatatttcttttatagtaagaaaaacgaaattccggaaagatggttcgaacgggaccgttaataaataaaaaaaaggcctgctcctttcgtaaagagcagaccttaaattgggaattaagctaataacagtttacaattactagctttaaaattgtgttttagtaagcgaaaagaggatattttttcattgtctcattgacgcgtgcacgtacttgtgcaataacttcctcattttctacgttagacaatacagtttcgatcatttctgcaatttcgagcatcaagtcttcttttgcaccacgagttgtgatagcaggagtacccaaacggataccggaagtctggaaagccgaacggctgtcgaacggaaccatgttcttgttaacggtaatatcagcagaaaccaatgctttttctgccactttacctgtcagatcaggatatttgctacgcaggtcgaccaacatagagtgattgtctgtaccaccggaaacgatggtaaagccacggtcgatcaaagcctgtgcaagtacggcagcattcttctgtacttgtttagcatattccttaaattcaggttgcaggatttcaccgaaagcaactgctttagcagcaattacatgttccaacggtccgccttggatacccgggaaaacggcagaatccagtaattgagacatcatcttgatctcacctttcggagttttcttaccccatggattggggaaatccttacccatcatgatgacaccaccacgaggtccgcgaagtgttttatgtgtagtagaagtgacgatatgtgcatatttaaccggattttcgagcactccggcagcgatcagaccggcaggatgagccatgtcgatcatcaggatagcgcctactttgtcagcgatttcacgcatacgtttgtaatcccattcacgagagtatgcagaaccaccaccgataatcatttttggtttctcacgaagagcgacttcttccatctggtcgtaatcaacgcgtcctgtttcctggttcaggttatattcgcaaggagtatagatgataccggaagtgttcactaatgaaccgtgagacaggtgtccgccgtgtgccagatttaatcccatgaatttgtcgcccggattcagaacagcaaggaaaacagccgcattagcttgtgctcccgagtgtggctgtacgtttgcccattcagcgccgaaaatttctttcaggcggtcgatagcgatttgttcgctttggtctactacttcgcaacctccgtagtaacgtttgccgggataaccttctgcgtacttgttagtcaggcaagaacccattgcctgcattacctggtcactcacaaagttttctgatgcaatcagctcgattcctttcaactgacgttgatgctctttttcgatgatgtcgaaaatgatgtcgtctcttttcattcttttataagtaagattaaatttctaattcgagatacctattttaagcgcacaaagttaatgaaaataaataaagaatgaaggaacagtaagaaaaatgttagtaaaaagcgggatttaatgatattttattcttaaagaatgaatcccaatgaaaaacttaacgcgctgtcacggcgacggaaaataatgttgctcacacccgtactgccgtcggagttgatattgtcataaatgatagacttggagatgtttcctataccttgttcgtagcggaaatcgaagaagatacgtgagatgttgacacctacgccaatcactgcgctgacattgaacggatacaacttttcgtgaatacccttttggtcgaaatttttaaaagtgatttcattgtgctttccccataggtagcgaagcttgggacctgcgaagatagacattccgtaaggtccttttttcaccacattatagccatatagaacgggaaaatcgacactgtgcaacaccgattgtaccgatgcgtaatcaggctcgatggcaggatgctgggaaccgagtttgtcgaacgtaatctcacctttgcttacattgtacgacacttcaggctggataaaatgttttttcatattgatgcgcatgaagagagcaccgaaataaccaatcttatagttattctgcacctcatcgatagttacatctttaattttcagttcagacaccatgaacatggaagagttgaagcccgctttgataccgatatttattttttttgtgttgggacggtctactctgtctgcgttataattctgtccgacaaccgggctgccggctgcaactaataaacctaaaaaaatgaatttacgcagcatatccatgacagtatcgttccttttatgattttttcttttctacactccaaccgaacttaccgattttctctcccaaattgtaatatcctccgtgcacatataccagcggattagcttccgccagttccagctttccggtttcggggttcaggttccgttcgtcggcacgcacatttaccacgtcggcaataaacatatcatgtgaaccaagagagatgatttcttttacacgacattcaatgcaaagaggtgattcttcaatcagcggggcactgactaccgtacactgtccgggtgtcagtttcatctcttcgaatttatgataatcacgtcccgaacgaactccgcaccagtcggtggcaaaagccatgtctttggttgtcaggttgatgacaaactccatattttttttgataatatcgtatgaatggcgttccggacgtacggatatataacacatgggcgggttcgtgcaaatcgtacccgtccatgctactgtgaacatattatattcgctttcctcttttccgcaactgactagtacagccggcagcggataaatcatcgttcctggtttccagtcctgtttcatagttgtcatttttttcaccacagattcacacagatatagatattattattccataaaataaaaatctgtgtgaatccgtgtaatctgtggtgagctgaagttagaggattgttatctcttctcgtttctgttctttttcgcaataatggcatttcacgatgcaattatccttatctatcacatgaaagatggtgctcatcggttcattgttggtaatacatttcggattggcacatttcacgatgccacgaagctcatccggcatttttacctctttcttttctactacctcgtaatcgcggataatgttcagtttgacgtgcggtgctactaccgaaatacggttgatctcttcgtcacaaaagaatttatctgcaattttgatgatcccttttttgcctagttttttactgtcgaggttgaatccgatcgtgatattgcttgtcatttgttccacaccgagcagttgcactacggtgaagagcttttcagatgggatatggtcaatcactgttccgtttttcagggcagctacttgcaatgcttgtttattttcgctcataataaaatatcgtttttaacgtcctctaatgtgatacctaatacatcgcaaaggattgcttcgcgggcatacagaccgttttgtgcctgttggaaataatatgctttcgggttgtcatccacatcgtaagcaatttcgttgacacggggaagcgggtgcaggatacgcaggttcggacgtgtgttttccaacattttgttacggagaatatatacattcttcacccgttcatattccatcaggtcggtgaaacgttcgcgttgcacacgggtcatatatagaatatcggcgtcggcgataatctcttcggaaaagtctgtatgttcaacgtattttatttggtgcgttttgcagtaaagtttatattcttccggcattttcaattcttcgggagcgataaaatggaaagtcggattaaagtgtcgcatcgccatcagcaaagaatgtacggtgcggccgtatttcaagtcacccactaggaaaatattcagattttccagcgttccttgcgtcttgtagatagagtaaagatcgagcatcgtctgcgacgggtgctggttagctccgtcacctgcattgacaatgggcaccggggctacttcgctggcatatcgtgcagctccttcgagatagtgtcgcatgacgataatatctgcatagttactcaccatcatgatcgtgtctttaagtgtttcccctttggaagagctggtggccttggggtcagagaatccgattactcgtgcaccgagacggttggcagctgtttcaaaactcaagcgggtacgggtggaaggttcgaagaacagggttgctactacctttccttgtaataaccggcgattggggttcatttcaaactgcttcgccatttcgagcatgtagaggattttttctttagaatgttcggcaatggttactaaacttctgttttccattttgttatcttttatgtggatagaacttgttttaccggagcgtaaaggtacgaagaatttgtgaaaagcacagatttttcgtaccttttttatcagcttttaatcagtcggtttatttccgtccgctggctagtgctgcaatgatatatttccccggtgctccgattttgctccaggccgtattggagagtagtttccatacttgggtgcctttcctgccatagtctgataaccggagaattgtctgcctctccttcaaattagtcactttgtggcgttccagactttctatcagtccgttcatgttgtgtgtggcctgattgtatgcataccccggaatttcaaacgaagcatcgcttatttcttcttcttcagtatttagtttagtttcctttagtttagtttgtcgagaaatgtctgcattttctgaactcacctcctcttgagttggaaaaatgttagcattttccttgttcaactcatccttgtgtatcctttttctctgtttggtctctaataaataaggtagttgtgagaaatctatttttcttcgtgtcgtagcttcgaaccacactctttgaatctgttccgaagtgagtataccgtgtttctcgtatgtttccttatggaaaaaacctttttccaataacaggtcgacaatcttttccatcatgtcctctttgatcccgccacctactttgcggacgaaaataagattttgttctttcccccaagagatgtaatatccctctttatagattttgcaaagcaatctcatgaccatgtaagaagctaacactccgaattttgcttctaataactccatcacttcttcgtcaaaaaagtttgccggtgtcgggaagtaaggtatccctttattaatcatattcattattcaatattttttattataaactatacaatagctttccattccatcaggtttccgatcatgaatcttctccatcctttttgttcctcactccaatagataatagactcttgttgtgctgtgatattaaattctctatgaaagaatttttcatatcctaccagtgttcctttttccaggcagaacgtaccatcctgtttatgaaaagctatcattacatttccatacaacatatgttctattagtttaatgcactcctgtacaattctctctgcacatttatccgaaatccccttttcggcagtaatacgttttttccatactaatttgcaagcttccaacttgcctttcttgatcttttgtctcattttcttctgttttttgattgaaaaattaagtttttatttaaacataaatatcccctgtcggatagtgacggtatgctgttgtcatagcgtcactatcctttcattatagtgacgctatgacaacagcataccgtcactattttttgagagaaattcttgttgttttccgaccggttgaaaacggcggcgaaggtaggccttatatttcacttgtcccattattttttcttagtacttgcttttaagcttttcagcctgttctcttttttcctttttctctttcatatattcttcttcgacagactttttcaatgccgccaattcagcatgtatactgctaagttccattaacttatagccgccatgcttgtgaatgtataatactttttggtcatagatatattgggccagatttatcagcttttttttcttaggatggtggaaatatccatcgataaagattctcaaatgcatggtgagataaaggcggatatctccactgattgctattctgttttccagctcttcttcactgatgatttcttcctttgactgtcttctgggggctttttccactgtttgaacatttctttttgctttgttgtttttacttccttttttagatttttcgcttctcataattagttaatttttgcaatattaatgaatgttaattcgaaaataatatctggaaagtgaaattgaacctgcaaaaagatttgttcttttgtcgcttgccaaatagtatatatataaaataactagtgatgcaaatgatgaataaaaatggatttagtcgatgtggtgagaactacatcaatcgtttacgaaaggaagggcgttattctacggcgcacgtttataagaacgccctttattctttcgggaggtattgtggtacattgaatgtgtcgttcaagcaagttaccaaggaacgtttacgacgttatggtcagtatctttatgagtgtggtttgaagcccaatacgatttctacgtatatgcgtatgcttcgtagtatttacaatcggggagtggaagcggggagtgccccttatgttcctcgattgtttcatgatgtctatacaggtgtggatgtccggcaaaagaaagctttgtctgccggtgaattacataagcttttgtatgaagatcccaaatcggaacgtttacgtcgtacacaaattattgccgccctgatgtttcagttttgtggaatgtcatttgctgatttggcacatttggaaaaatcagctttagatcagagcgtgttgcgctataatcgaatcaagacgaaaactcctatgagcgtagaagtattggataccgccaggggaatgataaatcaactccggagtaatcaggaacccattcccgattgtccggactatctgtttgatatactttgtagtaacaaaaaacggaaggatgaaagggcatatcgtgaatatcagtctgctcttcggaattttaataatcgtttgaaagatttggcgagagttttacggttgaaatctccggtttcttcttatacactgcgccattcttgggcaacgacagcgaagtatcgtggagtgccaattgaaatgatcagtgaatcattggggcataaatctataaaaacgacacaaatctatttaaaaggttttgaactcaaagaacgtacagaggtaaataaagggaatttatcttacattagaaactatcgtttaggttgatagttaacgataaagtgttagaaatcaagggcgaaatgtttccgttacttcttaggtaacggataattattcggtgcaaagatatgcaaaaatacaaatagtaaacaagtaaaatcttcttttttttctgaattgttgaaatatgcaacaaaaatatatcaggacatgatgattctgtttgatcatgcctgaaattcctgtactctgtttccaaagatgttttcccttcacgtaggttagaaaaacatctttgtaggcagttcctgtccatgtttttctgctttcatctgtttttctgtgaatgagtaccttatccgttacctaagaagtaacggaaaaataaggggtaaaaaagtatgattctaacgaaagaaactttaagtgctgggcctaatattgggacaggggaaggcgtagcacactctaaacgctggtatgttgctctggttcgtatgcatcatgagaagaaagtagccgaacgtttagacaaaatggggattgaaaattttgtaccagtccagcaagaggtacatcaatggagcgaccgccgtaaagtggttgaatccgtgttgcttccgatgatggtttttgtacatgctgatcctaaagagcgtaaagaggttctttccttttctaccgttagtcggtatatggtaatgcgtggtgagagcagtccgactatcattcctgatgaacaaatggctcgtttccgttttatgcttgactattccgaagaggcaatctgtatgaatagtgctcctttggcacgtggtgaaaaagtgcgtgtcattaaaggtcccttgacagggcttgtaggagaacttgttacgatagatggcagaagtaagattgctgtccggttgaatatgctggggtgtgcttgtgcggatatgccggttgggtatgtggagccgataggggagaaacaataggcaactaaatgtgttatggtaacaggaaacgaatatatatttccgaatatagatgatgcactagaatatgtgttaaagaatgaacaaaaagcattggcttcagacaggaagagacaagttgctccttgtgtgccagaacagccgacttcatcttttttgaagcctggaatgataccaaaactgatttcggtggacagtttagattatccttatagcggatatttcaataatgcatcatcagaaagtttcgttatgtctcgattggcatcggggagatattcgttgaagcctaatctgtgtgaaagaaaatatctgtttcgtggtgagacagagtttcattctccttgtactccaagcctgtttcgcaaaaataaacagaaacaatatattgaagaattggcaattgggcaggaaatggagctcttaatgttgtcacatcctttagttcagctactagaccttggtgttgaattgaatggacaactatttcgctttgagatgaatttgtttggtttgactcaacattattacaataaaacatgttttctggacatgactagtagcccacaagtggcagcgttttttgcaaccaccgattacgattggaagacggatacatattcgcccattttagatgaggagcacgtggctggtattctatattattattcgttggatattgatactgacttcaaggaagttccacttacaacaataggattacaggtttttccacgtagtggcaaacagtatggctttctttataggttgacaaaggaacaggattttaacaccttttcacgactacaaatgatgcgatttaagcatgatcccaaaatagctcaacgtatttttgatgaatttcatggtggcaaagatctttttcctg

SEQ ID NO: 8112 - DNA, 37724 bp, Unknown
  gut microbiota DNA sequence
taacacgaacacctctaatctcacgtaaagcaaaatcataaccataatcaagatacaatgttccataatccacccaccaacggaatggcaaatcaccggcgggcctaccatcgtagtcaaagacttggtaatctattcccaaaccattgttatccaaacgaataccactttctatcggattattgtcagaaccaaaccataaatcaccaacccaagtacgccccatcaaatcgtcataaatatcttcatcgtcttcacacgaagtaaagccaaccaataaagtcagcatcatcaagatacccgcatatctctttatcattttcataattctctagtttattgcgtttattaatacaaaattagcgttttttatttactatacatcacaagccacaagttttttgtacctttgcgaagataatattaaaatttccgcatgaaacttctttggcttgatttaaatagttcgtacgctcattcttcgttggcattacctgccttacatgcccaaatagcaaataatacagacattgaatggtgtacggtttccgccacgatcaatgaaaacaccggcagtgtcgtcaaccaaatctaccgccatcaaccggatatcattgcagctaccaattggctattcaatcatgagcaactcctgcacatcgtttcacgcgcaaaagcattactacctcactgctgtgttatactcggaggtcccgagtttttaggagataatgaagctttcttatataagaacaaatttgtaagcggagtgtttcgcggagaaggcgaagaagtatttccattatggttaaaagtgtggaatcagccaagaaaggaatggaaatcaatcacaggactttgttacctgaatgaatcaggagaatatcaggacaacggacttgcccgtgtcatgaacttttctgaattggttcctcccgaaaaaagctgtttcttcaattggagcaaaccatttgtacagttagaaactacccggggatgttttaacacctgtgctttttgtgtcagtggaggtgaaaagccggttcgtaccttatctctcgaagcaatcaaagaacgtctcgacgtgatacacgaacacggaatcaaaaacgtgcgagtactggatcgtactttcaattacaataataaacgggcaaaagagctattaaacttattccgcgaatacccggacatctgtttccatctggaaattcatccggcactactttccgatgaactcaaacaggaattagccactctgcctaaaggtctgctgcacctggaagccggtatccaaagccttcgggaaaacgtgcttgaacaaagtcgaagaataggaaaactctccaatgctttggccggactccattatctatgttcacttgaaaacatggaaactcatgccgacttgatagccggactcccactctaccatctatcagagattttcgacgacgtccgtaccttaaccgagtatggcgcaggagaaatccaactggaatccctgaaattacttccgggcaccgaaatgcgaagaagagcggacgagttaggtatacagtactctccacttcctccatacgaagtactccaaacccgtgaaatcacggtagatgaattacaaacagcccattatatgtcccgcctgttagacggtttctataacactcctacctggcgaaatatcacccgtatactaattttggagaacccccattttatacatgacctactcgaccatctggtccggacagatgtcatcgacactcctcttagtctggaaagaagaggattaatcctttatgatttctgcaagaatcattatcccgactacctgacacaagtcagtattgcatggatagaagcaggtatgtcattaaaaaaagctccggcagaaaaagtaagaaccaaaagacagttacctcctgaaagttgggaagtagtatacggtgcataccgtgaaaatctacgactatgtttcctccctgtcgatgaagaaggacatggctactggtttggctttgaatcggaaattcagaagatacaacccgttttcaaagctagaacactatcataaacaaaagaaaagtattcccatattatgtgaaataattactattcactaatcgttcaaagcagcatatcctgtttttcaccgtccatacaataaactttactagcacagtgtatggacattcggaaatatcaattgaatattctttgtttattattgttccccttatccgcagcagggcaagaatggagcaaacaggactcattgagacttcagcaaatgttggaatccgatcaggaaatcaagataaacagaaagctgatcgaaaaagtagagcaaaaaatgtactctcgaaaaccatttgtagattttgatcccacactacccactttaaaatcttccacaatcttttcgaaaccttctattcacacatacaagatgttccaaaagccaggttccacctttttacccacttattcctggctaagaataaacaagaatcttattctgcatagtaaaagcgactttgcagaaaattccaatcatttccatatccaaagccaaatggaatataaattatcctccagatggtctctcgacatatatggttcacaaaacctcgatacccgaagataccgagggcttccctccgaagtggaaccaaccaaattgggaagtaatgtcgttttcaaaataaataaaaactggaaaatcaaaacagggatgcaataccaatataatgctatacgaaaaagatgggaatggatacctcaagttagtgtttcatacgaatggtaaatcctattgataattgaggatcgaaaagttttagaaaacaagaaagcatattttccatttattctcgtacctttgtcatacgattaaatatgctatcataatgaagaactttatcaagggattccggtttactccctccaattatccggccgaagtagaagcaaaaatacagaaatacaggaaacaaggttacaaacttcctccccgtaaagtactccgtactcccgaacaactagaaggtattcgggaaagtgccaaaatcaatactgcactgttggactatatttcagaaaatattcgcgaaggaatgtctactgaagagattgatgtattggtatatgatttcaccaccagccacggtgctatccctgccccactcaactacgaaggatttcctaaaagtgtatgcacaagcattaacgacgtggtttgtcacggtattcccaacaaaaatgagattctaaaaagcggagacattatcaatgtggacgtttctaccatttataaaggatatttctccgatgcatcccgtatgtttatgattggcgatgtcaatcctgacatgcaaagattagtacaagtcaccaaagagtgtatggaaataggtattgccgccgcacaaccctggaaacaactgggtgatgtaggcgccgccatccaggaacatgcagaaaagaacggtttcagcgtagttcgtgatctctgcggacatggcgtagggatgcaattccatgaggaaccggacgtagagcatttcggccgacggggtacgggcatgatgatcgtaccgggaatgacctttaccatcgaacccatgattaacatgggaacctacgaagtctttatagatgatgccgacggatggactgtctgcaccgacgacggactaccttccgcccaatgggaaaacatgattctgattactgaaaccggaaacgaaattcttacttattaatggaattaattttacttatcgttgttgccgcattagtgatagtcttactaatactgtcacttacaaaaggtaataatcaaacgcaagcggaacaactgcaaacagctttgcgtcaacaaatgcaggagaatcgcgaagaactgaatcgcagcatccgggaactccgcctggagatgactcaaacgctgaatcagaatatgcagcaattgcaagacgcattgcacaaaaatatgttgactaacggagagctgcagcgtcagaaattcgatatgatggcccgtcaacaggaatcattgattaaatcgaccgaaaagaggttggatgacatgaggacaatggtggaagaaaaattgcaaaagacattgaacgaacgcattggccaatcatttgaaattgtccgctcacaacttgagaatgtgcagaaaggactaggcgaaatgaaatctctggctcaagacgtaggcggattaaagaaggtgttgagcaatgtaaaaatgcgtggcacattcggcgaagttcagttaggagcattattagagcagatgatgagtccggaacaatacgacgctaatgtaaaaaccaagaaaagcggaaccgaattcgttgaattcgcaatcaaacttccgggaaaggatgatgcgaacagcaccgtctatctgcctatcgacgctaaatttcccaaagatgtatacgaacaatattatgatgcttttgaagcaggagatactgcattgatagaatcgtccggcaagcaattggaaacaaccatcaaaaaaatggcgaaagacattcacgacaaatatgtagatcctccttttaccacagacttcgccattatgtttctgccttttgaaagcatttatgccgaagtaatccgaagaacaagtctggtagaaactctacaaaaagattacaaaatagttgtcacaggacctactacactaggggctatcctaaatagcctgcaaatgggattccgcacgttagctattcaaaagcgaacgggagaggtttggacggtattaggagctgtaaaaacagaattcagcaaattcggaggactactcgaaaaagtacagaaaaaccttcaaaatgccggcgaccaactagaagaagtaatgggtaagcggactcgcgctatcgaacgaaaactccgccaagttgaacaattgccacatgaagaaagcatgaaaattcttccgatagatgatggagacgatgaatcgacagattaaagcgaaatccgaagtacgacatatcccagtaagccggaaagtacggttccggtcaatacaccaaatttggcctgattcaataatacaggatagtctaccccaaaagaaagattagcgataaagagtgatacagtaaagccaatacctcccaacaatgcaactccggaaagattcttccaggtcatccctaaaggcatgggagtcaatcttatttttatagccagccaggtaaagaaatatattccaataaattttcccagtaacagaccggcagcaacagcaatactgacagctcccactaattcgcctcccccactaaacacaacgccggcattgacaaatgcaaaaagaggaagaatcaaataattgactgttccatgcaaattatcttctaatgactgcaacggactaattacacggtcggaagccgattcgacctctttcaacttggctatttgctcattagtcagcacaatgctttcagattgcattgccggaaaatcggcaatggtatgacgaattttttcgatgtacttccctacattcagacgaggtttagcgggaataacaaaagcaagaataactcccgaaatagtgctatgaataccggattgcaaaaataaataccagataatcaccccaatcaccaagaagaataccttatttgtcgttccatactttcctataaaataaagtaaaatataaaagagtatagctaccaaaagatagccataggcaacatgtgaactataaaaaagagcgatcaccaaaattcccccaatatcatcgactaccgcaaaagcagtcaaaaaaatcttcaaactcaacggcacacggctgcctaataagctcaacacccccaatgaaaaagcaatatccgtagccataggaatggcgagtccatgtccgccttcactacccggaacacaaataagcgaatagatcatcacaggcaacaacatcccaccacaagcggcaatgaaaggcaacgccgccttacggaaagaggaaagctcacctaccaatagctcacgtttgatttccagtccaaccaataaaaagaaaatcgtcatcaaaccatcattgataaactcaatcattcgcagattttccccaccatgcgaaagcaaattaaaatttcctatctgtaaatgaagttcatgcgacaaaaattcctgatataccggagccacagaagagttcgcaataatggctgccgagatagcagccaggaataaaagaatactcgccgtgatattcatagacgagaagttccgcatagtccgcaaaatagtcataacgaaatgtttttataatattagttttgcaatatacagaattttctaattagtataactccttaaagcaagatttttgacccaaagtacaaaaattcctgtcaaaatcagattcagtaccaaggtaagaacagaaattaccaatgccggcccacccaagttataccctaacgctatgaaaataattccggctcctacctcaccacgggtaaacataccgatagaaagagccagtcgctcgcttaatttccggtcacggtaaaagaacatcgggcaaagctttcctatattcgacaataaagagacaatcactacatgaaacataatcatcccccacgacatcatctcctgcgaaccggtgacggaataagcacctgcatgagtctccgcaaagttcacaccaataaaatgcggcatactcatccccaccaggaacatgaagaaaaatgagattccggtagacacctttcgttccacgggcgtgtcatgttccttatgtttcataatcatacccagcacaaatgcaggcagcaggacttcaatatgaatacttccctcctccccatacaattccttactaccgagataaagaatttgagtagtcaaaaatatgattattgaataaaagaggatagccttccaatcctgacgccaatcgtacttattcagcctttgccagccgatcgataataacaggaacacaatcactaccacaataatcaactgccagcgtagcccgatcatcataatctgaagaggaatcatcaaaagaatcgtatccaaatcgtcaaaaatagccaacacctgtatcttcttataaatccaactggactttaacccgatagccgccaacattgtaaacaaaataccggctgatgtcggtgcggcaaaacggctcaatagtaagttctccttccaggcttcccaactattccaaaaatcgggtggaagcaatacaaacacataataaatggcaatcataaaccacggcaaagcagccgtagccatggcaataaaataatcctgggcgtaacttttccatcgtgtcttatcaagaacgaattcacggcctacattaatcattataaaactaaggcatacatagagcaatacattcgatatgtatttaacagctccatagccatcccctgccatcatcggcaagaattgcgaaacgacgagccccaacatcaggaagcccgaaaaagacagaacttttctcatatttatagttgtttgttcctaaaaagtgattgccaaggaaagctctgcagacagaaggcaatcacctggtgtattaaaaactaaccgcaagtcaatttgttcagaacatatctctgaaaaattgcttgcggcagtgtttttttaatccagcttcagtacggcgaggaaggctttctgcggcacttccacgttaccgatttgtttcattcgttttttacctcttttctgtttttcaagcagtttacgtttacggctcacgtcgccaccataacacttcgcggtcacatccttacgaaccgccttaatggtttcacgagaaataatcttcgctccgatagctgcctgaatggcaatatcaaactgttgacgcggaataagttccttcaacttctcacacatccggcgtcccatatcgtaagcattgtcaatatgcgtcaaagtggaaagcgcatccacaggctcaccgttcaagaggatatccaacttcaccagtttggaagtacggaaaccattcggatgataatcaaacgaagcataccctttagaaatactcttcaacttatcataaaagtcaatcacaatttctcccaaaggcatattataatagatttccacccggttaccggagatatattcctgtttgatcaattcaccacgtttacccagacaaagcgtcatgatagggccgatataatcggtagtagtaataatagatgctttgatatacggctcttcgatatggtcaatcatcgtcgggtcgggcataccaccagggttatgcacttccttcatattaccttgtttatcatatatatggtaagaaacgttcggcaccgtagtaatcacattcatatcaaactcacggtccaagcgctcctgcacaatctccatgtggagcaatccgaggaaaccacaacggaagccaaaacccaaagccaacgaagattccggctggaaagtcaaagacgcgtcattcaactgcaacttctccaaagacgcacggagatcttcaaaatcctccgcttcaatcggataaactccggcaaacaccatcggcttcacttcctcaaaaccggcaatagccttttcacacggacgggcaatatgcgtaatggtatctcccactttcacctctttggaagtcttgataccggaaataatatatcctacatctcccgtacgaagttcgttacgaggcaccatatccattttcaacacccctacttcatcggcgtcatactcttttcccgtattgaagaacttcaccttgtctcccttgcgaatcataccgttttcgatcttgaaataggctataattccgcggaaagaattaaatacagagtcgaaaatcaaagcctgcaacggagcctcttcatctccttccggatgaggaatccgctcaatcacagccgccagtatctcttccactcccatccccgttttgccggacgcacggattacttcctcccgtttgcagcccaacaattcaacgatctcatcttccacttcttcgggattggcgctcgccatgtcacatttattaatcaccggaataatctcaaggtcatgctcaatagccatatacagatttgaaatcgtctgcgcctgcactccctgggaagcatcgacaatcagcaacgcaccttcacacgcagcaatagaacgcgatacctcatacgaaaagtccacatgtcccggggtgtcaatcaagttaaggatatacttttcaccctgataagtatattccatctggatagcatggctcttgatagtgatccctctttccttctccagatccatattatcaagcatctgcccggaagtaacctgaatggtatgtgtaaactccaacaaacggtcagccaaagtcgacttaccgtggtcaatatgagcaataatgcaaaagttgcgtatattcttcattctgaattcttattattttatctttttggtgtgcaaagatacgtaaatggcggaataaaaaaaaatgcgttgataacattatgattatgtaccaacgcatttttttattgcttaagtgagttactcgcttagatcaatttgatgaagagttcaccttcaacttcttccacagagactttgtcttctctcaataaccagccaaggccgagaaacagatctttgtcaaccaatttagttgcttttttaagctgcttggcagtcattccttctgtttcgttcagtgcattccagatagtacctgcaattacaccagctttttctttcaacatttgctttgcaattttagttagacatgcttaaaatctttccagtcaaaagactttcagattttatttcggaggcaaagatagttatttttatgttatataacactttattgagcacttttttaccgtttttgtaataaaaaagcattttaggagctcattttggatgcttttcgagatattcagaccaaattcttgccgcttcttcaaccatttttgcacagggacgcttgctataatattgagcagtacgctcttccggaatagtggagacgggctcttttttctttaatcccaacaattcgccacaaatcagcgagccgttacgcttcttaaattcagccgccagttcttgcactaccgcataattggcagctttaccttcccggtcagttgcttccgtagcaccggtttccaagcctgccaccagaaacatgccgcaggcagctccacacgtttcacgcattcgtccgatgcccccgccaaaagaagcactcatacgcaatgcctgttcctgtgtaaatccatacatgtccgcaaaagccgctaccaccgactgtgagcagttatatccactcttaaaaagctccactgctttctgtattctatcttccataaactattttgcatttttattttgtacaaaagtataaaaaagtatctttgtatcagatagggcgtaaagattaaaatcaaaaaaaagaaaatatgaacaaaactatttcatataaagaatcgacagccattgccatccaagctatgatgagcgcagccagaaaggatgaatatgccgataggaaaagaaaaagtaatttccctcaaaacagaaagaaacgtgatgtcactctcaaggacatacgtgaatggaacaaaagaaggaattataaagaagatacaggaattacaatcaacgcgatgatggaatcagccgtcaaagatccgtatgtagatctgaatccaccatccaaattttaaaaaactaaaatatatatggctacaacatttgacatccaactacctcattattcgcgcggatttcatctaatcacgcgcgatattgtctcacagctacccccacttcctgaaagcggtctgctggtagtctttatcaaacacacttctgccggactgactatcaacgaaaatgcagatccggacgtacgacatgactttcagacgttttttaataaacttgtccccgacggtgctccctacttcatccatacccttgaaggccctgacgatatgagtgcccatataaaagcctccctgataggaagctcggtcaccatccccatcaaaaaccaccgtttgaacttaggtacatggcaaggcgtctacctcggcgagtttcgcgacggaggagacacccgtaaattgagtattaccattctataatatttccagagccatcggacaatggtcggaatgtacggcctcattcaaaatatacgcccgtttcaacagcgggcgtaccggctcactgaccatacaataatcaattctccagcctttattcttggcacgcgaattaaaacgatagctccaccaggtatattcctgtttctccggacaaagcgtacggaaagagtccacatatcccgcagacaggaaacgcgtcatccattcccgttcttcaggaaggaaaccactgttggtcgcgttccggacagggtcatgaatatcaatcggctcgtgacagatattataatcgccgcaaagaatcaagttgggacgagacttctgcaactccatcacatatttctggaaatcttccaaccagaccattttaaaggcctggcgttcatctccgctcgttcccgaaggatggtaaacgctgactaccgacaagtctccgaagtccgcacggatgaaacgtccttcattatcgtatgcttccattcccatcccatattccacatggtccggttcccgcttggtaagtatggccactccactgtatcccttcttctgcgccgagtataaataagacttgtagcccaatgcttcaaacacttctcccggatattggtccggttgcagtttcgtctcttgcagacaaagaatatcaggattctcctgtgccagccattccggtaaccctttagatacggctgcacgtagtccgttcacgttataagtaataattttcatcattctatatttataagttcatgttcattttatgaaaacaaaagcataatgttcagtaccgaaacgataatagcaatcgagtacaacacgaacgtactccaacgactattgacataatcgcccatcacctttcgggaagacgtcagtcccacctgtaagaacacggtgaaaggcaattgaatactaagtaccatctgcgaaataatcaatcctttaaacggatctccaataaagaaaatcagcaataaggcaattcccaaagacaagagaactcccacctgcgagtgactgtccttgatatgataagactcgccgaaaatacctgcaaaaatagaacctgccgccattccgctcgtaatagttgacgaaatgcccgccatcagcaatgccaatgcaaatacgattgccgcattacttcccaataaaggttcgagtaaagacttagcctgttgcagttcctcgacctgaataccgcttttaaagaaagtggcggccgccagcagaatcatggcactgttaatcgcccaaccgacaatcattgagaaaagagtgtcaaacaactcatatttcaataccttcttaatagaagcatcatctttcttattgtactcgtgactctgtatcacctccgaatgaaggaacagattatgaggcatcactaccgctcccaacacactcatgataatcagcatactgcctttcgggaaagaaggagtcacccaccccgccgttgcagccggccagtctatttccaccagaaacaattcataaataaatgaaagcccaataacagaaacgaacgcaatgatggaacgttctatctttttatacgaattagtgaaaagcatgatggagacaaaaagcgtagtcaatacagctccccatataataggaatatccaataacatttccaacgcgatggcacctcccagaatttccgccagggaagtagagatcgacgccagtactgctgtgccaagaataggtcgtgacacccatttaggagtgtacttagtggccgcctccgaaagacaaagtccggtaacgattcccaagtgagcaacgttgtgctgaaggacaatcagcatgatagtagacaaggtaaccacccaaagcaaggaatagccgaattcggaaccggcggcgaaattagaagcccagtttcccggatcaataaatcctacagtaaccagtagccccggaccaatatatttaaaaacatccagtccacccagatagcgtttatgatctttgcgtcttaagtcttgaaaaatattcttcatttttgcataatagtttatccagtacaaatatacttataaataacgagtgagaatcaattttagttcaaaataccgaccaataagtagatgacctatggacacagatgatacactaattatgagaacattattataaaagggttgagtaaggactactcgagaaaaggaaataaggactttctgcaaaaaaaatgacctccgacaaaccaattgccagaggccacaaatcaatatataatttacataaatgaagatcaatcaatatcccatctcatgcaatgcatgacataattgatcgggacaagatgtcggcctgccaccacaacgcactccttcaagttttgcgatcacctcctccaccttcattcctctcacaaggcgggaaataccttgaaggttaccattacatcctccccagaaagcaacttccttcaccactccatcttccacattcagttcgatattcgtgctgcaagttccctgggtcttataaacatattccataaccttactttactcttcaccctcttccggttgcatgttggtatagacagtctgcacgtcatcaaattcttccagacgttcgatcatcttatccaatgtttcgcgttgttccggagtaacctctttcaagtcgttcgggatataagtgaagtctccaccgacatcttcaaacccacattcttccaaatgcttctgaatagcggcgtagctcttaggattaccatagatagtaattgttccctcttcatcatcttcttcatattcatcttccacgtcatagtcgatcagatcgagaatcagttcttccatatccaatccgtctttcttcttgaaagtgaacacacatttgtggtcgaaaaggaacgcaagagaacccattgtacccagattgccaccgaacttattgaataccgaacgaacatcagccaccgtacgagttgtgttgtctgtcaatgtgtctacaaacacagcaataccgtgagggccgtatccttcataagtcatgctcttgtagtcgctctggtctttacccattgcgtttttgatagcacgttcaatgttatccttcggcatgttttcacgcttacaagtagcgatcaccgaacgcagcgtcgggttgttttctggttccggaccgcctgcctttacagcgatagcgatttgtttacccagtcttgtaaaagttttagccatgtggccccatcttttcagtttagcggcctttctatattcaaatgctcttcccattggtttatatttttaataatgacaattttaagtttatctaagtttggcacccagtttatcttccaggttcttcaccagtttcgacatgatcttatcaatcatcttatcattcaaagtctggttttcatcctgaagcaggaagctcaccgcatacgacttcttacccgcttcgaggttcttaccttcatatacatcgaagagttccacttctttcaacagcttcttctctgtttcgtatgcaatcttttcgatttcggcaaattgtatattcttatcaagcaacaatgccaagtcgcgtttcacagcagggaatttggatatttccttgtagctgatcttcacagaacggatggctttcatcaattccttccagttcaagtcggcgtaatatacttcattgtcgatatcaaatgctttcaacaacttcttagttacaataccgaaagaagcaagacgttttccgcccttcgtgttgacagagagtgcggcagcaaaaacatcgtctgtcagattacctacaaccagattgtgcaaatccagtcccagacgcttcaatatattttctacataagccttcaattcatacaccgaactgttctcatccgcatgcgcccatgaattggaaaccttcttaccggttacccacaagcccaggtgataatcttccgaataaggagccagtaccttctcttcgttcttcttgtcagcattgaaataataacagttaccgaattcgaagaatttcaaatcagcgttcttacgattggcgttatgagcaatgctttccagtccgccgaacagcaaggtctgacgcatagcgttcagatcagcactcaacggattgagcaacatcaccaggtgattggacggataagcctccaacccatcataataagcagcacgagtcagtgagttgttcagaatttcattgaatccacaacccactagttgctctgcaatcaggttctgcaatttattcgacttgtcgtgctcaccctttgtagtcagactggagttcagcgtagtcggaatttccacattattatatccatagatgcgaagaatatcttcaatcacatcacaatcacgctgcacgtctacacgataaggaggaacagccagtgtcagtccttctgccgtttcattggtaatcttcatttccaggctggtcacaatgctcttgattgtctctaccggaatcactttacctaccaaagaatgtactttttcgtaagcaagatcaacgataaaatcctgtgcaggagtagtgaatacatcttttatttcagaagaaatcgtaccgccagccagttctttcaccatcaaagcagccagtttcaggcaataaatcacgccgttcggatcgataccacgttcgaaacggaaagaagcatccgtattcaaaccatgacgacgagccgtcttacgcacccatgtaggatggaaataagcactttcgatgaatacgtctgtcgtagcttccgtagaaccggagtccagtccgccgaatacaccggcaatacacatggcctcttccttgttgcaaatcatcaggtcgcgttcgttcaacttacgctccacttcatccaacgtaacgaacggagtaccttcgggcattgttttcacaatcacttcattgcctttaatctttccggcatcgaagcaatgcaacggctgaccgaaagcatgaacgatatagttcgtaatatccactacattattaatagggcgcacaccgatcaggcgcaatttgttttgcagccattccggactctccttcaccgttacacctttcacagtaacaccggcataatgcggacaagcttcgctgttttcaaccttcacttcgatattcaagtcatggttttccactttaaagccatccactgacgggcgttgtaaagttgcctgacgaccgttctgaatcagataagcatacaggtcacgagctaccccatagtgagagcaggcatccgcacggttaggcgtgatatccacttccagtacataatcgctcttgatattataataatccttggcaagcgtacccggaacagcagtttccggcaatacgatgatacctgcatgatccgtaccgatcccgatttcgtcttcagcacaaatcatacctgtagattctaccccacggatttttgatttcttgatggtaaaacattcgtcaccgtcataaagtttcgtacctaaagtagctaccaccactttctgtccggcagccacattcggggcaccacaaacaatctgtaccggttcaccgtctcccagattaacagtagtaatatgcaaatggtcagagttaggatgttccgtgcaggtcagcacttcaccgatcacaagtccttccaaaccacctttaatggtttgcacttcttctacaccacctgtttccaagccgatagaagtcaacgcagcagccgtttcatcgggcgtcaggtcgaagttgacatactctttcagccagttataagagatattcatatacttaattttttattgtttctcaaaaagattcgcaaagttaataagatttttcggttgaccgagaaggtttgataaaaaattgcgcgttatttcaccacagggacgcaactagaacggcaaaggtccatcccccggtgctccgaacggattgtccgtctgtggcgcaaaatcaggcgcgggaggaggtacggaacctgcattacctgtattcattttcgatcctaacatagccccggcaggctcacccggcatcgggataaccatatcgtcctccggattggagaaacgggtaaattctcccttaaaccggagcaacacctcgcctaccgcaccattacgatgcttggcgatgacaatctccgccataccacgcaggtcattaccacgatcatcctgataaatcttatagtattccggacggtggataaagcacaccatatcggcatcctgctcgatggctcccgattcacgaaggtcactcaactgcggacgtttaccatcaataccttcacgactttccacaccacgattcaactgcgacagtgcgataatcggaatattcaactctttcgccagtcctttcaacgaacgggaaatggtactaacctcttcctgacggctaccaaacgccataccgctcgcattcatcaactggaggtagtcaataataatgattctcactccatgttcacgtaccagacgacgcgctttcgttcgaagttcaaatacagacagagacggagtatcatccacgtaaagcggtgcatccatcagattcttcagtttatagtccaattgctgccattcataatttgccaactgtccacttttgatcttctcactcggaatctcacagacattcgcaatcaaacgattcaccaactgaacgttactcatttcaagagagaacaacgccaccgggttccgataatcgacagcaatattcttagccatagaaaggacaaaggcggtcttacccatcgcaggacgtgcagcgataatgataaggtcggaattctgccaaccggaagtcatcttgtcgagctttgtaaaaccactctcaagaccactcaaaccgtcggttcgcgccgcagccttctgaatcagcttataggcttcgtcaatcaccggattgatctgcgtataatcctttttcatgttctgctgcgaaatctcaaaaagtttaccttccgcttcctgcatcaagtcgtccacatccagcgtttcatcaaacgccttactctggatattgcttgtaaacgtaatcaactcacgcgccaaagatttttgcgcaataatacgggcgtgatactcaatatgcgctgatgaagccaccttactactcaattgagtaatatagaacgggcctcccacctcttccaattctccgcgtttgctaagttgttcctttacagtcagaatatccaccggtttctgattcaccgcaagatcggtgatagcagaataaatcaactgatgccggtgttcgtaaaaagattcgggacgaagaatctcactcaccaatgagtaagcatccttttcaatcatcaaagctcccagaactgcttcttccaattcaggtgcctgtggctgaatacgtccataatcatttaccggttgtaccttagtagactttgtattgcgggtatttcttttctgttcggccatcgaggtatttactattttacaatttactatttactattttacgactagacagactcctttataacagagtttttccagtcgggacgacaaagatagaatataatcatgaagaatggataaggaaaaatgaagattttactaactttgctcccgaattacattcaacacatgattaattgtcatgtgcggcactgcaaatagtaaatcgtaaattgtaaaatagtaaataaccttatgctcgcttttcctaatatcaaaataaacctgggactttccatcacggaaaaacgcccggacggatatcacaatctggaaaccgttttctatccggtagccctcgaagacgctctcgaaatccgtacttcttctgaaacagaaaagaagattatcctccaccagtatggcatggagatagccggcaatccggaagacaacctggtggcaaaggcctattcattgctggataaggagtttcatcttccccctgtcgaaattcatttatataagcatattccctcgggagccggactggggggcggttcatccgatgccgcttttatgctgaagttgctcaatgatcattttcagctggaattatctgaagaacagctggaggtatatgccgccactttgggagcggactgtgctttctttattaaaaacaagccgacctatgccgaagggatcggaaacctgttctcaccaatcgagctttcattaagcggttaccaaatcatgatcgtcaagccgaacgttttcgtttctacccgggaagccttttcaaatatccacccgcaccgtccggaatatccggtcaaagaggcaatcctgcgtccagttgcagaatggaaggatatcctaatcaatgatttcgaagcaagtgtattcccgcaacatcccgtcattggagaaatcaaagaagaactctatcatcaaggagcaatctacgcatccatgagcggctccggctcatccgtattcgggctgtttgctcccggattcgtcttaccggaaattgattggggaactgacgtattctgcttcaaaggtacattaaacaaataaatctcactaacaattatgttttgactattttttcaaaatcccaacatggcagcggggtgtatattgagtacccggcaaagcaagcgagctatttttaaagtaggttccgagcgacccgaaatataatcattcacgcgtgaagggctaacccctatttcactggcaagctgtttttgtgtcatccccttttcttcaagggacaattctatcaattctgctacggttggtttttctataggaaaatgttccttctcatacgcaatcactatatcagacataacagaaagctccaccatgctcttgtcatttgcaggagtgctgtcgtccaccaaaggcagaagttcttcgactcttgccaatgcaaattcgtattgttctttcgttattttagtcatatctattatattatatagttgaacaatctattttatcatactctttatgagttcccacccaacggacaaaaatgtatcccaccgtaaatttaacaaccactaccagccgatagttgttccctctgatattaaaaacatagtgttgattgcccacataatcagtcgatagaaaatccgcttttatatcagacaaattccgccattctgctttttccgctatatcataccaacgttctaaagcaacacgtgaatcttcacaccctttcgtctcgtagaaatctttcaatttcttatgtgatactactctcatatcttattcatttgatacaaaattacaaaataattttggataacagaagaattagtgctaaatattttataaaacagaacatccatgctgggcgtaccaaaaaaacggtaccacgactcacgtcgtagtaccgtcacaacacaaacacaaaataaaacacgacaaaactactatgcaatctttcctgtctatgccggggaggcataagtactatttacgtatattcgcatactcataaatagcttcaggtcgattagcatcaattaaacaaatcgcatgcacgatttgtttaaacttttatgttatttaaaacaagtttctcttttattgaatccctctttcacggagtttcagctgccagttccatgcagagcgtaaagtatcttctaaagtttctacggctttccaacccagctctttattagcaaaatccgggttagcccaaactttttcaatgtcacctgcacgacgtccgacaatctgataattcaattttacgccagtggctttttcaaagccatttattaattccaatacagaaacaccacgtcctgtaccaatattaaatacttctactttttctttttgtttcttttccaagatacgacggatagcaatcacgtgtgctttagccaagtcaacgacattgataaagtcacggatacaagaaccgtccggtgtatcataatcgtcaccaaacacgctaagtttctcacggataccgatggctgtctgggtcagatatggaatcaggttttgaggaaccccgttaggcagttcacccagcaatgcagtaggatgcgcgccaatcgggttgaaatagcgcaacatgatcgcattgatcggagcacctgaagctaccgtatcacgaataatctcttcattgatctgtttggtatttccataaggtgattccgctttcttgatcggagctttttccgttaccggcagctcgtccggctgaccgtatactgtacaagaagaagagaacacaataccttctactccatgttttggcatcagttcgagaaggttaatcaaagaaaccaggttattacggtagtaaagcaacggtttttgtaccgactctcctactgctttgctagctgcaaagtgaatgattgccttaattcctttatattttgcaaatactgcatccagaccggcaaagtccaaacagtccagcttttcaaaaactgggcgaataccggaaactttctctatattgtcaacaacgtcggcacttgaatttgataaattatcgatgatgattacttcatatccactgttttgtagttctacaacagtatgagacccaatgtatcctgtcccgcctgttactaaaattctttctttcatatactttataaaaaatggttagtttctcggcttattattgtttgagttacaaatgtatggaaataaaatggaattgcaataatctgccacaaatttatttgctgaaaagtaattaaggtacgatttggtagcatttaggtataaaaaagaattggaaactctaacctgtatgtcgccacacagcagagcttccaatcctctatttaattatcaactgtaaatccttacaccacgccggagaatcccatgaatgccatagcaagcaaaccggcggtaatcaaagcaatcggagttccttgcattcctttcggaattttcacaaggctcatctgttcgcgcaatccggcaaaaagcaccagtgccagaccgaagccgatagctgtagaaaacgcgtacacaacacctgtcagcaggtcatagtctttctgaatcaccaggatagcgacaccaagaatacaacagttcgttgtaatcagcggcaagaacacacccaacgcctgatacagagccggagacacctttttcaggatgatttccaccatctgcaccaatccggcaatcaccaggataaatgtaatcgtctgcaagtatcccagtccgaaaacatccagtacaaacttctgaatcaggaaagtgacgatggtagcgatggtcaacacgaaagcaaccgcagcgctcatacccatcgcagtttccaccttcttggatacgcccaggaacggacagatacccaggaactgcgacaacacgatgttgtttacaaagattgccgaaataaatatcaatatatattccatattcttttcttatttaattgaattaggctttcttgaaactgttaatcaacgcaatgaggtatcccaaagcgatgaaagcgcccggagccaatacaaacaccaacattccatattcttccggcatgatggtcaaatcgaagattttaccggttcccaaaaactcgcggacagcacccagtaaagtcagggcgatggtaaagccaagccccataccgataccgtcgaacatagaagcaactgcgttattcttggcagcgaaggcttcggcacgtcccagtacaatacagttcactacaatcaacggaatgaaaagaccgagtgtagcatacagtcccggcacgtaagcctgcatcaccatttgaagcaaggtcacgaaggatgcgatcaccacaataaacgatgggatacgcaccatgtccggaatcaggttctttattaaagagatcaccacattcgagcagatcaatacgaacatggtagccagtcccatgcccataccattgatagccgatgatgtagtacccaatgtaggacacataccgagcaggagtacaaacgtaggattctctttgataatcccgttcatcattactttaaagttattcatatctgtctcctttcttatttagcactgactgaatcagttagttcaactttgatcgtagctcccgtagcagcgtcagcagcatctgcgtccgcgcctttcgctttttgagaagcaccggttaccccgttcacttccccgccttcggccttataggcttgataagcagcattcacggcattcaagaaagcacgtgaagtaatggtagaagccgtgatggcatccactgctcctccatctttgctgacggtcaacggagcttcacccggattcatacccaaaatagatttcgtactctcttcgtgagatactgctttttctcctttcgcgggatcatacgctccgaaccatttgtcggctttagagcccaatcccggagtttccgtgtgagccaacaaagagtagttatagattttcccttcggcattaaagcctaccagcactttcagttcaccgccaaatcccattgatttagcttcgacagcggttcctacaagttcttcaccgttcttagccggataaacgataaagtcaacattcttctttccgtctttctcactgaagatcgtatcgctttccgctaccggattattggtaaattcgggaagaacctttttcaaggcctcgttcagtgtcttcgcgttcgcttcggcaatggggccttttgtcagttcatttacataagccagcaacgcaacggaaatagcagtcactcccgtaagtaccagcaacatattctttaaagatgattctaactttttcatttcttcttcgctacctccccaaagcgttttggtttacaataggtgttaatcagcggagtgaacgcattcataatcaggatggcgaacgacataccttcgggataggcgccgaacagacggataactaccgtcagcagaccgatacatacaccatagatcagcatccctttcttactcatcggagaagtcacatagtcggttgccataaagacagcacccagcatcagaccaccggaaagcaactgcaataccggagaaacgtatttttccggatctgccaggtgcatgatgcctgcaaagacaaacacagtagccaggatagacacaggaatatgccaggtgatgattttcttccagagcatataaacgagtccgatcagcagagccagtgcactcacttcacccaagcatccgccattctgtccgatcaacaaggtcaatgcgtccggaatctggcttaaagcggcagtgtcaccgtaaatggcttgcttcatcaaggccagcggagtggcaccggtggtagcatccgtataagcggtcaactgtccgactaccggccagctggtcatctgcaccgggaaagaaagcaacaggaacacacgtcctgccagtgccggattaaaaggattgcaacctaatccgccgaaagacattttgcctacaccgatagcaaacagtgcacccagaatgataatccagatagggagattagacggtaagttgaatgccagcaacacacctgtgatgatggcagagccgtcgcagatggtagtggtaggtttcttcattaaatatttcccgatcgcccattcgaagaacaaacaagctgcaacggaagtagccgtgacaatcagggcacccagtccgaagaaatagagagacaccagaaaagccggaatcagtgcgatcagcacgccatacatatttttctgtacgctgtctccgccatgaacgtggggtgatagtgatacgattaatttattttccatattcgttattttttagcttgacgtgcacgaatcatagcacctactttgcctttgcccagacgacagtagtcgagcagcggacggttggcaggacaagtgaactggcaagagccgcactcgatacaatccatgattctttctttttccattgtttcaaaatctccgttttcggacaaagctccgagcaagtacggttccagtcccatcggacaggcactcacgcacttcgcgcaacggatacaggtttgagcttcgccgcgtttggcttccttctgattcataatcaggataccggaactgcccttcgcagtaggaacctcgatatttacgagcgccttacccatcatcggaccgccaccgatcaccttacccgtatcttcgggcagaccgccgcaagcgtcaatcaactgtttcatcggtgtaccgatacgagccaggaagttggaaggtttcgcaaccgactttcctgtcacggtaatcacacgttcgaacaacggcttatttttctgtacagcttcataaacggcaaatgctgttcccacgttctgcacgactgctcccgtagagataggcaatgcaccgctcgctacctgacgtttggtaatcgcgtcgatcagctgcttttcacctccttgcggatatttcaccttcaagggcactacttcgatacctgcatagctggaagccactttggtcatcagttcgatagcatccggcttattattttcgattccgataaatgccttgttcactttcaccgctttcatcaggatagaaacacccaccatgatttcttccgcgtgttccagcatcagctgatggtcggcagtcaggtaaggttcacactctacggcattgataatcacacattcagccttgaaagaaggaggaggacaaagtttcacctgcgtagggaaacaagcaccgcccagacctacgattccagcatcggcaatcttcttcacgatctcttctgcggaaagttcacactctttcaccagtgtggtgctacggtcgattgtctcttcccattcgtcgccttccacatcaatgaagatggcaggtttcgcataaccgctggcatcgactatggtatcaatcttcgccactttaccactgaccgaagagtgaattgctgccgaaacaaagccggcaggttcggcaatccgtgtgcctacctttaccacatcccctttcgctacaaccggttttgcaggcgcaccgatgtgctgccccagcaaaataacagcctttgcaggaacttccgctgtgataataggttgatgtgccgacaatttattttcgtgtggatgaactccaccaattgaaaatgtctttaacatacagttctgtatttttttctgttattattctgttactttcggagcttctgtagcctttgcagcaggagtttccacttttgtagccggtttcggagcagccggagcttcttctttcggtttccgcggcgggaaattcaactcgataatgctattctgcggacaaacttccacacatttccggcaagatttacacttgttcggatcgatgtaagccaaattgttttccagcgtaatagcctcgaacggacaagtcttcacacacttgccacagccgatacagctcactgtacaagccttacgtgccacagctcccttgtctttattcacacaagagatatacacgcggcgtgacttctttccttgcggacggatttcgatgatcgccttcgggcaagccttcacacaggcgccacaagcggtacatttcgcttcatccacttccgggagccccgtttcaggattcatgtggatggcatcgaactgacaagcagccacacagtcaccacaccccagacatccgtaactacatcccgtttccccaccatacagcgaagcggcaatagcacaactcttcgcaccatcatattggttggtacgcggacgattggcacacgttccgttacatcttaccactgctaccatcggttcagcttcaccggctgcaagtccgaggatatcagcaatttgtgccatgacaggttgtccacctacggggcagaatttaccatccagcgaaccggctttgacgcaagcgtcggcaaatccgctacaaccgggatagccacatccaccacaattagcctggggaagcacttctcccacctgagcaatccgcgggtcttcatacacggcaaatttcttggaagccacataaagaatagcggccagcacgagcgctatagctcccaatgaaatcactgcaatcagaatcaaattcataatgtttttagttatttattggttttatagtaaatgaaaattgttgtttgagtcgcgttttattgagccacaaaacgaaataataaggtataaggacagccagagaaagaagtgctgcatacaactcattctctatccacgccatcaaaagaaacaatgaaaatataagaagtacgaaaggaagtacgaaagccaataccactgccatcatgcccatcgacgtttcgccgaccaccatcaccttctctcccacctgataggaagaagccgcggtatctataatatctatgattttgtccttactatccgccgaggaacaatgcccctttgcgctacaagccgcgcaagccgatgtctggacaatcctcaccgacagatgagaaccttgtatgttttccacaatacctagatgctttatagtattattcgtcattttgcaaactccgcattacaaatcgcggcaaatttaatcattaatttgtgaactacgaagcattcccccaactttttctacataataaattgttattttttgcgttttcgttatcgcacacggaaaagatatagctaccatttgatatttttcaagaatggcaaatagacatcctaaacaaaaaatcccagccgttttatttcttcagccgggattttccatcaattatttcacagattactccactatccatttctcaatattacgcattttcgcgttaaagttctatatttcaaactccgactctaccgcattggtgtttgcataaaaaggaagcaagaatttgacaaacccttcctctacttcgcgattcgggaaacccaagctataaatgccaaaacgctcttcataccctttgatagtgagataaccgctctgataaatgaccggaatgggattgtccgatgttgaatcaatactgttcaatacagcggcactcgtttcctcatgcgccatacgttccaagtcataatgatgttttttcagcaactccactagataagtaggagttcccgtttcaaaccaataactaccgaactctctatatttaaaagtattaagcaagctgaacggattatatattccgatagaattgtatgtaaaatgatagccatcatagtactccctcaatctattgcacagttcaccataagtcagctcctttgcatccgccagttcatgcagttcaatttccaaattatcatgcaattctttttcagaaactccgcaaatatccacgtattgcttccgcattgagatgtcatcgagattatttaaatcgctgaacacgcttaccttaccgaatttcgtcactcccgtcagaaaagcaaactgaatacaaccgtccatagtcttcagcacactataaaaagctttcatggtattacggaattccttctgaagctcctcgttacctattgcttgtaacatgggcttatcatattcatctatcagaatgaccacacgctgcccggtttgctcataagcccgttcaataaggccgcgaaaacgcaatgcaaaagttgtttccgacggagcggtgccatattgctgttcccatttctccaatgtgaaattcaatatactatccaggctctcccgcgtatcatacttctccgtattaagatcgatatgaaaaatgggatatgtagtccaatccttttccagcttttccatggccaagccctcaaaaagttctttcttgcccaagaaatatgcttcaagcgtagatatcaacagacttttcccaaaacgacggggacgactcaggaaataataactgcctgtcttcaccatctgataaatcaaagcagtcttatcaatatagaaataaccgtctttccggattttttcaaagttctgtatgccaatggggtatatcttgctactcatactcttttaaaattatttaaattgtaatacaactatgcatacgttcctcttgaaatcacccaatcagcaattgtccgagtctccgcactaaaatttattgcaacctttaccaccggaagcccgcaaagagcaaaacgatctgcatattgctgcaaatcaatttgcttcatggcaatctctgcattttgattcaatttcagttctaccagatagagagtagtcctcgtgcgaagcaccatatccacacgtcctttcagcgtgtgcacctccacatcggtataaatgcccagcaatgagaatatcacatatagcatctgctggtaatgcccctcataatccgtgttgtcgcaataaggcacagtggaaagaaaagcctgaagcagcttcaaagcctcgtccatatctccccgcacaatgttacgcgccaaattacgcaccacactattcacctcatgactgtcactcttcacataagatgggatcaggcttttcatcagaccgacacgcacctctttgtttggaatatcaagcatatatgcgtcaaattccaaatccgcaccctttatcgtaaggtaaccagcctgataaagcaacggcatataattggtagccaactccaaaggtacgttaaaatcactgggagacgcttcctcgccaccaatttctgatggtaacacagcatatttgcgcaacatctctatgatataagtgggcgtgccactctcaaaccaataagagccgatctctcccaaagccatcgccttcagcaaactgaaaggattgaaaacgtcgggcgacggccacgaaaaatgataaccgtcataattttccttcagtctgtccaacatctcctctgcagtgattcccaaccgggtagccagatgctttacatcgggagccatttgagtacggagttcttcagcagtgataccgcaaatggcagcataatcaggcagcatactcacattggtgatattattaagttcactgaacacgctaagttgcgagaacttggttatacccgtaagaaaaacaaagcgcagataaggatcacacgccttcaacggactgtaaaaattgcgcatcacattacgcaactgcggcagatttttctcctcatgaaccacatcaagcagaggagcgtcatattcgtctatcaagacaaccacttttttaccggtctgcttataagcacgttttataagtccctccagacgctgattcacatacagttcctcttctacacgtccataaatctcctcgtatgccatgagtttcaattccagttccgcgttcagttgttccctgtccacatgtttagcggtactcatgtcgaagtgcaacaccgggtgttgtatccattccttctccaatgtctccatggccagtccctcaaacaaatccttccgtccctcgaaataacagtgaagggtactggtaagcaaagattttccaaaacgtcggggacggcttagaaacagatagctggaagccgaatgtgtcatccggtacacatattccgtcttgtcaatatagagaaaattcccctcacgtatcttaaagaaagtctgtatcccgataggatataatctttgcaaatcttccatatcaatcttatttttcacaaagctacaaaaaaatccattcataaagaccacaggcgggaaactttttcccgcctgccgcttttaccttatctgttttttcaccgttctcctctctcctcctcttttcttctcctgtatcgaaaatacattctcctccattcatcccagatagccccggcttcctcttcattgaaggcatccagacagcactccaccacttttacgtaatcactcaatgggcgttttgccccttttttaaatcattaaaagtagagtggccgatgtgtacgctcttccgtatttcgtcatttttcaaatccgcacgcttttgcaactctcctatgtaaactcctaaagctacatataaacctttttcattttccattcttttttattgttaaaattacactgtaacggttaattattttcactttcatcccaacatgtcgggacgatgtctattttgcatttactaattttacgccgtgttttgaaacacactcatatttttttgcaaaaataaatattttaacttgaaacaaaaagaaaatgatgccaaacaactacagaatgtcctatttcatgccacctatcgctcctatcaaagacaaacaaggccgactgatgactcctcccacgcttatccccttctgcgaagtctccatcgaacaagttttccaaatgattacttgcaacgagaatctcaaagccctgaccgaacaagtacgcaactccgaagatatacgaaccgccaaagcgtcattactaccgtatgtgaccccctgcggcacattcacccgccgtagcagtaaggatttcgtctccccgtctcacctggtgatagtagatgtggacggtctccactcttatcaggaagcagtggaaatgcgacgtatgctctatgacgatcctctcctacaacctgtactcacctttgtcagccccagcggactgggtgtaaaggcatttgttccctgccattattcctccacgacaaatgacatccaaaatatcacagacaacatgagttgggcgatgcggtacgtagagacggcatacaatacggtaacagcagtttcttccgaaacaaaatccaaagtagatttctccggcaaagacctcgtgagatcctgtttccttagttacgacccggaagcattgttcagaaccaccaacaaataaatcataaatcaaaaatcataaatcaaaatgaccgatattgaatctttacgccgtctcaccgaagcagtcgaaacggcaggagcggacattgctcccacttatcttgaatacgtacaattgtcattcgccattgcaacggattgcggtgaagcaggacgtgagttttttcaccgcctatgccgggtgtctcccaagtatcagcgcgaacatgccgaacgggtattctccaacgcactccacacccaacgtggagaagtgcacctgggcaccgctttccaccttgccgaagcgacgggagtaagcatctgcatagaagaaatgcccaaacatcccacaggtacaaaaggtacagcaggtacagcacgcaaatttcccccacacacgggcgcgcataataaggtgggaaatgacaatatctccgatgatagagaaggggaagaagaactattgccaggcagtgaaccacaacatcaattgcccacttttccggaaaacgactggccggaatttttgcaacgtatcataaaagccgggagcaacccaatacaacacgacatcatgttattgggagcgctcactgccctgggtgcttgtatgtcgcgccacgtgcgatgcctatatggcggcaaataccatcaccccagcctccaatgtttcgtagtggctccttcggcttccggcaaaggcatcctttcctacatccgcttactcgtggaacctatccacgacgagatccgcaaagaagtggccatacagatgaaagcatacaaaaaagagaaagccgagtatgatgcaatgggaaaagaacgaaccaaaaaggaggctccacaaatgccccctaacaggatgttcctcatttcgggcaacaacaccggtacgggtatcctgcaaaacatcatggactccgacggaaccggacttatctgcgaagcggaagcggacactctctccaccgccatcggatcggaccacggtcattggagcgacaccctgcgcaaagcgttcgaccacgaccgcttgtcctacaaccgccgcaccgaccaggaataccgggaagtgaagaaaagctatctttccgtcctgatttcgggtacgccgtcgcaggtgcaaactttcattccgacggcagaagacggatcatactcccgccaattatattattacatgtgcggaatcagtaaatggatcagccaatttatgggcaacgagatagattgggaggagatattcaccgctatgggactggaatggaaagaaaagttgagcgtgataaaatcgcacggcattcataccctgcaactcacggatgaacaaaaagaagaaatcgacaccgtcttttccgacttgtttgaacgctccagtgtagctaatggaagggaaatgtatagttttgtggcacgtctggctgtcaatctatgcagaatcatgtcggaagtagccgtattgcgtgccctcgaaagcccgcagccctacgacttcaagacctctcccacctctcctttcacaccggacaaggagattcctgcggacaaccgcaaagatgacatcattacccgttgggatgtatccatttcacaggaagactttcatgctgtgcttagccttgcggaacctctctactgccatgccacgcatattctatcgttcctccccagtacagaagtcagccatcgtcctaatgccgatcgtgattatcttttccagaaactgggtgatgaatttactcgtacccagttactggaagaagcagttgccatgggaattaaagaaaacacagccctcacttggctgaaacggctcaccaaacacggaaaattaatcagtatggacggtaaagggttgtatgcgcgtgcgtgtgtgtatgagtgaaccggaaaaagtgtacctactgtacccgttttacttacggatacggtagtcatttcaattaccgcatccattttgactgatacaatcgtttttcctgcataaagcatcgctttaggaggtgtaaagctaagctttagacatcgtaaagcggtgctttagacaccataaagcgacgctttatttaaggctctcccagggcatccacaatgactctcacctccaatggtgtgaatgagcgtcgctttgattcgtagcctaagtcgtacaggcgttgcagaagtccgggacacaaagagatccatttcttcatctttcgataggcagcgatgtcagttagttgcggagaataaagttgcgccagttccatgcgcccgtaagcacgtattttaaattcgctcatgatggttatgtttctgatttactgttacaaaaatacgaaaaaacgactatataaccaacgtttttccattgaataaccgactgtaatgacaaataaccgaccgctaccagacacaaccgtatactgctgatttccgggagatccggagtagtatttttgtatcgtcgaaagggaaaagaatccccggacaatatgtttaaccctttaatttattgttttatgattcgttacaaaatttatcagaaccagcaaaagaaaggcttgaatgcgggtaagtggttcgcccgtgcagtaagcgacgagacgtttgatttggcaaagcttgccgaacacatgtcgaagcacaattcaccgtattccggtggtgtcatcaaaggtgtgctttcggatatggtagattgcatcaaggaattgttgctggatggcaaatgtgtgaaaatcgatgatcttgccatttttggtgtgggtattcgcagtaaggcagccgatacgctggaagaattctcgttggagaagaatattagcggcatgcgtctgaaagctcgtgccaccggtaatctgtctaccacgaacctgaagctcgacagccagttgaagcagcaggcggagtatcagaaaccgacaactgccggcggaggttctgattcgggtgacaaccctgatccgaaaccggatggaggtggcgaagcgcctgacccggctgcttaaaaggttcaccacagaggacacgaaggacactgagttttttcaccacagattatttctttcctctgcgtcctctgtgtccgtggtgaataaaaaaactattatcaatttatttaaaactttttattatgagtaattcatcatcttcccgctctgtatggagcttagttctcaaaatcgttatcactgtagccaccgccatcggaggtgtgttcggaatacaaagttgtatgtaaccccatgcggactattacattaattatcattcattgcagtgccacgccggaaggaaagtccctttcggcggaggcttgccgacaggatcatatcttgcaccgtggtttccgtgatattggctatcatttctatatcacacgggacggagaaatccacaggggacgatcgcttgaagaggtcggagcacattgccggaatcacaatgcccattcgattggtgtttgttatgagggaggattggatgcggacgggaaaccgaaagatacgcgcacattggagcaacggggagcgctgttcgctttattgagagagttgaaaagacagtttccgaaagcactgattgtgggacaccgggacttgaatccgataaaaggatgtccgtgcttcgatgcggtgaaagaatatagacaagtataagctaatacgggtatttctcctttggcgccatcaaaaaaacttttatgaggactacttgtttttgagatataaactgtatctttgtcatacttataatgaagaaattatgataagtaagcttaagatgtccaatgtaatgggattcgagacttttgaaaatccgtttccatttccacaagtgactgttattcttggaaagaatgacacctgtaaaactgcactcttgaagatgatttattccgttggcaaagccaaggaattatatatcaagcaaaccgtgcaccatccggatatttcattcaagaatatcatatccaagaagcttttcgacgtatacacccctaaaagggcaggtttgagtgatattgtgcgcaagaacggcactcccaaaaaactatctatagaattaaactttaaagaagaagattcgaaagtcaacttttcttttggagtagatacccgtactactattacagatgttactattgcaaacggaaatagcagtgagattaccaattacatatttattcccgcaaaggaagtcatcaccgcttttaatacgataaaagcgattgcccgtcagtacttctttcccggttatgatgatacaacattggatcttattgatttgttggacatacctgtggtacaaggagaagccaatgcagagtttcaagatatattaaacaaaatgtccgaaatattttccggcgagttgaaacaagtggaaaatacggaacgatttgtcttcaagaaaggcaataccgaatttgccctccctttaacagcagaaggagtcaaacatataggtatattgtccacactaattcaaaacggacaattgaataaaaactccgtacttattctcgatgagcctgaagataatctgcatccgggagctatccgctcattgatgaagatcatttcagagctcgcgaagaaaggtgtacagatatttatcacaactcacagttattttgtactaaagcaactacatatagaagcacgctccaatgagatggacattatgtgctgttcattaaacagaaacgacagagggactatcgacactttttttggaaatttgaaaaagagtttgccggacaattccattattaatgaaagtatggccatgtatgatgaagacattgaccttgatatgaagatgtaattatggcaggttttacagaaagtgggattacgcttgattttccaacagacaattggtttcgttttgagaagacagagcctcataaaagcataagctgtttcaatttcaaagagatggacgcttgttggatagattatgcagatgggaaattctatgctatagagttaaaagactatacagcaacggggagtttggaaccggcaaatacagcagaccgtaaatggaatataaccaagaaggatagctcgaaaggatatataggcgcattcaaagataattgtctggaagctctaagaggatatactaaagtttgggataatgcccatgtcattgtgatgacttatgagcaagctagacgaaaattgccttttgtggtataagaggttattttcatcttcattggcagcagccgtaagttgatgaatacatcaccgttcctgacactgcagcccatacgctcgtgtaccacaccgcaaagagaactgatacccttgcgcatatcagtcctgccggggcagagaaaataccgcatcgtatcattcaggcagaacatggcagcaggcgtattggttaattaaacgggaaacggcctcttccataccagcacccaaatgagcacggacgccattaggaaacaacagggtcattccggaaacagaagaggaggaagcaatacagggggacttgaggctgatgggagctaagactgattggggagcagatgtttcgtgatcgggaacactggaagatttacgtttccaataattgtacgtggagtaactgacatgttcacgttgcagaaatttcagaagactcagaccgcttaaacgatgcagttcctgtaaagaggtaaattgttcttttgtcataatgaaaatatgttagaagttcatgcaatattgcacaggcaaaggtgctatgaaaatataacaaagaaaacgggtactttatcggatgcttacctttatcggatgcttactaaaaaaaatatcaacgatcttcacagaccgttgatatagtgggaaattcacatcggctttaacctccgatgtcagggc

SEQ ID NO: 8113 - DNA, 39901 bp, Unknown
  gut microbiota DNA sequence
aagtaagctatgagaaatacttttaaaattggtatttctcatagttttattcgcaaatagaccttgatttggcttatttctcatacctgttgaactcatttctcataatggcccggtgttggtatataaataggctgtgtgggcttacctatattctgtaagttgccttgtgcttttaggcgacggatttgtctactggccatactttgagtgaaactgcagagcgactgcatattactacgggttaatacaggatgagttgcaaaataggcagtaagtttcttgtcgatctcttcttctgaaagagaagccgaatgtggcttgtatttcgaacgtcgtaagtgactagtcatgcacaaactctttaaatctctgtcagcctggaaattaatggacttaagtttcactttgtcagcacgagtggtaagcgagtgcacgggttcggtagcttgcaatgtaatctggaaatagccgattccatccagatgtactcgttctccctcgcacagatggttgcccatgcatctactcaattccattaacatggcttctacttctgctttcccgaaagtagttgccatgtggatttctcttgccagcttttgagtggtcacatgttgaaaattaaccacccgtgggtgataactaggttcttccccttctttttccggttggggattcttataaaactcgaattgtattgccatctttgttttaatttaatggttatttatatgttatgtactgatgctcttagtgtatcttgcttttattcttttattattcaaccgccatcctgattgttccactacagtgaacggttcttttcactctagtagacagaactttttactgtagtgaacaggcctgtgcactccagtggaacgattgggatgctctttcaaagatacgacattattaggtgaaaaacaagtaattaactagttgttttcatgaaagaaatagctagctgttttctaagataagcttggcggataaacaggagaatagttgtgtctgactatgagaaataccctgatagagtatgagaaatagcggctttttgaagaaaatcgatgaggatagtatgagaaacacctgttttaaaaacgtttctcataatgtacttctttgattatatgtgctttatctgaaatctatgagaacatgagaaatagaattgaaaaatcttttctagtagaaagatgaaataagtattctctgaaaagttgtttgtgtggaatatttacagtatatttgtgtcgtaataatcgccctacaaaacacatgcaggacaaataaataaagtaatgagaataacactggtaagagacgatggcaaggtgaacactatgcgtacgttaagaattgaacagctcgtggagcaaatgaaagtggaaaccaaaacacagcctgtctcaaaaatgagagaagtcctgccttttatgcttccgggtgataaaaatgactatgtacagaaagtgccgaagctgatacctgcagccgccttttttcgcaaaggcggcataacgacgatgagtgaatacaatggaattgtgatgattcaggtcaacaacttgtccggacgtatggaagcggatgaagtgaaagaacgggtaaaggagcttccgcagacttacttagctttcaccggttcttccggaaagtccgtgaaagtatgggtacgctttacttatcccaatgatcgtttgccgacaactagtgaagaagcggagctttttcatgcgcatgcctatcggttggcagtgaaattttatcagccacaacttccttatgatatcgagctgaaagtaccttcgttggagcaatattgtcgtttaacttttgacccgcacttgtattttaatcccgaagcaatgcctatttatatgaagcagcctgccgctatgccgggtgaggtgacttatcgcgaacgggtgcaaacggaaacttcaccgttgcaacggcttgcgccgggatatgaaaagtgtaatgcactttctgtccttttcgaagctgcttttgcacgtgcgttggatgaagagactgattatcaaccggaaggagacaaacaatcgctactgattaacctagcaggacattgtttccgtgccggtattcctgaggaagatacagtgcgatggtctcgtgcccattatcgtttgccaaaggacgatacattggttcggggaaccgtgcgaaatgtataccgcacttgtgagggatttgcgagtaaaagtagtctgttgccggaacaattatttgtcatgcagatggatgagtttatgaaacggcgttatgattttcgtttcaaccagttgacgtcacaagtggaatgtcgtgaacggaacagttttaatttttattttcatccggtggataaacggttgatggcaagtattgcaatgaatgcacattatgaagggcttaagctgtgggataaagacgtggtacgttacctgaattcggatcatgtgccggtttatcagcctatcgaggaatttctttatgaccttcctcattgggatggtaaggatcacatcggcgatcttgccaaacgagttccttgcgatcatcctcattgggcgcatttgtttcgtcgttggtttcttagtatgatagcgcattggcgtggaatgggaaagaatcatgcaaatagcacttctcctatattgataggtccacaggcttatcgtaagtctacattttgccggttgattttgcctccatgcttgcaggcttattatacggatagtattgatttcagtcggaaacgggatgccgaactatatttgaatcgctttttattgattaatatggatgagttcgatcagattggcatcaatcagcagtctttcctcaaacatattctgcaaaagcctgttgtcaacacacggcgaccgaatgcttcggctgtggaggaacttcgtcggtatgcttcttttataggtacgagcaaccataaagatttactgacggatacttccggcagtcgtcgttttatcggtgttgaggtgactggagtgattgatgtggtccgccctattgattatgagcaattgtatgcccaggcaatggcactgctgcgtagtaatgaacgttactggtttgatgagaaggaagaggctattatgacggaggcgaaccgggagtttgagcagtcgccggcaatcgagcagttgttccaggtgtattaccgggtagcggaagaggaagaagagggagaatggttacttgctgcagatatacttcagcggatacaaaaggcaagtaaaatgaagatttcttccggacaggttaattatttcgggcgtattttgcagaagctgggagtaaagtcattcaggaaaacacgcggagtttattatcatgtggtggctgttgggcaagggggatgatgaaataatgcacgagatgtgcattttattattttataataattatctttgcgtaataacgtgagatatacgaagactatgataagaaatccttttataacaagtggatatgtgtctgctgattatttttgtgaccgtcagcaggaaagcgaacagttggtacgcgaagtgatgaatgggaataacctggctcttgtctctacccgacgaatgggaaagacgggcctgatccgtcattgctttcagtttcctgaaattaagcaggattattacaccttctttattgatatatatgacagccggtcattgcgcgacttggtatttgcacttagtaaagagattttggaagtactgaaacctgtggggaagaaagctttgcatggtttttgggaatgtgtgaaatctttgcaggccagtatctcttttgatgtgaatggtatgccttctttgaatttgggattaggagatatacaagctccggctactacgctcgatgaaattttccggtatttagagcaagcggataagccttgtttgattgccattgatgaatttcagcagattaccgggtatgcagagaaaaatgtagaggctactctccggacttatgtgcagcattgtaataatgcgcgttttatttttgccgggagtcagcgtcatgtgatggggaatatgtttttgacgccttccagacctttttatcaaagtgtgtcaatgatgcatttggaaagtattcctttagaagaatacattcgttttgcatgtatgcatttcaaacgtgcaggcaaagaaatggaagaaagtgctgttaccacagtttatcaacagtttgaaggaatcacatggtatatacaaaaagtattgaatacactttatgatatgaccccggagcacggagtctgtaaagtggaaatggtgtcagaggctattcggcagattattgattcattcagatatacttattcggaaatcctttttcgtttgccggaaaagcaaaaggagttactgattgctatcactaaagagggaaaagcgaaagctatcacttccggtgctttcataaagaaatacagactggcttcagccagttctgtgcaggcagcattgaaagggttactggaaaaggattttgtgacccaggaaaagggagtgtatcaaatatatgatcgtttcttgggtatttggttgaaagagaattattgagtcgttttttgtttgttgaaacgtgcttttcgataaatcgcgttaataattagctgaaactactgcctgttaatcagttttattgtatctttgcggtcttaacttttttaatggtaaataatgaaggaatttctacaactaatgcgacgtttcgtgtcgccttataagaagtatatcggctgggctattttgctgaatattttgtctgctgtattcaacgtgttctcatttacttttttgattcctattttgagtattctgtttaaaacagaaggagcggataaagtataccattttatggaatggggtagtggtgatttagcagatgttgccaagaataacttctattattacatatctcaaatgatagtggataatggtcccactgtggctcttattttcttgggattgttcctgatggtgatgacattgtttaaaaccggttgttactttgcttcttcagctgtgatgattccattgcgtacaggagtggtacgtgatattcgtattatggtatatgctaaggttatgcgtctgccaatgtcttttttctctgaagaaagaaagggggatatcatagcccgtatgagtggtgacgtgggagaggttgaaaactccattactagttctttggatatgttgatgaagagtccaatcctgattattatatatttcgtgacattggtcaccgttagttggcagttgactctttttactattattgtattgccgggaatgggttggttgatgggagtggtcggaagaaaactgaaacgccagtcactggaagcacaggcaaagtggagtgatacgatgtcgcaattggaagaaacactgggaggtttgcgcatcatcaaggcttttattgcggaagataaaatgattaaccgcttcaccaaatgtagtaacgaacttcgggatgcaacaaacaaggttgctatacgtcaggctatggcacatccgatgagtgagtttttgggaaccattctgattgtagccgtactgtggtttggtggtacattgattttaggcaagaatgccacgattgatgctcctacatttatcttctatatggttatcttgtatagtgtaatcaatccgttgaaagactttgctaaagcaggatacaacattccgaaaggtttggcttctatggaacgtgttgataaaatcctgaaagcagagaataagattaaagagattccgaatccgaaaccgttgaaaggtttgaatgacaagattgaatttaaagatatttctttcagctatgatggtaaaagagaggtactgaaacatgtaaatttgacagttcccaaaggaaaaacgattgcactggttggacagtctggttccggtaaatctaccttagtcgatttgttgccacgttaccatgatgtacaggaaggtgatattaccattgacggaacgagcatccgcgacgtgcgtattgctgatttgcgtagtctgattggtaatgtaaaccaggaagctattttgtttaatgatacattcttcaataacattgcttttggtgtggagaatgcgacaatggaacaagtggtagaggcagcaaagattgccaatgcacatgatttcatcatggagaaaccggaaggatataacatgaatatcggtgaccgtggtggtaaattgtccggtggtcagcgccagcgtatcagtatcgcccgtgccatcctgaagaaccctccgattctgattctcgatgaggctacttctgcattggataccgaatcagaacgtctcgtgcaggaagcgttggaacgtttgatgaaaacacgtacaacgattgctattgcccaccgtctttctactattaagaatgcagatgaaatctgcgtgttatatgaaggagaaattgtagaacgtggtaagcatgaggaacttatagaattaaacggctattacaaacgcctgcatgatatgcaacaactgtaatgcagcaattgtaattttttgataatgcaatgatattattaagttttgatacagaagaatttgatgtacctcgtgaacatggcgtagactttccgctggatgaagcgatgaaagtatcagtctatggtacgaaccggatactggactgcctgaaaaaaaacggggtgaaagctaccttcttctgtacaagcaattttgcagaaaatgcgccggaggtgatgcggcgcattatggacgaaggacatgaagtggctgcgcatggatgtgaccattggcagccgcaggcttccgatgtcagccgttcaaaagaaatcttggaacgtcttaccggcagaacgatagaaggctatcgccaaccgcgtatgtttcccgtatcagatacagaacttgaacgaatggggtatgtgtacaactcctcactgaatcccgcatttatccccggaagatatatgcatttatcagagccgcgtacctgctttatgacaggcaaactacttcaaatcccggcttctgtaactccatggattcgtttcccgctattttggctgtcttgtcataatctgccgatgtggctttatcaaagcctggtaaaccgggtattgaaacatgacggatattttgtgacctatttccacccgtgggagttctatccgttgggtgaacaccctgaatttaaaatgccttttatcatccgcaaccattccggcaaaggaatggaggaacgtttggatatgcttatccgcaacctgaaagagaaaggctacccttttatgacttactcggagtttgcgcagataaaactggctgaactaaataaaccggacgaaaaatgattaaattggctattgtatccccctgttataatgaggaggaagtgttggaagagtcaaccacccgtttgacagctttgtttgatgacttggtggcgaaaaaaaagatcagcgccgacagttttgtgctctttgtgaatgatggcagtaaagatcgtacatggagcattattaaacaactgcaccggacgaatccatatataaaaggaatgaacctggctcgcaacgtgggacatcagtatgctatcatggccggtatgatgaccgctaaagattggagcgatgccgttattaccattgatgccgatttgcaggatgacctgaatgcgattgaggagatgatcgatgcttatacacaaggatacgatgtcgtatacggggtgaaagtatcccgccaggcagatccgatgctgaaacgtctttccgcaaccgctttttataaattacagcaccggatgggagtagagacaatctacaatcatgcggattttcgttttttgagtaggagagtactggaacagttgtctcattatcaagagcgcaatgtctatttgcgtggtattatcccattactgggtttcccttccactacggtagatgatgtgatccgggaacggacagccggaacctccaaatatacagtaagaaagatgttcagcctggccttggacggaataacctctttctcggtgaagcctatttacggtattgtttatctgggaattatatttgtttttatcagtatactgataggaatttatgttttgtattctttaatttcgggtacggctgagcatggctgggcatctttgatgttgtctgtctggtttgtcggtggaattgttctaatgtcaataggagctgtcgggttgtatattgggaaaatctataaagaagtaaaacgtcgtccgctttataatgtggaagaagtactatacgatgaccaagataagtaaagctatatttgacaggcatccggactggcgggataagttttggcaatttgttcgtttcggagttgtcggcactgtatcctcggctattcattacggagtgtattgtctggttttactggttgcaaacgccaatatctcttttacggcaggttatgccgtcggatttatttgcaattatttcctgactaccttttttacttttcgttccaagccctcgtctcgcaatgcggttgggtttggctttagtcatctgattaattatctgcttgagattggtttgttgaatctcttcctttggataggggcaggcgaacttctggcgccgatactggtgatgataattgtagtacctatcaatttcctaattcttcatttcgtttatatctacaaagggagaaaataattttattaaatctctttcatttaattcataaaaagaaaaggctattatgaaacgttttctaaatcttattgtatatatactcacaatacatgtttcggctttgctgatcgcaggactgtttcgcctggtactttttatctcatcctatcatcaattgacttctgaagccttgtcggataagagcctttcaatgcttgcttttgtgcatggtgtctggtttgataatgtgatcggttgttacatacttctgttgccgctggcaattgcggtggtgtgtggagtctgcaactactatgggaaagcattgttccgtttcttcacaatctttttcagtgtgttttatggactggtctatttaatcagtgcgtcggacataccctactttgcctatttctttaagcatatcaattcttctatattcgaatggttcggttatgcaggaactaccgccggaatgatattgggagaaagtgcctattacttgtccatcggattattcctgctcttcttggccgggttcatagtatggcttgtctgtctgtcgcgttatttccatcgtcgtagccttactatttccgcttcgttcccattttggaagagaggagttgtggttctggtcggagcttgtctgatcggcctctgcatctttggaattcgggggcgtacaggttataatccgatcaaagtgagtgcggcatatttctgtcaggatgcttttctgaatcaattgggagtaagtccgacttttaatttgttgacgagtgtgatggatgatatgcgtcctgaaaataaatacttgcatctgatggatgagcaggaagccataactaaggcgcaagctttgctcaaccgtcagggagaggtagctgtctcaccgttggctgtgtacagacatgcttcaaaagcagatagcgtgcagcaaggtcgccccaatgttgtactgattatgatggaatccatgtccagtaaactgatgaagcatttcgggcaatcagaaacgctgactcctttcctggatagtctgtatacccgttctattagcttccgtaatttctattcggcaggaatccatacgaatcatggtttgtatgccaccttatattctttcccggcgatgatgaaacgaaacctcatgaaaggctctgtcattccccgctattcgggactgcctactgtcctgaaagaaaacggttattataaccttttctttatgacgcacgaagggcagtatgataatatgaacgctttcttccggacaaacggctatgatgaagtgttctcacaagaaaattatccggctgataaggttgtgaatagcttcggagtacaggatgatttcctgtatgactatgcaattccggtattgaatcagcgggctgccaccggagagcctttctttgctactttgttgtccatcagcaatcatccgccgtatgtgatacctcctttcttccatccgaaaacgagtgaacccgagatgcagattgttgagtacgcggattgggctttgcgtaagttttttgaagaggcacgtaaacagccctggtttgataatacgatatttgtgttggaaggagatcatggcaaattggtgggagacgccgaatgtgagctgccggaatcttataaccatatcccgctgatgatttactccagccgtattcatccggaagagaaaaacacttttggaggtcaggtagatatacagcctacgatattggggctgttgaatattgattatctacagaataattttggagtggatttgctgaaagaagaacgtccctgtatgttttatactgccgacaatatgattgtgggacgcaatgatacgttattgtatctttataattacgagacgcagcaggaatttacttatcatatagacaatggcaaattgaaagccgttccgatggatgatcgctttttgcctttaaaagaatatagtttttccatgctccaatcggcagagtttcttgtgaagcatggaaaaacggtaaattctgtccctgttactcaacaataggagtagtttcggttttttcaggctgttcgtttttaacgaacttgtatactttggctatttgccggagcactcgtttaggagattcgtaaacctgttcgaactgatacccctctttctcaaattcaggaagatatttctctgcgtcattggtgccgatcaacaagaaacctttggcaggacgtttttggtagaagttgtcgagacggttatgcaggtagaaattaatctcgaagtaatgtacagggtcacctgctgcatgcagactttcttcaatgaattcgtacatagtcccttcgctttccggcgcaatcttttcgatctctgcagcgacgaatttgacggatttcgaatttaatgctgccggctgataagcaccgtccaatgcaaggtataatcccatggtaagcacgacgagggcatacaggaagcggttgctcaatgcatgtttccgttgatagaaccaccagtagataccgaggacggtaggaacggcaatcagcaacaaggctcctgcaccgctgatattttgtatggcgcgcatgaaattaatgttgtcctgtgcgtgacggccgtggaagattgtttcagggatgagcccgcattttaatacaatgaagcaagtgaacagcaacaggctgattaccgcaagaatacttccatatactttgatgactttggattgcttcttgaccagataaaatagatatttggcaaggaaataagcaatgaaaggatagataggcatcagatagacgctgcgtttgctctgcggaatgcagtagaaaacgaagatgacgacaatactggtgaaagagaataaatccaccggatccatattctttatccaagcagtgaaacgtttccaccaagcggcaggctggatattgaatttatggtaagtcaggctgaacagggaaagtacgactaacagtgtccagggaacatatccggcaaacaaggtcacgaaattatagtgccaggggttcacgcatgaattatagctcatggtattggtcatgcgaccgaggttttcctccatcactaatgcgatgaattcttctccaccttgttggtaagcagctacgtaccagcagataggcaggatgagagaaaggatagcccaggcggaaagtagcaggaatgccttgaagaagttgacaccccggagtaacaagaatatgcctacaactaagcatggaatgatagtacctaccggtcctttagtcagtgttccgcaactcatcaggagaatggccagccagggaatacctttaagccccttctcataccatctgtagagacaatatagagcgccaacggtgagcgctgtcaataccatgtccacccggcagttggctccggcccggtgtaattcgaaattagtcagggtaataaaggcggccaataacgccagttgcactccttttcttttggcaaagaacagaaagccgcagagagtcatggcaatcaaggcgatggcggacggcaggcgggaggtcatttctgtgacttgccctccgttcactactgctgatacagcagcgatgctccaatggaagaaaggcggtttgtaagccatttctcctccgttgtttctgggtaagatccagtttccgctatccagcatggaataggaaacaatagcttcgcgaggctcacctttcgtgtggtattccgacaagccgaggaaaggcaggatagtaactacgcaaatgactaataacagccagaaagctttgtttgaagtcaatgttttcatcttttcttatgattgaaatttatgttcttttattttctgccgaagtcggccggaatttctccccattctttcgtttcccatttcaggatacgagtggtatatgtattttcccgcaaccatttttctgcccgttcgatcaataaaaacagttcttccgtttccggagtgcgggggagcttggttttgcacttcttctgtcgtacccagctgatcgcattggcgctatcactgtaaataggcatgtcgaaacctttgttcttcaacaacgccaacccgtgtacgatggctagaaactcaccgatattattcgtgcctttcatcgggccgaaatgaaaaatttcctgccggctggcaatgtgtactccacgatactccatcggtcccggattgccgctacaggctgcatcgactgccaggctattgtcgatcacgcaagagggtaaagtatctgacgaaggtttggaacctcctgatttagactttgcgtttttgccgatataagcgtatggagacattgtcagcgcgcgttccgcttcttcgcgcgtatcgaatgatttgtatttggcagcttcgtatcctttgatttgaagctggcagtctgtccaggaagtgtaaatcccgggtgtgacgccttcccatacgacataaaatttttgttttgccatttttctgacgataaatttagatagtcaatgaattgacgctgcgaaggtacaaatatattctctaactgaacaagttaggggggatacttgttataaaaaaaagagagttttaagaatataaaataagaaaggaactatgatggaaagatcttttagtgaagctttgaaacaacgtcggacttactattcaattactaatcagtcacctatatccgatcaggagatcgaatgtatcgttaatatgaccgtgcgtcacgtaccgtcagcattcaattcacagactacacgtgtggtgctcctgttgggagaatctcataagaaactgtggcagatcgtgaaagatgcattgaagaagattgtaccggctgaagcttttgtaaagacagaagagaagatagatcattcctttgcctgtggctacggaactgtactgttctttgaggatcaaaaagtagtgaaaggacttcaggaggctttcccgtcttatcaggagaatttcccgggatggtcattgcagacttctgccatgcaccagctggctatctgggtgatgcttgaggatgtaggtttcggagcatcgctgcaacactataacccgttgattgatgaagaagtgcgccgtgcatggaacttgccggaacattggcatctgattgcggaaatgccgttcggacttcctattggcaaaccgggtgaaaaagaatttcagccgcttgaagaacgggtgagaatctttaaataaatcgggaatgaagaatgaataatgaagaattggatggcataatggctaaaattcttcattcttcattcttcattcttcattaaatgattaattttgtgagcaaaattagtcatttatggttcgtatcttccttaccggctatatgggtgccggaaaaacgacgctgggtaaagcatttgcccggcagatggatataccgttcgttgatctggactggtatatcgaagagcgttttcacaaaaccgttggagaattattcactgaacgaggcgaaacaggattcagggaactggagcggaatatgcttcatgaagtagccgagtttgagaatgtggtaatttcgacgggaggtggagcgccttgtttttttgataatatggactttatgaaccggaccggaaagacggtttttctcgatgtgcatccggatgtgctgttcagacgcttgcgtgtggctaaacagcaacgccctattcttcaggggaaagaggatgacgaactgaaagcgttcatcgttcaggcgcttgagaaacgcgcgcctttttatcaccaggcacaatatatctttaatgcagacgaattggaagaccgttggcagattgaaacatcggtgcaacgtttgcaacaacttctcggattataatctgtgcctaaattgtatatcagactttatttttttgatactctttattgttcattcagtcaatattagtaccttgcactcgttatgagatttttttattgactaataacacaaaattaaggtaaagtctatatcatgaaaattttaaaagagaaatttggagagttatccgctagaattaaagcatccggacagcctgcaagggcatggtttccacagtatacaccggcctcattattaaatgcggaaaactggtgggaagcattggctgtatgtgaatatgctttggacacaaaagaagacgagaaactgacagaagatttttttgaactgatattcagtgcttttgactgtaacgtagaggtcgatctcaatgcagaagaatatgaattctggtgggagaaggtgatacaggtatgtgaccgtgtagctgtgtttagcggtgcgggatgggcacagaagggtgcgcaatattctgaagcccgttatggaaaacgggatatgagttatttgttcccgtattacgaaaaggctgccgatatgggttgggctgaagcggaagcaactgttgcctattggcgatacatgggattctattgcgaacaaaataaagaagagggcgaacgacgttttgctgctctcacttctcccgaagctattttatggggaaaacattatcgtgcttttgtcgaagaatttacaggcgataaagcgaaagcatcgcagatgcgtcatgacctgcttgccgaactgcctgaaggagaacgtttgcgtgctcatgtatatgcagcgctgggagacgcgctcgatagggcggaaggtagtgtggcagaggaagctgcttactacgaaaagtctttggaggtagttcccaatctttatagtcttaaaaatctggctaccctttatttccgttatccggaactgaataaaccgaaagaactgggctttgaactttgggaaaaggcctggcatgcaggtgtgtggtctgcggccaacttcctgggatataattatcaggaagaagaatggctggatatgccgaaagctattgaatggctggaaaaggggatgctttattgtgaatcttacagtgcgtatgaactggcgttgatctacctgtataatgatgaatataagaacgtggaacgtggactgatgtgtctgaaccgttgcgtggaagataactatatacaaggtattgaaggattggctaatgtctatttcaacggtgatttggtggaagaggacatgaatcgtgcgaaagaattgttggagaaggctattgagctgggttcgggaaatgctgcttatcgtctaggttggatgtatgagcgtggcttcttgtctgaacaaccggattatgtgaaggcgtttgagtattatgaaaaggcagcttcactgaacaatgccgacggatattgtcggatggcgctttatctggctaatggatatagcggtgtaaaagatgccgataagtcaagagaatgttatgaaaaagcagccgaactggattcttgttttgctcttgtagaactggcgttcttgtatgagaatggcgatggagtggagaagaactatgaaaaagcatttgaactgattagtagggctgccggacagggttatccttatgcgatgttccgttctggtctttatatggaaaaaggtgttcttggcgaagcaaaaccggaagaggctttcgcttggtatacaaaggcggctgaagcggatgataatgatgcgatttttgctctgggacgctgctataaagaaggaatcggaacggcagaagactgggataaggcactcgaatggttcggcaaaggggcggagaaggaagagtcccgttgtttgacagagctgggcttggcttatgaaaatggcaatggcgtggaagaaaatccgcaaaaggctgtggaatatatgatgaaagctgctgaacaggactatggttatgcccagtttaagatgggagactattatttctttggttgcggtccctgtctggaagacaataaaaaggctatggaatggtatgagaaggctgtggccaacgaaattccaatggcaatgttgcgtatgggtgagtattacctgtatgattatgacagtctgaacgaatcggaaaaggcttttgcctatttcaagaaagctgccgaatacgagtggtatagcgaaggattgggtatctgttatgaaatgggtatcggagtggaagataatgaaacggaagcttttaaatattatacgctggctgcggataatggaaatacgacgagtatgtatcgtaccggactttgctattacaacggagtaggcgtgaaacagaactatgccgaagcttaccgctggtttacggatgcggcagggaatggaaatattgctgcgacttattatcttggtaagatgatgatgtatggtgaaggttgtactcctgatccggaaactgcggtgcaatggttgctgaaagctgccgaaaagaatagcgacaaagcgcaatttgaacttggaaatgcctatctgacgggcaaaggcgtggaagaaaacgatgaaattgcaatggagtggttcgaaaaggccgcagagaatggcaatgagaaagctcttaaaattaccggaaggaggagaaagtaaaagaggaacatggaaaaagaagggaataatctgtttcaggtcaatcttaaaggtatgattgctctgttatcagagcatatttatagtaacccgaatacttttgttcgcgaattgttgcagaattgcgtagatgccatcacggcactacgcaatattgacgagaattacaacggacgtatcgatgtctttctgaatgaggacaaaacggtggtgttcagggataatggaatcggactgaaagaggaggaagtttatcgctttctgacggttatcggagagagttcaaaacgggatactcccgatgcggacgattttatcggaaggttcggtatcggattgttatcttgttttgtggtgactaatgaaatcaccgtggagagtcgttcggcaatgggcggacagcctgtttgctggtgtggcaaagtggatgggacgtatcagctgactttatcagatgaagaacggcctatcgggtcgcaggtagtattgcacccgaaaggagactggatgcatctttttgaatatgaaacatttaagaagatactggtgagttacggggaagtgttgccgtatcctatctatctgcattatcagggggaagaagaattggtaaatacgccttcacctgtatggcttgacccgaaggcgactcgcaaagaactgctggattatggggcaaaagtatttcagtcgtctgctcttgatgctttccggatttatactgaaagtggtaaggtagaaggggtgctttatgttttgcctttccgcacacaattttcagtacgcaattcccataaggtctaccttaaacgtatgctgttgagtgaggacgattgtaatctgttgccgccgtgggctttctttatccgttgtctggtgaatgcggacggattgctgtctactgcttcccgcgagtctttggtgagcaatgaccagttgaaggatgcgcggaaagagatcggggtagctatcaaggattatctgcggggattggtgcagaatgaccgagccatgttcaaccggatcttggatgttcatcacttccatatcaaggcgattgcttcggaagacaatgaactgctccgtttgtttatggattaccttccttttgaaacaaataaggggctgcgtggttttggaagtattcgttcggcaagcaatgtgatatgctataccaagaatctggaagatttccgtcaggtgcgccgtatagccggagcgcaaggatggctggtggtgaatgctgcttacacttttgatgaaactttgttgaaaaagtatgtccgtctgaatccggaacttacgttggatgaaatatctccttcacggttgctggaacagtttggagaagtggaggcgaataaagagtttcaggcttttgaaatgaaagcgaacgagctgttgaagcggtttggctgtgtctgccgtctgaaacattttactccggtggatattccggtaatctttgtggcggaggaaaaggagaatgtagctaaaagtgccaataatccgttagcggctgtattgggggctgtcaatactgccaagcaaattccaccgacactcactttcaatgcggataacgaaatggtgcagactttattgcaaatacagggagataataaactgtttcagcatgtggtgcatatattgtatgtacaatcgcttctgcaaggtaaatatccggtgaacagtgaagaaatggagcttttcaaccgttcgcttagcgaactgatgacttcgaaaatgaatgattttataaatttcctgaattaaaaaaaaagagtatgagatacacacttgaaatacaaaaactgctgttgcagacacagaatgacagcctgcatccccgtgaaaaagccaatctattgaaagaagctatccgcatcgctgatgagaacgaagatgtggaatgggctacggagttgagactggatcttatctatgaactgaatcttctttcggcagatgcggaagagattacagtgttctctaaaatcctggatgattacgagaatcacaaggatgtaatcaaagaagatgacttgttgtggaaatataaatggatatgggcttgtacgttcgatctgccggaaattccgatggaacaggtgaaagcgatcggtgaggattataaaacccgtattctccggaatggatattctttgcggagttattatcatcgctggtctgtggaatgtatttggatgcgccagtatgacaaggcgaaagaatatattgacaagatgctgaatgaaaagatagacgatcagtcgtgtgaggcttgcgaactgaattttatgttggattattatctggaaacagggcagtttgatgaggcttacagccgggcgcagccattgattaataagcaggtcacctgttatgaagccaatttgcgggcttacttgaagctttcttattatgcacagaaagctggtaaaccggaggttgccgccgatatgtgtgcacgcgccgaagaagcattgctgggaagagaaaaggatgaatatcttttgctctacttgggattgtttattgcttataatataatgacgaagccggaaagaggctgggagtatgccgagcggtgcatcggttggagtttgcgtacgaatacgttgaagaaatatcgcttctcttgcgatatggtagaggccttgaagtatgagacccgtccggaagtctccttatcgttgccggaggaattccctctttaccgtccggacggaatttatcaggtcagcgagcttcgcaattatttctatcagcaggcagaagagctggcacttcgctatgacgcccgcaacggaaatagtggttatatggaccgtttgaaacaattaatgtctaattaattgccaacatgtagattaatccgtatttttgccgtccaattatttactaaaaacactgaataacagaaaatgagaaagtggcgtattgaagattctgaggaactctacaacatcacaggttggggtacctcgtactttggtattaatgacaaaggtcatgtcgttgttacacctcgtaaagatggagtatccgttgatttgaaagaactggtcgatgagttacaattgcgtgatgtggcatctcccatgctggtgcgtttcccggatattttggacaaccgtattgaaaagatgtcgtcctgctttaaacaggcagccgaggagtatggttataaagcccagaactttattatttatccgattaaggtcaaccagatgcgccctgtggtggaagaaattatcagccacggaaagaagttcaatctcggactggaagccggttctaaaccggaactccatgcggtgattgcggtcaatacggactctgactcattgattgtttgcaacggatataaagacgaaagttatattgaactggctctgcttgctcaaaagatgggtaaacgtatctatctcgttgtggagaagatgaacgaattgaagctgattgcaaaaatggcaaagcagctgaatgtgcagcctaatatcggtatacgtatcaaactcgcttcttccggtagcggaaagtgggaagagtcgggaggagatgccagcaagtttggcttgacttccagtgaacttctcgaagcgctcgattttctggagagcaaaggcttgaaagattgtctgaagctgattcatttccatatcggtagtcaggtgacgaagatccgtcgtataaaaacggctttgcgtgaggcttcacaattttacgtgcagctccattcaatgggctttaaggtggagtttgttgatattggcggtggattgggagtggattatgacggaacccgttcgtccaatagcgaaggtagcgtaaactattccattcaggaatatgtaaacgactctatctctacgctggtagacgtgagcgataaaaatggtatcccgcacccgaatatcataacggaaagtggacgtgcattgacggcacaccattctgttctcatctttgaagttcttgaaaccgctaccttgcccgaatgggatggcgaggaggaaattgctccggatgcacacgaattggtgcaggagttatatggaatctgggattcgctgaatcagaacaagatgttggaagcatggcacgatgcgcagcagatcagggaggaagcattggacttgttcagtcatggaatcgtggatctgaaaacccgcgcacaaatcgagcgtctgtattggtctattacacgtgagattaatcagattgccgccggtttgaagcatgcgcccgatgaattccgtggattgtccaaactgcttgccgataaatatttctgtaacttctcactgtttcagtcacttcctgactcttgggcaattgaccagatattcccgatcatgcctattcagcgattggatgaaaaaccggagcgttcggctaccttgcaagatataacctgtgattcggacggcaaaattgccaactttatctctacccgtaacgtggctcattacctgcctgtacatgcactgaagaaaacagaaccttattatgtggctgtgttcctggtgggggcttatcaggagattttgggagatatgcataatttgttcggtgatacgaacgccgtgcatgtttcggtgaacgagaaaggatataatatcgaacagattatcgacggagaaacggtagcggaggtgttggactatgtgcagtacaatccgaagaagctggtacgtacgctcgaaacttgggtgacgaaatcagtgaaagaaggaaaaatctccttggaagaaggaaaagaattcctttccaactatcgttcggggctttacggatatacttatttggaataaccggcagggtgccggagccggattctccattcggtgaacttattagaaatcaggaaatgagagaaaaactaacagttattaaggtgggtggcaaaatcgtagaagaggaagccacccttcgtcagttgttaaatgactttgccgctatcgacggacataaagtgttggttcatggtggcggtcgttcggcaacaaagattgccgcgcaactgggtattgaaagcaaaatggtaaatggtcgtcggattaccgatgccgaaacgttgaaagtcgtaacgatggtgtacggcggattggtgaataaaaacattgtggcaggtctgcaagcacgcggagtcaatgcactcggattgaccggagcggatatgaatgtaatccgttcggtgaaacgtccggtgaaagaagtagactacgggtttgtgggagatgtggaacaggtggatgctactttattgtcggatttgatacataaaggcgttgttcccgtgatggctccattgacgcacgacggtcacggcaatatgttgaatacgaatgcagataccattgccggggagacagcgaaagcgttgtcggctctgtttgatgtgacattggtgtattgtttcgagaagaaaggtgtgttgcgtgacgagaatgatgacgacagtgtgattcctcaaatcacccgtaccgaatttgaacaatatgtagccgatggcgttattcaaggaggtatgattcctaagttggaaaattcttttgaagcaataaatgcaggagtttctgaagtggtaatcaccttagcgtcagcgattaacgactctggaggaacgagaataaaaaaataattcaaaaaaaagtagtgggcgactgtaacttttcatatcctagcccgtcattattatagagatgcaagaaatcagcttccgaaacgatattttgccgttgaaggataaactctttcgattggctctcagaatcaccctggatagggccgaagccgaggatgtcgttcaggataccatgataagagtgtggaacaagcgtgataagtggtctcaatttgaatcggtcgaagcctattgcctgacagtggcaaagaacctggcgatagaccggagtcaaaagaaagaagctcaaaacgtggaactcacccccgaaatggaggaagaacctgatgcaaacagtccgtacgaccagatgattcatgatgaaagaatgaacatcattaatagactggtaaacgaacttcccgaaaaacagcggcttatcatgcaactgagggacattgaaggtgaaagctataaaaaaattgcaaccttgctgaatctgacagaggaacaagtcaaagtgaatctcttcagagccaggcaaaaagtaaaacaaaggtatttagaaattgacgaatatggattataaggatatagaacagctcctcgagcgatactggcaatgcgaaacttccgttgaggaggaagcaacattgcgcgacttcttcgcaaaggaagaagttccggctcatttgcttcgctataagaatctgtttgtttatcagcaggttcagcaggaagtaggactgggcgaagactttgatgcacgcattctggcagaggtggagcctacggtagtaaaagcgaaacgtttgacactgaccggtcgttttattcctctgttcaaggccgctgccgtaattgcaatcatcctttctttggggaatgtggcacaacattctttctccggagatgatggaagcgtattggctacggataccattggtaaacaagtaactgcaccgtcggtcgctatctcaaatgatgtgaaagcggaacaggtcctggctgatagcctggcgaagatcaaccataaggtgcaagttataaacgaatagacattttcatttgctttaaacatataatatagttagtgtgcttaattaaaacaacaacgaaggcgaaactgtgaagttttcaattctctcaaatttttataatgaaactaactaaataaatgggctaccgcgcgatgcagtagcccttttatgtttttaagctgtctttatttgatctgccgtatattctttcttggagcatccacttcttgaggatctcctttataggcaatatcaccgcttcctttgacgcgggcaaccagcttctgattggcatagcaactgatgttgccggagccgctaatgcttgcatctgtgttttctgcttgcaaatcggcagcttgaatatttcctgatccggcaatagaatagctcgcttgaatggctttgccgttcagattgatattgcccgaaccggaaatacttgcctgacattcctggctctctatttgttgtagtcttacatctcccgaaccattaattgaaacggccattttttggcaattgaatccttctccctgaatgttgcccgaaccgttgatgtggaattcaatatctttagaggtttgtatcccattgattaatcttatatttcctgaaccgttgaccgacagcttattcagttccggagcaaaaacttttatttccagttttcctttccagatagtgacattcttcttgaactttataatgaatgtactaccctccacatacgtttcaataagtggtatgatgttgtcggaaccatgaatttcgacatggctgcatgtgtcttgccaataactgatgttggcactgcccactagtttgatttcattgaagtggtcggctttcacttctttggagatgtaattcttactgcctacgatgtgttttccccgcaagcaagagccggcagtaagtactagaaacattcccgtgactaatacgagcaataaacttgttttcataattacgcttttctatgattgatataatggttagacggaagaacttgatctaaagttgcatcttccataaagtttttcgttagcgtcttcttttttattacttttgtggctgttgataggaggattataatggataagattatagaagatgatgagttagggcgcttggtgatacgcgtcaattcacgtgcgagaagtcttgtgtttcgtaccaagagtgatgctgtttatgtttcagttcctcctggtaccaccctgaaagaagtgaaactggccatagagaacctgcgtggaaagcttctggcctcccggcaaaaaatcgctcgtccgttgattgatttgaattataagattgatgcggagcattttaaactatctttggtgtcgggcgagaaagatcagtttctggctaattcccgtctgggggtgatggagattgtttgtccgcctcatgccgattttacagatgagaaactgcaaagctggttgcataaggttattgaagaatcgttgaggcgaaatgccaaaagtattctgccttcacgtttggcctttttgtccaagcaatgcggattgccctattcgagtgtgaaaataaactccagtcagggcagatgggggagttgttcggctcgaaaagctattaatttatcctattacctggttttgctgccttcccatttgatagactacgtgttgttgcacgaattatgccatacccgcgagatgaatcatagcgaacgattctgggcattgctgaatcaatttacagaaggaaaagcattgaccttgcggggagaattgagaaagtaccgtacggaaatataaaatgctttacagccaagataatattcttgcattgtcacgaacttagtttattctatcttgggtaaagccttgtaagctcctatttctggctgtcttctaaatcttatacattcctgatgatggttcgttatgatacgtaatagggggatatgcctttattatttggctaattgtttaattccgtccgattctttttcaaactgataagcccctcctttttcgctaagatcaaacgtagaaaccagttccgtgttattatctacgatcaataaagcgctttgttctgcaaaacgtcctacttctaccgtgtaaggctcttccgatatggttttattggagataagactgtcgttgacaaacaaagagatagaatctccggcaaaaccttttaccagactgattgtgtagctttcgatgaaatgacgttcttcctgcttttcccgttgtagccgcatactcatgtatacgaaaataaccacgacaaaaatgacggcaaaagcaagaattccgttacctaccataaactgtttatttgtgttgagacgatgtgccatagtcgttattttttgaattgtggcgtaaagatacgaatatagcactgttaattcatactttttttctttaatcttttgtagtcgaatagattatttatatctttgcaaccggaaacggatgaaaggtggaggggcaattaagctcctttttttgttcttatatagttaataaatgatagaaaagaaaactgtttgtcagattgtagatgagtggctggaaggaaaagactactttttagtagaagtaactgtgagcccggatgacaaaattgtggtcgaaattgaccatgcagaaggtgtttggatcgaagattgtgtggagcttagccgctacatagagtcaaaactgaaccgtgaagaggaagattatgaactggaagtagggtcggccggtatcggacagccctttaaagtactgcaacagtattatatccacatcggacaagaagtggaggtattgactaaagacggacgcaaactggccggcatactgaaagatgccgatgaagagaagtttacggtagccgtacaaaagaaagtaaaactagaaggatcaaaacgtccgaaattgcaagaagaggacgaaacctttacttatgagcaaataaaatatactaaatacttaattagctttaaatagttatggccaaaaaagaagaaacaatcagcttgattgatacattttcggaatttaaggaactgaagaatatcgatagaacgacgatggttagcgtactcgaagagtcgttccgtagcgtaatcgcgaaaatgtttggcaccgatgagaattacgacgtgatcgtgaacccggataagggtgacttcgagatctggcgtaaccgtgaagttgtggccgatgaagatttgactaacccgaatatgcagatttcgttgagcgaagcacagaaaattgatgcttcctacgaagaaggtgaagaggtgactgatgaagtgatctttgccaaattcggacgtcgtgctatcctgaatctccgccagacattggcttccaagattctggaacttgagaaagacagtatttataataaatatatagataaggtaggtacgatcatcaatgcagaagtgtatcagatctggaagaaagaaatgttgctcttagatgatgaaggaaacgagttgctgttgcctaagaccgaacaaatcccgagcgatttctatcgcaaaggtgaaacggcccgtgcagtagttgcccgcgtggataacaagaataataatcctaagataatcttgtcacgtacttctcccgttttcctgcaacgtttgttcgagatggaagtacccgaaattaatgatggtttgattaccatcaagaagattgcccgtatccctggcgaacgtgccaagatcgcggtagaatcttacgatgacagaatcgaccctgtaggagcctgtgtaggtgtaaagggaagtcgtattcatggcattgttcgtgaacttcgcaatgagaacatcgacgtaatcaattacacatcgaacatctcattgtttatacagcgcgctttaagcccggctaagatttcttctatccgtttgaatgaggaagagaagaaagcagaggttttcctcaaaccggaagaagtttcgctggctatcggtaaaggcggtttgaacatcaaactggccagtatgttaactgagtacactatcgacgtgttccgtgagttggatgagaatgtagcggatgaagatatctatctcgacgaattcagagacgaaatcgacggatgggtgatcgacgccatcaaggctatcggcattgatacagcgaaggctgtgttgaatgctcctcgtgagatgttgattgaaaagacggacttggaagaagagacagtggacgaggtaatacgcattttgaaatcggagtttgaagaagaaggtgaaaattcagtagaaaattgagaatttaaaattgaaaaatgaaagttatctctgttatactacatcgtaacttttaattcttcattcttaattcttcatttaaacaagctccatttattcattaattttaaaatatgacgataaggttaaacaaagttacaagagatttgaacgtaggaatcgcgacggtagttgagttcctgcaaaagaaagggcataccgtagaggctaatcctaataccaaaattagcgaggagcaatacgctatactcgtaaaagagtttagtacagataagaaccttagacttgaatcggagcgtttcatacaggaacgtcagaataaggaacgtaataaggcgtctgtttcgattgaaggcttcgaaaagcagccggagaaacagaagtcggaagatgtgattaagacagtcgtacctgaggatgcacgtccgaagtttaaacctgtcggaaaaattgatttggataaactgaatggtcgtaaacctgaaaaggtggagaaggaaccggaacagaaacaagaagaacctgttgtagaacggcctgtcgttaaacccgaagtaaaaaaggagcccgagaagagagaacccgaggtgaagaaagaagaggtggtgatacctcctgtttctgtagtagagcctactccagtggtagttgagcccgtagtagtgccggaacctgtagtggagacgaagccggtagaagttgaaaaagtagtagaagaagtgaaaaaagaagagccgaaggtagtagaaactgcacctgtgaaggcggaagaacataaagaagaaaaaaaggtggaaactgcacaggctgaagtaaccccggtagcagaaaaagctccggaggatgatggtgttttcaaaatccgtcaaccggaattaggcgcgaagatcaatgtgatcggtcagatcgacttggctgcattgaaccagtctactcgtccgaagaaaaaatcgaaggaggagaagcgtcgcgaacgtgaagagaaagagaaaatccgtcaggatcagaagaaactgatgaaggaagccatcatcaaagaaatccgtaaggatgattctaaagtggtgaagaacggtccgaaagaaagcgcggatgctgctaagaaaaaacgtaaccgtatcaataaagaaaaggtagacgttaataacgttgcgacttccaactttgctgcgccgagacctaatatacaaggtaaaggcggcaatggtaatggcaataacaacggtcagggcggacaaggaaataataacagaagaaataacaacaataataaggatcgcttcaagaagccggttatcaaacaggaagtgagcgaggaagacgtagcaaaacaggtaaaagaaactcttgcacgtctgacaaccaaaggtaagaacaagacgtccaaataccgtaaagaaaaacgtgaaatggcttccaaccgtatgcaggaactggaagatcaggaaatggcagacagcaaggtattgaagttgaccgagtttgttacggctaacgaactggcaacgatgatggatgtatctgttaatcaggttatcgctacttgtatgagtattggtatcatggtttctatcaaccagcgtctggatgcggaaacaatcaatctggtggcagaagagttcggattcaagacagaatatgtaagtgcggaagtggcacaagctatcgttgaagaagaagatgcaccggaagatttgcaaccgcgcgctccgattgttacagtgatgggacacgttgaccacggtaagacctctttgctcgactatatccgtaaggcgaacgtaattgccggtgaagccggaggtattacacagcatatcggtgcatataacgtgcaactggaagacggtcgccgtattacgttcctcgatactccggggcacgaagcgtttaccgctatgcgtgcacgtggtgcgaaagtaacggatattgctatcattattgtggctgccgatgataacgtgatgccgcagacgaaggaagcaatcaatcacgcgatggctgccggtgtacctattgtatttgcaatcaataaggtggataaaccgactgcgaatccggataagattaaagaagaactggctgcaatgaattaccttgttgaagaatggggtggtaagtatcagtcacaagatatctctgccaagaaaggtatgggtgtggaagacttgctggaaaaagtattgctcgaagcagaaatgctcgacctgaaagcaaatccggaccgtaatgctacgggttccatcatcgaatcttcactggataagggacgtggatatgtagctactgtattggtttctaacggtactctgaaagtgggagacatcgtactggcaggaactagctacggacgtgtgaaggctatgttcaacgaacgtaaccaacgcatcaaagaagcaggaccttccgaaccggctttggtattgggattgaacggtgcacctgctgcaggtgatacattccatgtcgttgaaagcgatcaggaagctcgtgaaatcaccaacaaacgtgaacagttggctcgtgaacagggcttgcgtacgcagaagatccttacgttggatgagttgggccgtcgtattgctttgggtaacttccaggaattgaacatcatcgttaagggtgacgtggacggttctgttgaggcattgagcgactcgttaatcaagttgtctacggaacaaatccaggtaaatgtcatccataagggtgtgggagcaatttccgagtcggatgtttctctggctgccgcttcggatgcgattatcgtcggattccaggtacgtccttcgggtgctgccgctaagatggctgaacaggaaggtgtcgacatccgtaagtactctgtcatctacgatgcaatcgaagaggtgaaggctgctatggaaggtatgttggctccggaactgaaggaacaaatcacggcaactatcgaaatccgcgaagtattcaacattacgaaggtgggtttggtagccggtgcaatggtgaagaccggaaaggtgaaacgaagcgacaaggctcgtttgatccgcgatggtatcgtcatctttaccggaaacatcaacgcgttgaagcgcttcaaggacgatgtgaaggaagtaggtacaaacttcgagtgtggtatcagtctggtgaactgcaacgacatgaaggtaggcgatatgatcgagacattcgaagaaatagaagtgaaacagactttatgatttatgagttatgatttatgaattataagggtataaggccattcgcgaagtaatggttgcaacaatagatgggtggtaatgtggtactattttatatgggacaccaccttaccactttattgttttatcacctgacagaaatataaatcacagatcataatcatagaaacataaatcataaatcacaaatcataaatcacaacgtggcaacgattgatatcattatccttattgtaataggcgccggagcggtggtaggctttgtaaaaggctttatccgccagttggcttctattttggggttaatagtcgggctgttggcggcgaaaactttatatgcctctttggcggagaaactttgcccgacagtgacggattcgatgacagttgcgcaggtgttggcttttatcatgatttggattgccgtgccgttgatttttgtactgatagcttcgttattgacaaaagcaatgcaggcaatttcgctgaactggctgaaccgctggttagggagtgggctgggagcacttaagtttctgttgttaacgagtgtagtgatcggtgcgatagagtttgtggacagcgataataagttaattagtgcaacaaaaaaggaagaatctttgttatattatccgatggaaacgtttgcggggatctttttccctgctgcgaagaatatgacgcaacaatatatattagagaataaagatgcaacaagaagaacccaataaaatgaaacccaatcagaaagacgaactcgaaaagaagactgataatgagtttgtccggaaatttgcggaggagaaatataaatacggcttcaccacagaggtgcatacagacatcattgagcgtggacttaatgaagatgtcattcgtctgatttcatcgaaaaaagacgaaccggagtggttgctggagtttcgcctgaaagcgtaccgccactggctgacgctggagatgccgacttgggcacatctccgtatccctgaaattgactatcaggcgatttcttattatgccgatccgacgaagaagaaagaaggaccgaagagcatggaggaagtcgatcctgaattgataaagacgtttaataaactgggtattcctttggaggaacagatggctcttagcggaatggcggtggatgccgttatggactccgtttccgtaaagactaccttcaaggaaacgctgatggagaaaggaattatcttctgctcgttcagtgaagccgtgcgggaacatcccgatttggtgaagaaatatatgggctcggtggtaggttaccgggataatttctttgccgcgttgaactccgctgtcttttctgacggctcttttgtgtatattccgaaaggagtacgttgtccgatggaactttccacctatttccgtatcaatgcccgtaacacgggacagtttgaacgtacactgattgtggcggacgacgattcatacgtttcttatctggaaggatgtacggcgccgatgcgggatgaaaatcagttgcatgccgctatcgttgagataatcgtacacgaccgtgcagaggtaaaatatagtactgttcagaactggtatccgggcgatgcggaaggtaagggcggtgtatacaactttgtgactaaacgcggtaactgcaagggagtggatagtaaattatcctggacacaagtggaaaccggttcggccatcacttggaaatacccttcctgtattctgacaggcgataactcgaccgctgaattctattccgtagctgtaacgaacaactatcagcaggctgataccggaacgaaaatgattcatctgggcaagaacacccgcagtacgattgtaagtaaaggtatctccgccggacatagtgagaactcctatcgtgggttggtacgtgtggccgagaaagcggataatgcccgcaattatagccagtgtgactctctgttgctgggagataaatgtggtgcgcatactttcccttatatggatattcacaatgaaacggcagtggtggaacatgaggccacaacgagcaagatcagtgaagaccaaatattctattgcaaccagcgcggtattccgacagaagatgcgatcggacttattgtgaacggatatgcaaaagaagtattgaataaacttccgatggaatttgcggtagaagcacagaaactgcttactatctcattggaaggaagcgtggggtgatttactagttggcaatttacgatttactatttggctgcgcgcttgtaggaggtaaattgtcggtagtataggtttttaatagtaaatagtaaatggaaaaatagtacatataatcatgttagaaataaaagacctgcatgccagcattaatggcaaagagatattgaagggtattaacctgacggtgaatcccggtgaggtgcacgctattatggggccgaatggctccggtaaaagtacgctttcttccgtattggtgggaaatccggcttttgaggtaacaaaaggttcggtcactttttatggaaagaacctgttggagttgagtcctgaagatcgtagccatgaagggatctttcttagtttccagtatccggtagagattccgggtgtgagcatggttaactttatgcgtgctgctgtgaatgagcaacgcaaatataaaggtctgcctgcgctgacggccagtgagtttctgaaactgatgcgtgagaaacgtgcggtggtagagctggataataagttggctaaccgttcggtgaatgaaggcttttcgggtggtgaaaagaaacggaacgagattttccagatggccatgttggaaccgcggttgagcatcctcgatgagacagactccggtttggatattgatgcgctccgtattgttgcggaaggagtgaacaaactgaaaactcctgaaacaagcacaatcgttattactcactaccaacgtttgcttgattatatcaaacctgatattgtacatgtcctttataaaggtcgtatcgtaaaaactgccggaccggaacttgcactggaactggaagaaaaaggatatgattggatcaagaaagaagtaggagaataacaaataataagttatgatagttgaacaacaatatatagacctcttctcacaaacggaagcaatgatctgcaagcatagcgccgaagtgctgaatgcgcctcgtgcagctgcatttgccgattttgaacgcctcggatttccgacccgtaagatggagaagtacaaatatacggatgtgagcaagtattttgaaccggattatggtttaaacttgaatcgtctggctattccggtcaatccgtatgaagtgtttaagtgcgatgtgccgaatatgagtaccgccctgtattttgtggtaaatgacgcattttataatagagcacttcctaaagtcaatctgccggaaggtgtgattttcggcagcttgaaagaagtggccggacagcatccggaattggtgaagaagtattacggtcagttggcagatacttccaaagatggggtgactgctttcaatacagcttttgcgcaagacggcgttgtattttatgtgccgaagaatgtagtggtagaaaaaccgatccagctggtaaatatcctgcgtgcagatgtcaacttcatggtgaaccgccgcgtactaatcatcctggaggatggtgcgcaagcccgtctgctgatttgtgaccatgcaatggataacgtgaacttcctggcaacacaggtgattgaagtatttgcaggtgagaacacggtattcgatatgtatgaactggaagaaacacatacaagcaccgttcgtatcagtaacctgtatgtaaagcaggaggcaaacagcaatgtattgttgaatggaatgactttgcataatggtactacccgcaacaccactgaagtattgttggcaggagaaggagctgagataaacctctgtggcatggcaattgccgataagaaccagcacgtagacaatcatacaagcatcgaccatgccgtaccgaactgcaccagtaatgagctgtttaagtacgtactcgacgatcagtcggtaggtgcgtttgccggactggtactggtgcgtcccgatgcgcaacatacgaactcccagcagactaaccggaatctttgtgctacgcgtgatgcgagaatgtacacacaacctcaattggagatttacgcggatgatgtgaaatgttcgcatggagcaacggtaggccagttggatgagggtgcattattctatatgcgttcacgaggtattgcagagaaagaagcccgtttgttattgatgttcgcatttgtcaatgaagtgattgataccattcgtttggaggcactgaaagaccgcctgcatctattggtagagaaacgtttccgtggcgagctgaatagatgtcagggctgtgccatttgtaagtaaccactaataattaataaacgtggatattcaaaagatacgtgaggattttccgatattgagccgtacggtttacggtaaacctttggtttatttcgacaacggtgcgacgacgcagaaaccccgtctggtggttgatgcgttagtggatgaatattattccgttaatgccaatgtgcatcgcggcgtgcattatctttcgcaacaagctacggaattgcatgaggcttcccgtgaaacggtgcgtcagtttattaacgcccgtagcacgaacgaagttgtttttactcgcggaacaacggaaagcatcaacctgcttgtttccagctttggtgatgaatttatggaagagggggatgaagtgattctttccgtaatggaacatcacagtaacatcgttccctggcaactgttggctgcccgaaagggaattgccatcaaagtgattccaatgaatgacaaaggcgaactcttgctggatgaatacgaaaaactattttccgaacgaacgaaaatagttagcgtggttcatgtttcgaatgtgctgggtacagtgaatccggtgaaagaaatgattgcaacggctcatgcgcacggcgtaccttgcctgatagacgctgcacagtctatccctcacatgaaagtggacgtacaggagttggatgctgattttctggtgttctctgcccataaaatatacggtccgacaggtgtcggagtgctttatggaaaagaagagtggttggatcgccttccgccttatcagggaggaggagagatgattcagcatgtctcttttgagaagaccactttcaacgaacttcctttcaagtttgaagccggtacgcccgactatatcggaactaccggactggcaaaagcccttgattacgtgaatggacatggacttgagcagatagccgcccatgagcatgaactgacaacttacgctttgcaacggctgaaagagattccccagatgcgtatattcggtgaagcagccgaacggggagcagtcatctcctttctggtaggagatatccatcatttcgacctcggaacgttgttggatcgtttgggtattgccgtgaggacgggacatcattgtgcacaacctctcatgcaacgtcttggtatagaaggaactgtacgggcttcgtttgccatgtacaatacgaaatcggaaatagatacattggtggcgggaattgaacgcgttagcaagatgttctaacaatataagccgctattcctgtgggatggcggctttttttattctttaactaaaaaaagatgctttcaagtgcagtgatttgaacttttgtgcgtctaataggtaaagaaacaaaatgttcattgaatattaggagggtcgtgagaccatgctcatattatataaattctctctctttaacattaatcgcagctatatcgtaagaaattacggtgtagctgcaacttttttagggggacttgcgtctaactaaatacatataacttacagataactaataaagaaaaaaatatgctgatgacaaccactcccatcattgagggaaaacgaatagtgaaatattatggaatagtttccggagagacaatcataggtgccaatgtattccgcgacttgtttgcaagtattcgggatattgtgggtggtcgttccggttcttatgaagaagtgctgcgtatggcaaaagatacagcgttgaaggaaatggaggcacaagcagctcaaatgggagctaatgccgtgataggtgttgatttggattatgagacagttggaggtagtggcagtatgctgatggtgactgctaacggcacagccgtaaagattgaagaggattaattgattattgtttcttttactacagagaacacggaagacgcagcgcatatactttgtttattatcaatgatataaaacgctgtgtcctccgtacttctgtggtgaatattattcggcagtcagctcaatcacacggctgaaagcctgattggtagtgaaagcattgattcctactttcatcagataatctcctgaataagtcttctcattagcagcaagattcgatttagagtttggcatcaggttgatttctttcaccttatacattttcttcgcatccaatccctgaagtttaaccgggagcagcttctcaccgaaacgtgggtggatatcgtaggtataaagcactgctttgttcttatccggtgcggcgtacatgacagacatgtgattaccatcgtatggagaaaccagtctgtactggtcaccatccagaatcactttcttcagacgcgtccagttggcaactgcgttttggcaaaaagtctgttcgtccgcattcagctctttcagtccgaggtcgaagcccagtttacacatacttgctacatcggtacggaatttcacgcttgtcttcttgttccagctggttacgtgtgcatccattgcttttgcagggaagatttgtgagaatccccattggataaacaggcgctctatcgggtctgtattgtcactgcaccagaattctgtgaagtatttcaatgcttcgtagtcgcaacgggcgccaccgccggagcaaagcatcatcggtacgttcggatatttgtctttgatacgttccaatacattatatataccacgtacatggtcgatataaagttgtccttgtttatttttcaaatagggagaataaatatttgtgatgggagagttgcagtcccatttaaagaaagccacttccgggttcgctgtcaggatgttatccactacgctaaatacaaaatcttgtactttcggattgctaagatcgagcaccagttggttacggtaatagtatgtttcgcgattgggcagtgtgatagcccagtcaggatgcttctcgaacaattcacttttggggtttatcatctccggttcgatccagataccgaatttcactccggcttctttggcagacttcacgagtgcgggaataccgcccggcagtttggatttcatcacttcccagtcgcccagtccggcattgtcgctgttgcgaggatgcttgttgccgaaccagccatcatccaacaagaacatatctacacccagatgtttggcttctttcatcagttcggcaagcagtttctcatcgaatttgaagtacgtattttcccagttattcaataaagtcatgcggtcgccttgtccgtctttcagttggtggttgcgtgcccatgcgtggaggttgcggctggcttcgcccgtaccgttgttgctgaaagtaaagatgaattcgggagtggtaaatacttcgttcggttttagttcataatcagatgcgtacgggttaatggcggggatgacgcggagattgcctacgttgtccacttcaaaggtaaactggaagttgcctgtccatccgatagtccctaacatggcacgtccttgtgtttcctgtgccggttgttcaaaaccaagttcgaagaacgggtgggtatgcatggcggcacggcttcccagtttggtgtcgatcacctttttgccgaacaatagaggttgcgtgctcatttgtgcttctttagcccagtcgctgctgaattcagtcagataatactcgtttcccgagaaataaagcatggtcgaagcataacgccagatggtgacaggtttcttttcagcatgtttgatttcactccacgtcttgatgacgttttctttcggataagcgatgtaatgcagcgtgacttccaccgggtactgatcgtctttcagttggatgactgtctccgttccgcctgccactgctttttgttcggaagatacataacggagaatcgtgctcgggtttccatcattgtgcgtgattgctacagccggttcaaaataatcctcggcgccggagcccggatatacttcccatccacgggtggatacgctgccgtcacttcctcctttcacgtatggagaaaagttgttgatgtctttctcgttcagtaacttatcgcccagataagcctgataaagtcgtccgttgggagctacttggagaattaagtctgtgttgtccgttgcgatgcggataacgttcttttcctgggc

SEQ ID NO: 8114 - DNA, 2721 bp, Unknown
  gut microbiota DNA sequence
tgatggatgaaaaaggaaagcctcttactgctcccgtctatcataacattactgtacttagcaaagatttattcttgtgtgctttgaaagacatatattcaaggattattgttgacaggaatggacaggttgtccgatatgaggattaattcataaattttatccaaaagaagagaaaagaataaaataaacaaggggcgtcgtaacaacctatccataaaaagactatatttattgcagcgagagagcactttaagtaatgcttaagaggaaaaacgaaaagtagtatatatactatatattttctattattaattacttaaacacattttttatggaagccaagaaatcaaaaaaggctgcaattgagaatcaacggggttcttggttgttgatgggtttggttgttgcgctagccttcatgttcgtttcgttcgaatggacacaacatgatgtcagagttgcagcactatcaccagatgatgaatccatctttgtaacagagctagttccgatcacattccctgaagagaaactggaaccgcctcctcctcccgaaactaaggtaacagaattgttcgaaatagtggaaaacaatatggaggtgacggataacgtttctacagtgtcagaggatatgaatgcagttcatgacgttatttggataccaccagtggtagaaacagaaacggtagttgaagacattattcacgtaagtgttgaagtcatgccggagtttcctggaggtacagctgctttaatgaaatatttaggtagcaatatcaaatatccgacgatttcgcaagaaactggctcacagggaaaagtcattgttcagtttgtagtagatagagacggaacgatttctaatcctgaagtggtgcgaggggttgatccttatttggataaagaagctatccgcgtgataagttctatgccgaaatggactcccggagtgcaaaatggtaagaaagttcgagtgaaatatactgtacctgtgtcattcagactgcagtagtaacttggaataaatgaataagggttggttcctgcaaagaaccaaccctttttcaataaaaaaatatatctttgtcgggagaataaaaatacgaatgattgttttatgaatcttctactctgtataaaaagaccttttatctggctttcccgctttcgtcatcgttgcggatatggtgtccattccccatttgctttcagtctcattactgatgtaatttatgaaaagatgccttactatgcttattcttctttgaaagaagaacaaaaaaagatggtaagagagcgtgggtggaccaaaggttctcaaaaggtaaaccgttttttgttccggttggtaaatagagtgcagcctgatacgattattgaggttgggcgtccttcctcgacagccttgtacttacagtctgctaaaccatcggcttcctatctctttgcttccgatttgtcggaattgtttctggatgcggatacttcagtcgattttctgtatctgaacgattaccaaaatccggacttattggaagaagtatttcgggtttgcgtacaccgtactactcctaaaagtgtatttgtagtccatggcatttgctattccaaagagatgaaagcgctttggaaaaagtggcaggctgacgaaagggtaggaataactttcgacctatatgacgtcggtttgctattttttgataaaacgaagataaaacagcagtatatcatcaacttctaagaacctttgtacgtttaccatctataatagtaaaaaagaaagttatgaaaaagagccttgtatatacaaagaccggagacaaaggaactaccagtcttgtcggcggaagtcgcgttccaaagactcatatccgcctggaagcttacggaacggtggatgaattaaattctcacctgggatggctgcacacttatctgcaggaggagtccgaccgggattttatcttgagtattcaacataagttattcgccatcggttcacacttggccaccgaccaggagaaaatgcaactgaaacccgccagtatcattacccctgaacatgtggaaagtatcgagcgggagattgataagctggatgagcaattacccgaactttgtgctttcatcattcccggcggaagtcgtggagcagccgtttgccatgtttgccgcacgatttgccggagagctgaaagacgcattctggctttgtccgaaacttgtacaatttctcccgaagtattagcttttgtcaacagattatcagattatttgtttgtattatcccgaaaaattaattttgatgaacaaaataatgaaatattttgggataatagttggaaatgatagattttattatacttttgccgaaaaatagaaaacgagacaaatttagtattcattttaaatactcaagattatgtattggacattggaattagcatcaaaacttgaagatgctccctggccggcaaccaaggatgaattgattgattatgccatgcgttcgggtgctcctcttgaagttattgagaacctccaagagatggaagatgagggcgaaatctatgagagtatcgaagatatttggccggattatcctagtaaggaggatttcttctttaatgaggaagagtattgattaaaaaagaccgaacatataagaatacccgataacctttgcaagaaggctatcgggtattttttgtataa

SEQ ID NO: 8115 - DNA, 4471 bp, Unknown
  gut microbiota DNA sequence
caattatacttccggcaccacaggttactctaaaggagtgatgctcccctatcgcagtctttggtcgaatgtggcttactgcttcgagatgcttcccgttaaaccgggcgatcatatcgtttccatgttgcctatggggcatgtgttcggtatggtatatgatttcctttacggattttctgcaggtgcgcacatctattttctgacgcgcatgccgtctccgaaaatcatttctcaatctttctctgaaatcaagccaagagtgatctcttgtgtgccattgattgtggaaaagattattaagaaagatattcttcctaaagtagacagcacaatcggtaagttattgcttaaagtgcctatcgtgaatgataaaatcaaatcgctggcacggcaggccgccatggaaatcttcggtggaaactttgacgagattattatcggaggcgctcctttcaatgctgaagttgaggccttccttaaaaagataggattcccctatacaatcgcttacggtatgactgaatgtggtcctatcatttgctccagtcgttgggaaacgctgaaacttgcttcttgcggaaaggcaaccagccggatggaagtccgtattgactcgccggacccgaaaacgcatgccggagaaatcgtatgcagaggaatgaacatgatgctgggctattacaaaaatccggaagctaccgcgcaaattatcgatgctaacggctggctgcataccggtgacctcggcacgttggatgaagaaggttacgtaacagttcgcggacgtagcaaaaacctgcttctcacctctagcggacagaacatctatccggaagaaattgaaagcaagctgaataatatgccgtatgttgcagaatcactgattgtcttacagcatgaaaagctggtagcaatgatttatccggatttcgatgacgctttcgctcatggattgcagcagacggatattcagaaagtgatggaacaaaaccgtatcgagttgaatcagcagcttcctaactattctcaaataagcaagataaagatccatttcgaggaatttgaaaagactgcgaaaaagtcaatcaaacgctttatgtatcaggaagcaaagggataattatcctagataacacgataagtaatcttgcaaacgattataagcctctcatatcagattagaatttgattagaaaagagccataaaggaagaattgtaaacacaacaggaaaaatggccagccttctttcattccaactcccctatctttgcaggagagaaaataaaacgaatcattaaaaaatagtaggatatatgaaaataataaatttaaccaaagatagttttgttgagaaaatagctgattatcaatcttatcctgacagctggaacttcaaagggaataaaccttgcctggtcgattttcatgcaccctggtgtgtctattgcaaagcattatcgcctatattagaccaattggcaaaagaatacgaagggaaattagatatttataaagtggatgtcgatcaggaaccggaactggaaagcgcatttaagattcgtaccattcccaatctgttactttgcccgttgaacggcaaaccggcaatgaaattaggcactatgaataaagcccaattgaaagaattaatagaaaccagtttactttcagaatagaaaaacatcgaaagtccggaaagttccttatgacgatagactaccgagcttttgatataatacagaacatttgctgttataataagaggctgaaaagccttgatcttataaaatgccccttactagaactaaactgaactcctaaaattttgtatccaacttttgggattcagtttagttcttagtaaagggcatttttcttttaggaagtctccggacagcctcttccctttcaaaggttatttcaatggttatttatgcaacagattatcagttcccggaacgatctttcccattgaccatacgcaacgtacattcagttctttgtcaagaatcacaatatcagcatccttaccctttgctaacgcccccttccggtcactcactccaattaaacgggcaggagtttcagaagccatacgcacagcatcttccaaaggaatattcgctttctttaccatagtgcgaaccaacacatccatcgttgccaaactaccggccaacgcagaatgatccgccatcttgcatacaccatcctctatgatataacgaggatcaatcggttcattcccttcataagcggcatacgccaaagcatcggtaacaaggcaggtattctccacgcctttcaacttataaaccagtttcaggatagtggcaggcaaatgaataccatccgcaatcacttccactgtcattccatccgtcagatacacactttccactgtaccctcatatttatattcacgacgtttatggaaacccggcatcgcattataaaaatgagcagcatgagaaaatcctactgcaaatgcagctttaatttcatcatattcggcttcggtatgtgtaacagcagtcataattcctttcgaacgggtatactttgcaaaatcatgtgcaccggacagttcgggactaatatcccaacgtctgatacaagacgtatgctccaacaaaggaatatattcattttcatccggagttttcagaaaaccgtcatactgcgtacccgccatcttcggattcagatatgggccttcgatatgcagaccaagaatcggagaatccttctctttcatcaagtgctcacatacatcgactgcctggtagattctttcgaatgaagtagaggacaaagtaggaaatataccggtagcaccatgtttcagatgtgcattggttgcggtgcggaaagcctcttccgttgcttccgtataatcatgcccaccacctccatgtgcatgcatacttacgaatccgggcactatcgtcatccctctggcatcaataactgttgcaccgataaccgctaaatcactattagttacctctaatatttttccatcacaaatcaatacggaaccatctttcaaccagccttgcggggtaagtattcttccgtttattatttgagtcaacatagtctttgttctttattagatttaaaacagtttgttggtgccttccaccagttctcccattgcccatacggctctcacgttcaagtctctgtccaaagcgatcatatcggcatccttgccacgttccagcgttcctttacggtcgagcactcccataatccgtgcaggagtttcggaagccattcttacggcatcttccaaaggaatttccgccttttgcaccatggtacgaatcaaacgatccatcgttgcaacactcccggccaaggctgaatggtctgccaacttacagactccatcctcaataatcacacgcgggtcaaaggcaacctggctatcactggcggcacaagccaacgcatccgttatcaggcaagtgcgttccactccttttatcttatagacaagacgcaagatcgtcggaggtacatgaataccatcagccaccacttccactgtcatatcatcaatcagataaatactttctaccgtaccttcatacttgtactctttccgtttatggaaaccgggcatcgcgttataaaaatgagtagcatgcgtatatcccgcctcataagccgtctgtatatcctcaaattctgcctgggtatgtcctaccgaagccagtacaccttttgccgtgatatatttaccgaattgcatggctccgggaagttccggtgcggcatcccaacgtttgatacagcgtgtttcttccaacaacggaatatattcttcgggatcgggatctttgatattttccggaatctgtccgcctgccatgtccatattgaaataatgtccttccagatggagtccgagtacagggctattgggctccgccatcattttttcagtagttgccgcagctgcacggatcatcggaatggtagaagaagaaagggtaggaaaaatactggtggtaccatgctgcatgtgagccttgattgctgtccggaaagcctcttcggtgccttccataaagtctcttccaccgccaccgtgaacatggatttctacaccgccgggaacaatatacattcctttggcatcaatcagtttggctccgataatggcaaggtcacaattggttacttccagaattttgttatcgcgaataagaactgacccatccttcagccaaccttgaggcgtcaggatgcgtgcattaatgatctgtgttaacatatcacaaatagttaaattaattaaaggtctgtgtgaatcaatgacgctcttttttggggggagtacattgattttttcgtttgcaaaattacgtttttctattcaatctatcgataaaatcgtccgataaacttctaataaagtccaatattaaacgattatccaatcatgtataaat

SEQ ID NO: 8116 - DNA, 7464 bp, Unknown
  gut microbiota DNA sequence
aataaagtaattttcttcattgtgttttatattttaagtgggtatgtataatcagctttgcagaaactcacaaagtttctgtacagccagtgcacgatggctgatttggttcttgatatcatttcccaattcggcaaaagtccggtcgtaaccttcaggcatgaatacaggatcatagccaaatccggaatcaccgcgtttttctttgattatttcgccttttatcactccttcaaagagatactcctttccgtccagtatcaacgaaatagcggtgcggaattgtgctttacggttttcctttccgtccagttcgtgaagaagtttgagcatattagcctgggcgtcgtgtccttcacctcctgcatagcgggcggaatagactccgggagctccgttcaaggcttccacttccaatcccgtatcatcggcaaaacagtccagatgatagtttttgtagatataggaagattttaataacgcatttccttccagtgtttcagcagtttcgggaatatccgtttggcatccgatatcattgagacttagtaattctactttatctcccaagatagcggccacttcttccagtttatgagcattattggtagcaaatacgagtttgcgtttcatcatcttattctttgttttaacagggttgttcaatacttatcaaccggttattatttcacttttagcttatcgaatccttcgccatacacaccgataacggaactttgagagataaaagcattcgggtcaatgcgttttaccaaacggaaaatttcgagtgactgacgtttcttggcaagtactaccaatactttcacattggttttactgtaccatcccgtaccgtcgagtaccgttactccccggtcggcgtctttaatgatacggtcggctatttcatcatatttcttagagaagatgaagaattgaaccgattgacgggcactgttgataatccagtcgagcacaacgccaataataaacagggtgacaaaaccaaagataacccgacgccaatcatgaaatataaagtaacaggagctgataatgaatacatcacagatcataatcattcgtccgagtgatacatctttgtatttattgacgatggccgcgataatatctgttccacccgtacttccattgtagttgaaagtgataccgaggcctacaccacacatggctgcaccgataatacaggccatgaagtcctgtcctgtaccaagcaatagcggcttgccgtccggcgtcatatccggtgcttctacgtaattgttcaccaccaactggaataaccaaagcagaaaagtcagcgtaaaaatagcataagtggtttttatactaaattttggacctaatacccggattgcgaaggtcatcagaactgcattaatgatgaagtatgaccattggattgggaatcctgttgcataatagataatagccccgataccggtagttcctccggtagttatctgatagggtaaaaggaatgctgcccatcccaaagaatagcttatcaatccgagagtgatgtagatataatctttcacttctctcattatttccgcttttgtcagtttatgcatggattttaagttcaagtattaagtaataagtattaagtattaacctggcggatatatttggaaaacgactacggataatacttaatacttattacttaatacttattgttttatacttaatactttaaattacaacgtttacaatctttttcggaacgacgatgatctttttcggagtcttgccatcaatccacttctgtgaacgttcgtcggccaatactgccgcctggatagcgtccgaagcttcatctgctgcaaattccatattgaaacgtgcctttccgttgaaagagatggtatagttgatagtatcttctttcagatattcttcgttgtatgcaggccattgggcgtcgcatacggaagtttcgtgtcccaatacatcccacaactcttcgcagacatgcggagcgaaaggagcgagagtgataacgagctgttccagaatctcttttttgctgcatttcaggttgaagagttcgtttacacaaatcatgaatgcgctgatagatgtattgtaagagaactgttcaatatcgcctgttaccttcttgattaatttatgaaggctcttcaattcttcttttgttgcaggttcgtccgttaccagatattcgtccgtacggctgtagaacaacgaccagaatttacggataaaacggtgtacaccgtcgattccgtttgtatcccacggtttagactgttctaccggaccgaggaacatttcgtacatacgaagtgtatccgcaccgtatttctcaacaatcatatccggattgactacattgaacatagatttactcatcttttcaactgcccatccgcagacatattttccgtcttcgaggataaattcggctgttttatattcaggacgccatgctttgaatgcttccaaatccaaaatatcattagatacgatatttacgtctacatggataggagtaacttcgtactgatctttcaggttcagtgaaacgaaagtattggtgtctttgatacgatatacaaagttactgcgaccttgaatcattccttggtttactaacttttggaatggctcttccattacagacacacccatgtcatacaagaatttattccaaaaacgagaataaatcaagtggcctgttgcatgttcggtaccacctacatataggtctacatttttccagtactggtcaattttcggatcaactaatgcctgatgattatgcgggtccatgtagcggagataataagccgaagaaccggcgaatcccggcatggtgttcagttccagcgggaagacggttacatggtcaatcttctcattttctacgacacatttgtttactgtatcccaagcccatttagttgcgtgtcctaatggaggctcacctgtttcggtaggcaggaatttagcgacttccggaagttccagcggcaggctggcttcgtcaatcatatagggcattccgtctttgtagtaaacagggaacggctcaccccagtaacgttggcgagagaaaatagcgtcacgcagacggtagttcactttcacacggcccagattgtgctcttttacatatttcttggttgtttctatcgcttctttgatggtcagtccgttcaatgaaagatcacagtaaggagtgacatcaagacgcggagagttgcaaacaataccttcttttgcatcgaaactttcttcgctaacatcacaaccttctaccaacggacggatttccaatccgaaatgtttggcaaatgcatagtcgcggctatcatgagcaggtacagccataatagctcctgttccgtatccggccagtacgtaatcgctgatccatacaggcactgcttcacctgtgaacggattgatagcatacgaaccactgaacacaccggtaacactacggtcggcaatacgttcgcgttccgtacgttttttggtacgatcgaggtaggcgtctacttctgctttttgttcaggagtcgttaactgtgccaccaattcactttccggagccaataccataaaggtaacaccgaacatggtatctgcacgagtggtgaaaatagtgaattcgaggtcactgtcttttactttgaattgcacttcagcaccttccgaacgtccgatccagtttctttgggtttctttcagagaatctgtccattcgattgtgtccaatccgtcgagcaaacgttgtgcatacgcagatacacgcaaacaccattggcgcattttcttctggataacaggaaaaccgccacgttcgctgactccgtctactacctcgtcgttagccagtacagttcctaattcggcacaccagtttaccattgtttcacccagataagcgatacgatagttcatcaggatttcctgcttttctttttcgcttttggcgttccactcttcggcagtaaagctgatatcttcgctgcaagcggcattgagtccttcgtttccgtagatggcgaaggctttttccagttcttcgataggacgggcttcctgttcttcgttacaataatagctgttgaacattttttggaaggcccattgggtccaatgataatattccgggtcgcaagtacggatttcacggttccagtcgaaagagaaacctattttgtccaactgctcgcggtagcggtcgatattgttgacggtagtgatagcaggatgctgtccggtctggatagcatattgttctgccggcaaaccgtaagcgtcatatcccattgggttgagtacattgaagccctgcagtcgtttgtaacgggcgtaaatatccgaagcaatgtatcccagcggatgacctacgtgtagaccagctcctgatgggtaaggaaacatgtttagtacataaaatttttgcttcgaatcatcttccgtaacttggtaggttttctcttctacccaccttttctgccacttcttttcaatttctctgaaattgtactccatagtgataaagtttttatttatagtgatttatactgttatttctaattcgaggcacaaatttacgtgtttattttcagataaccacgctttccctattgactttcttctttttattttgtatatttgaggtcaataataataaagaaataacaatgaaatatataaattttattacataaagttcaataggttaatatgcgaattgcataacgaggataacgaatgggcaagaaactgtgaaggttcttgcccatttttgttgcaataattctatttcaggtattgaaagtgtcaaaaaagagtttataataaacttggataccgtttataataaacctcttcgttatttattaaaaacttgaatagagtttattcgatttcgaggttttcgtgtaaagaagaaagaatgattgcaatgaataaccggcatcttcttttcttctttagtaaataatttatacaatatactgaatgagtgtgttgattatattattttacaatatatcattgttttgctcggtaatcgatcattcaacgtaaaaagctcctgctgtctgttcaatcagttcggacttatgagtcagttccggattgaatagaaaccatcattgagtcaaaaaaaatgcagaaatcgtctgtcatatcatataattctgtaattttgttgtgcaagccctgtaaaactaaaacagcatttccaagttaatcttttaatactaaaaaatacatataagtatgaaaatgaatcttcattgttttgcgaatcttatcccgataatgattctcgcgcttttctcgaatagcggactgataaacgcaaccgaagtcggaaaacgtactgacgcattggaagcatcagcctggaacgaatccaaatggatttccgcagtagacgcccctgtagtgaaaggacataacgacggtcgcgcagccgatggcgcaagttggttcgtgtctaccgtgaaaaacgaacagaaaattgtctctgccaagtggatgaccgctggactgggagtttacgagttgtatgtgaatgggaaacccgtaggcggggaatttctgaaaccgggcttcacacactatgccaagaccaaacgttctttcacctatgatattacagacatcatccgtactaagccaaacgccgagaacatgctttccgtacaggtgacgccaggatggtggggtgacaaaatcataactcccggaggatatgacggcatgataggcaagaaatgtgccttctgtggtgtactggaactaactttttctgacggaaccaaaaagcgttacggtactgaccttaaaaactggaaagccggaattgccggcccggtgaaacatgccagtatctttgacggagaagagtacgatgcacgcgaaccgatgggctacgaatgtgtggacaaactttccacccccgaagagaatacagaattctccggcgacatcctgccttcggacggagcggaagtctatctgcgtacagatctcgcccttgctcctgtcaaagcatacgtttggaagaatgtagaaggagcaaaggagaatgagttcggtaaggtaattatcgcccgtgagttcgcatcgggtacggaaatgaccgtaagtccgggagagacgttagtggtggacttcggacaaaattgtgccggcgtaccctctttcgtattcaaagccgccgagggaacggtgctgacctgcctccctgcagagctgctcaatgacggcaacggtgccaagattcgtgggatggacggtccggaaggaagctgtcatcgcgaaaacctgcgcatcccccacaccggtatccgtctggattacacctttgctggcggagataactatgtggcctattatcctcactgcaccttcttcggttaccgctatgtctccataactgccaccgggaatgttgccatcaagtcgttgaagtccatccccgttacttccatcgcaaaggaactggagaccggcactatcaccacaggcaacgaccttgtgaacaagctcatctccaacacttattggggacagctatccaactacctgtccatacccaccgactgtccgcaacgcgacgagcgcctgggctggacagcagacacacaagtgtttgcagaaaccggtacgttctttgctaacaccatgaagtttttccataagtggatgcgtgacatgcgcgacactcaaaacagtttgggcggattccccggagtggctcccttggcacaatacggtgatgagaaaatgcgtttgggttgggctgatgccggaatcattgtgccctggacggtatggaagcaattcggtgacacgcaaattattgaggagagctggaacgccatggacctgtttatgaatcacatcaacgacaccaagtataaccacgagactctctgcggtgagaacggcaactaccaatgggccgactggttgagctacgaaccactggaaagttgtagcggactggctttctctccccaaggtccgcttcctgatgccgtcagctattggaactatttgagcgcttcctactgggtaatagatgctttcatgatgcgagatatggctgccgccaccggtcgcgatgctgccaagtaccagcaaatggctgattcggcaaaggcatacatcaaagagaacttcctcaacgaagacggcactttcaaaaccgccatcctcaacaccatgcaaactcctgccttgtttgccctaaagaaccagcttttggaaggcgaagccaaagcgaagatgatagaccgtctgcgtgaaaacttcgcacagcacgatctttgcttgcagactgggttcttgggcacatccattctcatggctaccctcacggagaatggcatggaagacattgcctatgaactactctttcaacgtaagaacccaagc

SEQ ID NO: 8117 - DNA, 24373 bp, Unknown
  gut microbiota DNA sequence
cacggcatacttcaacaaagcagctgtagatcctaccacatcagccagtttcaatactgtactcttacattcgggatgtgccaagaccaacgcttccggatgctgcgctttcaattccataatcttttcaacagagaattgttcatgcacatgacaggctccgtcccaaagcaacatattcctgttcgtaacagagttgatataattacccaaattcctatccggaccaaagattattttctcatctttggggaagctttccacgatctgcttcgcattggtggaagtcaccaccacatctgtcactgctttcacggcagctgttgtgttgacgtacgaaataacggtgtatcccgggtgttctttgacaaactgtgcaaactgatccgccggacaactgtccgccaacgaacaacctgccgccatgtcaggtaccaacactttcttgtccggacaaagcacctttgccgtttcccccataaagtgaacgccacacatcacaataatgtccgcttccgttttggctgcccattgagccaatgccaaactgtcgccaacgtaatcggcgatgtcttgtatttcccctttctggtagtagtgtcccagaatgattgcattcttttctttctttagctcgttaatagcctttatgagttcattcataataatattcttatttctttccttttaaaaaaaatcctttgttagtgatgatagcctgttaataatgttagcaaataaatacgatttctcttgccggataagttattagtccatacttctgctttatgagtcggttatgaactgatgtaaagggcaagatatcctattctacttgcttcattatcaatgaaagcatcgttaaatgccgtcaaatggaagtttgctattaactccctgttgataaagtgcaaagttaaaaactttatggatataaacaggtagataagtgctgaaaaatatgtttatgtctgtgtagaaagttttgggttagttttttggaatgttcataatgaaggcctcttatatcttcttttgaataatgcaagaattatttttcaaaatctttgccgatagttttgacaggttttaaaccgttatcaacaccttgttaactgaaaagaattacctttgtggacaagaacataataaaagaaaagacgtatgcgtaaactgaaaataacagagctgaaccgtatcagtgccgaagagtttaaacaggttgaaaaactgcctctggtggtagtgctggacgatattcgtagtttgcacaatataggttctgtgttccgtacttcggatgctttccgtattgaatgtatctatctgtgtggtataacagctacccctcctcaccctgaaatgcataagactgcgctgggtgcagagttcactgtcgactggaagtatgttaataacgctgttgatgctgttgataacctcaaaaacgaagggtatatcgtttattctgtagaacaggcggaaggaagtattatgcttgatgaactccagctggataaaaccaagaagtacgctatcgttatgggaaacgaggtgaaaggggtacagcaggaggttattaaccattcggatggttgtatagagattcctcaatatggtacaaaacattcgttgaatgtttccgtaactaccggtattgtgatttgggatttgttcaaaaagttacactaatagtcataatacaggattggttaataagttgtttataacgagttaatagcttagttaattcatttataatcaataactatgttctgtttataactatatggattcatgttgattctatgggtgttgggtaattattattatagttgttgatagttcgttttcaggctgttaatacttgagttgtcaggtattaacagcctatatgatatgtattaatagctgggaactcaagtattaacttctgagaaaccggaaattaataccttgcaggaagcttgttaattcttgaaatgataactagtatggttgagtagtgatcaattagtttataaagttgataaacttataagctgattgattttagatctgtccgttctccaccatcaacactacacgttccgttagtttgtcttcaccttgcggatcatattctttttttaaactggctccgaacaatgcagcaaaagtctgatagaatcccgctttgaaaggtcccataaatgcttttaccagttcataactggtagaattgctttggcggtctattaatttaatcaacagttttccctgtgcaaacgagagttttttcattcggggagtatattgatctttcaatcctttttcaacccgtttgatatgtttttggcgggctttctcattgggtaaagtctgaagatattcgtaagtttcaatgatggcctggttaatttctctggagataggatatacctttttcacattgcggatcagtcggtaatattcctggcgttccttttcatttttgaatttcaacggacggaaaatatacacagttcttaactggacacatggaatggtatctccattgtagatacacatcggaaccaaatatccattgatgctttgtttatcttgagcttgcaggcgcaacgaacaacaaacaatagcaaacagcgtcattactactatgttaagccttcttttcacgatacaaaaatagaattaaaattttattattcagacatttctcttcgatgttaacctatttaaagtatctttgcggccttatctgttaaaaagcaggaagaataaaccattttattgatgaaaactattcaacttttacggttgataagtattataaacagcctgttaataattcctgcttgtagtgctcaaaacctttctaaaagtcttttagaagatgttcttgaagatttatctgttaataacggaactgataactctgttaatactcctaattgggaaaatgaattggaagaactttccaatcgtatgcaggaaccagttaatttgaatgttgctacccgtgaacaactcgaacagtttcctttccttagtgatattcagattgaacatttgctggcctacatctatatacacggacagatgaaaaccatctatgaacttcaactggtagaagagatggataggcaaacaatccagtatttactaccttttgtctgtataaaagctattaacaatgaacctgcttttcggtggaaaagtctgttgaaaagcgcagcgaaatatggaaaaaatgagctgttaactcgctttgatataccattttataggcgaaaaggttatgaacatacctatttaggaccttctgtttataactctgtgaaatacagtttccgatacagtgaccgactctatgcaggagtcgttgctgaaaaagatgctggagaaccttttggagctttacacaatcgctacggctatgattattattccttttatctgttattaaaagattgtggacgattaaaagcattagctattggtaactatcggcttagtttcggacaaggattagtgattagcactgattatctgatgggaaaaacaatttatgcctcttctttcaacaatcgcagtggcggaataaagaaacactcttccagcgatgaatacaattattttcggggagtggccgccactgttgctttatctaaagattgggatctttccggtttctattcacaccgttcattagatggagtaatcactgacggagaaatcacctctatctataaaaccggactgcaccgaagtcaaaaagaagcggataaaaagaacctattcaccatgcaattaacaggtggaaacgtgagttatcaacacaaccgtattcgactgggtatcaccggtatttactaccttttcaaccgaccatacgaaccggaattaacaggctattccaaatacaatcttcatggaaacaacttctataatctggggattgattatgcttaccgctggcatcgtttttcttttcaaggagagacggccatcggaaaacaaggttgggcctctttgaaccgtttgcaatattcaccggttcaaaacactcaaatcatgttgatacaccggttttattcttataactattgggccatgtttgcccattcttttggtgaaggaagtacgacacaaaatgaacagggatattatatcggcatggagacttctccttttgcctattggaaattcttcgcctcattcgatttattttcttttccgtggaaaaaatacagagtaaataaaccctctcgcggaacagacggattgcttcaagccactttcactccacgcagctatctatccatgtatctgaagtaccgctataaacgcaaagaacgggattggacaggtagtaaaggatcactaacacttcctatttttcaccatcaacttcgttatcgtttgaactattctttaggagatgtgttaagcagtcgtacaactttagattataatcattttcattctcaggacagagctgctaatataggatatcaggttacacaaatgatatcctcccaactgccttgggccaggctgtttgctgacgttcagggcagttacttttttacagaggattatgattcgcgcgtatatgcttcggaaagcggattgctttatacgttctacacaccgtccttccaaggtcgtggatttcgctgtagcgtccgtctcagatatgaactgaataagcactggttgttcataaccaagtttggcgaaacagtctatttagatcggaatgagatcggttcgggcaatgatttgatctgtggaaataaaaaagcagatgtacaaatgcaactgcgtattaagttttaatgtatatttgtctgccagaaataacagaagaatacgatattaaatggatgacagggctacttttgacaaaatgtttaatgaatggtatgcacagtttgtatattttgcatattattttataaatgacgctgaggtatgcagagatatcgtaagtgatgcttttgagtatttgtggcgtaattatgaaaagatagaagaggcgacggctaaaacttatctttatacaatcattcgtacacgttgcattgactatcttcgcaagcaaaatatccatgaagaatatgtagagtttacttcgcaattaactgataaaatgatagaaagcgattcgcaacattctgattctcgtgttttgcgtattcgtaaagctatggaaaagttgactccttataattatcatatattggaagcatgctatattcataataagaaatataaagaagtggccgaagaattgaatgtaagtgttgcggctattcataagaatatagtaaaggctttgcgtattcttcgcgaagaattgggtcaagagggtaaccggaatagactttaaaacgtaaatatatatattgaatacattatttatggatgaaaagaatataaatataagtaagtcggaagaagaactcctggaaattatggagaatcgttctcatataactgctgatcaattacataatttgaaagaagatgaggagtgcttgcaagcatgttctgatttgacagaagttgtgatagagatgcagaaaaaacaaaatatgctggcaattgatgtccggaatgaactggcagattttcataataaacattctaaaaatgaccaaagaagaaatacacgcatactgttgtggcccagtgtcacaggtgtagcggcaactgttgtcataattttagttttgcgtgcaatgatgatttcgtcgcaaccggaaatcattaaagtgtttcaagccaatcatgttgcccaagaagtcactttacaagtgaatgatgagaaggaaataaaaccactaaaagaagtggtagaatctctttcgtcttcctctactgcacagttgtcttctaaagaaatagattatagtcgtgctcttcttcagacagaaaccaaggaagtaggaaagcagaaagtacagatacatagattaagtattcctaggggagagacattcaaagtcgttttatctgatgggactgaagttttcttgaattcggatagtcgtctggcttaccctacggtttttaaaggaaaagaaagagtcgtctctttggaaggtgaagcttattttaaagttactaaagatgcaaaacatccttttattgtgaaaagtggaaatctacaggttcgcgtattaggaacggaatttaatgtgcgtagctactctcctattgatgtccgtgttacgctcattacaggaaaagtggctgttagcgatacttgtggaattcatagtgttgaaatgatgccgggacaaagtgcacagctttcttctgacggaacgtttgctgtgaacgaggtggacattgaatcatttttatattggaaggaaggatttttctattttgacgatgttgccctggttgacatgatgaaagaaatagggcgttggtataatatagatattgagttccgcaatagcaaaattatggatcttcgtatgcatttctttgcaaatcgtcaccaagacatctttcacttgattgaattattgaatcgaatggagaggatacatgctcattttgaaacaggaaaactaattatcgaataaaaagcaagcaaaaagatataaatctgaatagaaaaatatatttctgaaaaaaaactcttttaagggtaaccattcttttttaaacttcgtatacaattaaaagaatgaaatattatttaactattcaggcttatgaaaaagaatcaagcacaaaagttcattgttttattcttgtttttcctttttgcttattcatggcgtgttgaagcacaaacaggtaaggaaaagcaactaacaatggagtttaaaaatgaagggttgccctctatttttaaacgttttgaaaaggtatcgggatataaagtgctttttatctacgatgaaatcagttcttatacttctacaggaaaagtagaaaaagctacagttgatgaagcattgaaagtgattattggaaaaaatccgttaaaataccacattgacggacaattcataaatatcacaaaaaaagattctaagaagtttttctcacaagtaaagggaaaagttttttccgaggaagacggacttccggttattggtgccactattatagtggaaggtcctagtaatatccgtactattacagataataatggtaattttcagctctctgatgttccgaaagatagccgagtcagaatatcgtatgtaggtttggaaacccagttcttgaatccttcatcctatatgtcggtagtgatgaagtctgatacaaaggcactggatgaggtagtggtgacaggtatgttcaataggaagaaagagggattcaccggttctgctgttactatcaagggtgaagacctgaaaaaatatagtacgaataatgtggctaaagcgatagctgctgtcgctcccgggcttcgcatcatggataatatcaatatggggtctaatccgaataatctgcctgatatgcgtatgcgtggcggtgcaaatatggatatggctacacagtctgcggtagattttaattctaccagtaatgacgtattagcagttcagggcgaatatgagacctatgccaatcaaccgctgcttatcatggacggatttgaaatcactatacagacacttgccgatatggatcctgaccgtgttgcttctatcgttgtgttgaaagatgcggcagctacggctatttacggctcgcgtgcggcaaatggagtaattgttatcgaaagcaagactcccaaacccggacggatttgggtgacttatggtggggaacttcgtattgaagctccggatatgaccgggtataacttgatgaatgcaagagagaagatagatgcagagttgcaaagcggactttatacatacggcggcgaaacagttgaaaaatggcagctctatcaatctaaattgcgtgaagtgctggcaggagtaaatacttattggctggacaagcctttgcaaacagctttccaacaacgacatacagttacgctggaaggtggtgatgaagccttacgctatcggatgtatgtcggatataatagttctccgggtgtgatgaaagacagcaaacgtgatgtactgaccggttcacttgattttcagtatcgtctgaagaaggtgttgttaaagaatagtattacgttggataattcggtagctaatgagtctccgtggggaagttttagtgaatatacccgcttgaatccttatctgcgtccgtatggagagaacggagaaatacaaaaacggcttgataattttgaaggagtgggtggtgagtcgagctatttgaatccgatgtacaatacgacattcaacagcaaagatcaaagtaaaaactttacagtacgtgaacttttcaaagtggaatataatcctactaatgaattacggtttgaaggagcttttaatctgtccaagagcgtaggacatcgtgatatttttcgtcctgcacaacatacgctttttgataatgtgaccgatcctaccttaagaggtgattaccgcagaagtcagagcgaagctgtcaattggggcatagatttaacaggaagctggaataagcaactggaagatcactacctgactgctaatgcacgtatgagtgtattggagaataattcggaaacctatggaaactatgtaaccggttttccgaatgataatatggataacttgctatttggtaagaaatataatgaaaaagtgacaggagatgagaggacaacacgctccattggttgggtggctgcgggaggctattcttataaatataagtattcgttcgactttaatatacgcttggacggttcttctcaatttggaaaaaataaccgttgggctcctttctggtcaaccggattacgttgggatttgaaaaaagagaactttttgaaagatgtatcttttatttctgattttattttgagaggtacatacggcacgaccggttcccaaggttttgatccttatcaggcacatggttattatacatattccaatttgctgcttccttattactcatcggatgcaacaggttcggaaatcttggctatgcataatgaaagtttaaaatggcagactacaaaaagtactaatcttgccttggaacttggttttttcgatcagcgttttactgcacgtgtggaatattatcggaaaataacagataatatggttgccaatataagtcttgctccttctcttggcttcagcagttatccggaaaatctgggaaagatagagaataagggctgggaaatttctctctcggctattccttataaaaacactgccgaacaagcttattggacaattacagtaaacggttctcataatactgacaaactattgaaaatatcggaagcgatgaaatacagaaatgataaaagttcgtcagatttaaaagatacgccgttgccacgttatgaagaaggtgaatctctttcccgtatctgggtagtacgttcattaggtattgatccggcttccggagatgaaatattattgaaacgtaacggagagatgacgagtgccgttaattggagtgcgaatgatgtagtacctattggtaatacagaacctaaatggcaaggatatattaattcttcctttacatacagaggttggggagcagatgttagcttcaggtatcagtttggcggtcaggtatataatcagactttgcttgacaaggtggaaaatgctaatttgaaatataatgtagatcgacgggtgactcagctacgttgggcgaaaccaggtgataaggcacagttccgtattcttaatcctaacggtttggaaacgaaagccacttcccggtttataatggatgaaaatatattccagggaagttcgttgtctgtttactatcgtatggatcgtactaatacaaaatttattagtcattggggattgagttccgctaaagtgacgtttaatatggaagactttttctattggtctacagtgaaacgcgaaagaggtttgtactatccgtattcccgtcagtttacatttgctctgaatgttgctttctaattaaaaacatatttgtatgaaacagataatatatatactattaacaacaacaatgctgggacttatgtcttgcagcgactggttggatgtatctccgaagacttctattcctaccgacaagcaatttgagtcggaatcaggatttaaggatgcgcttacaggtatttatttgaagttgggaaccacgacattatatgctggagacttgacttatgcttatttggatgagttggcaggattatattccgattatccggggtataatacaaatgctgttttcgaccaaagtatcgtattcgattatgagaacatatttttgagtaagaagaatgggatttactcaacgatgtataacatcatagccaatattaataacttcttggagtacgtagacaaaaataaagatgttttagttaccgaacgatattatgaaactatgaagggagaagcactcgggcttcgtgcttttcttcactttgatttgttgcgtatgttcggtcctgtttataaagaacatcctgcatccaaagctataccttaccgtattgcttttgataaggatgccactcctgttttaccagccagcgaagtggttgatgctattctcaaagatttgaatgacgctgaaaaattactgaaagagagtgatcctcttgatttctttaccgatcagacggatgaagattttatagataaaaatcattttcttgtcaatcgtgagtttcgtatgaatttatatgcggttaaagctatgctggctcgtgtatattgttacaaaggtgatgcggaaagtaacggattggctacagagtacgctaaacaagtgattgctgcctctaagtattttacattgtacaaatcgcagactgcttccaattacaattccatacgctacgcagagcaaatctttggaataacagtcaatgaattctccaatttgcttattggaaattatatggatatggagaataccaatactcagcaacatttctatctggatggagatagatttaaattcttctatgaaactgccgatgcagggaatactgactggagaaaaaatacggaaatgtttgaggttattaatggggcaagtcggacagatgttttttgtagaaaatataatcagaaacctttgaatggcggatatgcttattccggtgctgacgctatccctttgatacgcttacccgaaatgtattatattgtagcagaatgtgttccttctgcatcggaaagtgctgacgcgttaaataccgtacgttttgcacgtggtatctcttatagtgatgaaataccgactaccggatatgatgaccttgataatacttcggaagaagacaaaaaccagactaaacgtattaatgagataatgaaagaatatagaaaagaatatttcgcggaaggtcaacttttctatttcttgaaagcgcataattatagcacttattatggttgtgggattgaaacgatgactgaagcccattatcagatgacgttgccggatgacgagtatatttttggaaacaactctaaatgatgaagcattatgaaacgtattatatattttgttttagctattcttgtttgcggcatttatgtaggatgcagtgaaaacgagatagacttatatgaccagacacctcgtatcaatttctatggtagcactacgcatgtccgtactttggttgatacggattatgtgaagaaagaaccttatgctgtagacagtttcgaggtaagaatacaaggagattttttgaaagagaatcgtgatttctgtgtgaaagtaactccgaataatgattatcagaattcagtggatgtattattggaaagcaagtatacatatactgaccttgatacagtttgccagatattctattataaaataaatcgtccgaaagtagaggcaggtagaaatgtttatggttgttatctggagtttgatttgaataaccctcttcatcagtttgataaaggtctggtagaaaagaatcaaatcgttttaaatgtcagatgggaactgagaccggatgagtgggaagattggatatttggcagttatagtgatagcaaatatatgtttattatgaatgtatgccagcgcgtgtgggatgatctggaagatgaggatgttgacaaggtcaaacaagcttacagagaatatatagaagcagggaatccgcctattttaggtgaggacggtgatgaaattgattatgaataagactaaaagaaatgttatgagaaaatatatcatctatatagcaagttttgtcggatcggctttattgcaaacaggctgttacgatgacaagggagattacgattatcatgatgtgaatacaatggaaattgtaatacctgaaaccaagttacgtatgccgaaggaagaagcggtggaagtttctattatgccgcagatttctcagacattagaacagaatgaggaaaatcttgtatttcagtggaaacgtctcaatccggatgctacgttgggctcggaccgattggctgattatacgaactattctgtaggaaaagagtgtaagataactattgaacccaatgaatctaacaatataggtttgatgttggttgtttcggataaaaagaatggaactgtgtggtatcagcaagggcaggtggttattatcaagccgtttaacccttgttggtttatccttcaggagaaagaaaataaaggggtgcttggagctattgaaggaacatcggaaggctattatatatattcggatgtatttcagtcggaaacaggaacaatatttcctttagacgggaaaccattggctatgactgcccgacgtgaatatggaggggatcgggcgtctatatctatgatgcctccttttttcggattgaaaattgttcctattcttacactagtgacagataaggatgcggctttgtttactccaagtacattagaaatgatgtaccaatcggataagatattgtttgagccggttcaacagggaaaagctataaagatcaatgcttataaaatggataaaaacggtgaattgtttgtgaatgacgggaagtcctatttcgcctatatggatggcttctgtataccttatactattcagaatgaatccggtgattatctttctgtttctacttatggttcttatggaacggggttggtattttttgattcttctacacattctttcttgaatggttgggctttatctggttttagtgattattatggtgtttcttattcgatttccaaatcagttcgttctggcttttatacatggaaagatcagcatccgatagtagcttctaccattaatcctgatgatgaggaagggagtgcctttaatccaaatagtatcgatccttctttacaagtgagagcgatagttacaggaggaaatggcggtaattatgcttatgccgttacttcttctcagaacggaaaagatttgacagtatttaagtttagtgctgactgggagaatgaggatcctacttgtgccggtttatatactgtttctttaccgtcggaaatagatgtggaaactgcgaaatttgcagcttcttatgcatatacagcagatattctgttcgtagcttccggtaataagttatatcggatagatttgaatcgtagtttggtgacagaactttatcaatatgaaacggatccttcggcgcaaattacatgtctgaaatttaaagatgctgagagtgaggaagaacttggtatgtctctcggattgggtatcaatactgctgataaaggggtagttgtagaattgcaactgacagtggcgggtgatgtatctcgtgaagaaaacagcatttgtgtttacgaagatcctgatcagtctattgggaagattgttgatattagttataattacgaatagtataaaccggtctttatgctaaaaggaattatcggtgcagtatttcttgctgttgtctgtacttgtctgtacgggcaacagcaaagtattacaacttttattaaagaagaagcaccagtggaagttattcccggtatgtttactacctatcgaagtgataaacatatctattgggaaatcccggattcattgattggacgtgagtttgccgtaacgacaactatcctgacagctcctgctcgtccggaccgggatatggaaaagaaattcggatatgcgggtgacatgataggtccggtatttttcagtttccgtaaacagggtgacgagttgtggatgatggatccacaatatgaaagggtgatagaaaatcctgaaggaacgtatgcaaaaatcgctgcccaacgtgggaatgaaaggctttataagatattaccgattaaagcaaggaatcagggaagtagcctgatagagattggtgaagtactaaaagattttcctctgttcactctcggcattgtgtcttttgatttgttgataggtacacatctaagcgaaaaagactgtatcaaggaaatcaagggatatgataatcgtttgttgatacatgcgtcacgagcttatcaaagttcatcaatgggaataccgggtaagcctgttgcacctccttatattggagactgggatacaggtatctgcataagattactatcaaaaagaccattggaagcagttactgcaaatactggagcttatttttctatcaacaaggagtgttttcaaggggatcagcctgctattcagaaatcagttgtcaaacgatggcggctggaaataagggcggaagatgaagaaagatacatgagggggggactagtagaacctatacaacctattattttttatatagatcgtaatacaccggaaaagtacatcgactgtatcattgaagcggtacgtgactggcgtccggcttttgaaaaagccgggtttaagaacgccattgatgcgcagctggctcctaccgttgaggaagatcctgattttagtatttatgatagtagttatccgtttatttcatggaagatatcaggacaaaataacgcttatggtcccactccttgtgaaccccggtccggtgagattattgcttgccatatcggtattttttgcagtgtcttgaacttggaacagaaatggtattttgctcaatgtggagcgaatgatccgcaggcatggaatatagagctgccggactctttgcaatacgaacagataaaacaagtgttgacacatgaagtgggtcatacattagggttggaacataactttctggctagttctcattactccatcgatcaattacgtgataatgactttttaagtcaatatagtattggtagttccattatggattatgtgcggtgtaattatgctttgcgtcctcaagataaagttgatttgagaaacaggagggtacgtgtcggcgaatatgataagtgggctattgaatggggctaccgtatatttccgggtaaagatgcttctgaaagagaaaagaacaggaccctttggaatcaggaaaaacagaaagatccctcattacatttttcgggcagaatggatgtacgggctcaggcagaagatttaggtaatgaccatgttatggttaatacacagggaatagagaatctgaaatatttgtgtgaacatcctgatgtctggaatgtgacggataaaacgtctttgcgtgtattgcagggacgttatgaagcggtattaaatcattataagcagtgggtacagcacgttttgtctcatttgggcgggaaacgccttgctgaaacagatgatgagaatatttacatacctgaaaaagccgattacaataagaaggttatgaactttatacagacttatatattacagccgcctgtatggatgtttgataaagaacttaccactaaattagaaatagatggtagtcaggagttcgaccgcttttatgaagagctaatgtcggaaatgattcgttctctccgggaagtggaaagaacggagaatgtttgtgaggatatgttgtctgtagatgagtttttggaaagcatacataaagaattatttaccgaatgggctgacaatattcctgtaagtgacgccaagtataaagtgcagctactttatgtgagtaaacttgttaaattgttggatagatcagaaaagataacttcgtcgagattattggtttccatcatgcaggctttgaatagaataaaggaggaaagtcttgattatagccataagattacggatccggttaccaaaaaacgggcaatgtttcttgtagatagtattttgttttaatgatgaaaagtaaataaagaaattcatgaagagaagaagatatgtgattggtatattgttgtgtgtcacagctttgcttcaggcacaggattccgtcaagtcatttgacgagttttttgttgccgggatggataagatcgacggtgtgtttcctgtgtatgtagcggaaaaagaaatctatttggaaatacccgaaaaatatatcgggcgggaaattgaagtcagtggacagatagaccgagggtttgatttgttgaatcgtccggttgacggactgggagtagtgcgtattatatctccggataaagctacaatttgctttcaaaaaccgttttatacagagcgtattttagatgaaaaaagcacatatcagcaatctttctcgttgtcaaatatgcaacctgccggtaaaagttatccagtggtggcctattcaaaagagcagggagctattattcggataacagagtatctgatgactggcgatgactggttcagctataatgatagttttattcgttccttggttccggaactgtcggaaataatgaaaatacatccttttaaggaaggtgtgtcgtttacggtcaggcgctatcatggagttgaagcagaaagatatatgctgtccagttctgccgttctattgcctgaaggtagtatgcctttggaagtcacttgtgcagtacgcttgctacctctgaaaaaagatcagatccgcctggcagattacagaataccctaccggacattgagtttcaaagattactcgcaaaatccttattgtatggtagaagattcattgattcttcgttgggatatgtcacaaccgcttactttctatgtagataccctttttccgaaggaatatttccaggcagtaaaggaaggagtggaagcatggaataccgccttccataaagcaggtattcatgatgctttacaagtaaggtatgcagaccgaaagataattccggcggaacaacgtgcttttatatcttatgatttaagaataccggggatcaaaagtgactttatctgtcatcctcgtaccggagaaatactttcatgtcgtctgaatatcggacatggattcctaaaaggaaaattagacgactatctgttaagttgcggtgcctcggattcgcgtattctggctgaccgttattctaaagaagtggaaaaagaattgttgcaaaatgaaataacggaagaaattggatatcttttaggtttgcgcagaagtttatcgaaaagttcgtgtggaaagactttaaaagttggagatgatgattgccggactatttattttggttatcatcctttcaaaggagaccaaaattgttatgatgaacgggagaagctccgccaatggatagatcataatttaccagatcacattcgtttattccaaccatcagggaaggagaattctgattcttcatttccagaagattatacggtcaaaatatcggatttacagactgtagtgagtcggttggacaagattgtgtataaggggaagaaatacgataaagggagttcgctcactgatatatacagaaaggctattcgtctgtatgggagttatctgatggaaatggcaaaggtggtgggtagttctcaaccggcagatgcgcagcgtcaggcaatgcttgatttggacaactatttatttcattctgttaaaaagatggaatgtacctatgtaaaagagaatttgttggaaacaagaaacaatcttctgtatccggaactggcgaagttgttcaaacaattgttgagtgtaaagacaatttcagctcttcgattgcaggcgttgcagagtgaccggaaggggtatgacgatattgattttttccgggatctttataaaggattgtttaatggttttgatccgcagtctgccgttagttatgaacagatggatattcagctgatatgtttggaagcgtggctggatattatgcaggaagctactgaacataatagtataaagaaacgtttaacgaacgaattgcatagtctgcacgatagactggaggagcttagcacgacacattcccaaagggaagtacgtgatatgtatattctgcttttgagaagaatggatcaatatttccgtgtggtttcttgagtggcgttagagtaataatttgtttgggatgatgaaaaaatggtcgtacagatagaataacctataagttttgggttatctttgctatgatttatgaataaataattagaataagatgactattatttttccttcacccatcttcggccctattcattcccgccgtttgggcgtttctttgggaatcaatttattgccggacgacggtaaggtttgttcattcgactgcatttattgtgagtgtggtttcaatgccgaacatcgtacgaagaaacttcttcctacccgtgaagaagtccgcacggctctcgaagagaaactaaaagacatgcaggcaaacggccctgctcccgatgtactgacatttgccggaaatggtgaaccgactgcgcatccccatttcccggaaatcatagaagatacacttgcgcttcgcgacaggtatttcccaaaagcgaaagtaagcgtattgagtaactctacatttatcgaccgtcctgccgtattcgaagcactgaacaagatagataataatatcctgaaactggatacggtggatgaagaatacattcatctgttggaccgtcctaacggaaaatattctgttaagaagatcatcgaaagaatgaaagagttcaaaggaaactgcatcgtacagacgatgtttctgaaaggaggttatcagggaaaagacatggataatacatccgacaagtatgtgctcccctggatagaagcagtgaaagaaatcgctccccggcaagtgatgatttatacgattgaccgggagactcccgaccacgatttgcaaaaggctacgcatgaagagttagaccgtattgtggctttattggaaaaggaaggtattccggcaacagcttcttattaaaatataatttaaacagggatatatttcttcttgataatacgtaagaaaattaatataagagggcgaactaatagaattcagaagttttatacttcctattctattgctcgcccttttattggcttcatgagctgtttcagcctattctgacaagggtatattctcacatcgatgagaaaaagttctcattgcagtgagagttttttctcattataatgagtattttttctcatcgcagtgagaatgcttgagaatttgcacttccctgataatggtttgtacttccctgataatggttgactattttatttcttatcactgtttcgggttgacttgcaatattactaaccctatctacagttgaccttattattgattattcctacatcgggttgacttggtttattagttatcgcaccaatatcagatactaagtatataagacgtcagactactatcctgatcgagattgagtttccgtttgagtctgtacttcttcaattcgacagaccggagcgcaatgcccataataacggaaatctctttggtagataagttggcacgtatcaggcagcagaatttcagttccgaaggcgacaagtccggatatactttttgcatgcgcagcataaattcatagtgcacttctacgaagtagttttcaaaggataatagcttatctttttccgtagcgccctgctgaataattttcattaaccggaggtagagcttgttgggataccgctcgcccagttcattcttttgtgtttccacttccgtagaaatagcgtccagcaattcctgcttttgggttaagaaacgcatccggtttttaagttcgctttcctggtttcttactttctcctgcaattgttcgtaggcttgatgttgcagttcttctgcatgttttctctgttcctcttcgtattgtttgagtaatctcttccgttttcgttcgctgaagagagtcaccactccaacggtgattatcaccaggaacaacacatataacgcaatcatccatgtccgtttgtagagaggcggagatacgagtatcggaactaccagtgtgttttgattgctatcttttatttcgagttgataggtgccggacggcaggttggtgaagtggatagtgcccgacgtttgccacggactccattcattcgttactccgggaaggcggtaagagatagaagtggcatgagtccccagtccggtagtgacttgaatagttatattggtggcggtattaggcaattctatttcctgctggtggaaatctgcataaaaagtattgttatcataatcgttgaaacagaaagtctctatctgtaacgggcgtggattggagacatggcggtttaccattttgctgttgataacgacagttcctttacaggtagaaacaaacgtgattgaatcattaattgatttcagattataatgtttgtcgtaaagcataagttcattatcaacaaacggccagtgcattattaattcggcagataaatccacaatgtgatagaggaataactcttcatccgtagctacccagatatcgttcttataggccgattttatagattgcaacttgttcagatacaaaatttccctgcttatttgttcttgttttctaaaacttttcccggtaatatcgaacatgtatattcctttaggcgtcgcaaacagaagcttatcttccacttttaccagactgattctgttataattggcgtatccgtctatttcggagaaattctcgaaatccgttatctcattcaggtctttgttgatgcgcagtcggaagattcctttttccggatggatagcccataccgtatgaagattttccggcatgatgttggcataattttccgtatttataagtaaagacttatatttccaggtgttgtctttatattcgagcagggcaattccggaataagaacgtaagaagatgtattcatcgccacggtcggctatatattcaaactgtctgacgccgtttatgttgtagaacggttcgaagttggtttgtccggctttcattttaaacagttgggtggtagtgccacacaacaattcatttttcaggttgcagaactgaagagggtacatcgaagtctgcatcttcctaccgtcttcttcataaagataaataccttggttggagccgatataagtctttccgtcgaaagaagccgcatcgaagaaagtgcctatgtcagtgtttgttttccatagataagtggccggttcgaggataactgatgatattccgttgtcaagtgagagccaaaggaagttctcggcagcgaaacacaaaccatgaatattgaggtcttgcagttgcgaagaatgataatgcgtctgttgcccgtttttcaggttaatcaggaacaagccgtcgcctatggttccgacagcaagtagttcgtctttccaaatacttccgcagtctatccggacggggatatgattggcattttccaactggagtagcgggactatggtattacctttcagtgtatatatcttcccgttggcttgccctatgatatattcatcatcggcaatccgaaacatgaatttagtttctccattcatgaagattgtatcctcgcagaagttttccagcttattgctgcgaatttgcatgagagcaccgccgcacttctgcgtaaacagcttgtcacctgccggatagagagaaacacaacagttgtttttcaccagataacccatatccttgccgtcataccagataatattgccgaaggaatggaaatatactttgccttccgtttcggctatactccaaaaagtctctcctttgattccaagcttatttaccagcggtagaagagacgtatagttgatttttccgtttgcatcatattgccagtagccgatgttgttgtcgcctgctgtgtaaatccggtcgccgatgcagcgaactgtgcgtacggtactgcgttcacccggttcgagaagagtccagtcgttgccgttgtatcttaatagtccgttgttattgctgctgtaaagaacctgtccgggagaaaccgtaatgccccagttctgaatcccgcctttgtagtttttatagttatagttggtaatttgcacaggtgtctgtgctgtgcccggcgagagacaggcaaaagatagtagggtgtatagccagaaaatccaattgtatctcatcagtattatattagcaaggaatgtacttactacaaagataaagagaaaaatcgaagatgcaataatcggatttaatttggcggctgtcggtgtgggtaccgattattgtgtgggcaagggattgccactgaatgatatatatgccggactataaagaaccagcccggcatatatgctaatacacaactacattgttacctgaaaagttttataggtgctgcttgtaccattccaaagcccgtctgttcctgcataggcataagttccttcgtctattctgaaacggaaagtataataatatgttcctgcagtcgagatttcgggagttttgccttgataatagtgattgtttccccattgcccgttccaatggcaagattgccatgtccaatcggttcccgacgggtcagagtttgttgtggagtaaccgatttcacaagtcacatgtttgttggcagtgcctgttcccaagtcggttaatccttcgatgaatacctgtgcgcccgtttcaaactgttctccttgttggataggattcttggctgtccagtcaccgagtattgcccaactgatggatagttggctgtaatctttgatgcttgcgtattctttttgttcttcctcttcttttttcacttcaaactttccgttgacgtttatttctccatcccataatccgcctgttcctgcatatttgtaaggtccggaaccgttacggaaacggaatgtataaaagtaagtgccgcagtgaggttttgaatacgtacttgataatagaaattgttgccccagtcgccccaaaacggacaggaagtccatatccaatcttctccggacgggtcagtatcggtaaacgagtaaccgatatcgcaggtaatctcttctcctgtttcgctgtcgacagaattggtgatgccgtcggcatacacacacgaaccggcttcaaaatcgtctccctcattgattacgctagaggcacaccattgcaggttggcccatgtgataggaaactcttcatccggtctttctccttcatcctgaatactttgcttaacggtcagggtaataacctcttcgtcttgcaggaaaaaggtgacatgtccttcgcggggctgacctgttgcattgtcggagacggtgacagctacattcgctataaaactcttatttactccgggatagttgtccgggcttatggtgatccagtattcggaagcaacggcactccagcgacgggtggcgtctactttgacggcgagggtacttttatatccggtgaatgacaattcattcttgttgatagtcagagatgccggagctatctcttcggaatctttgcaactccagatgaatagagtcgtgcaaagagagataaatatacaatatatgtgtttcatactgtttaattattggttattagttttatacttattcatagatgaataggcctgatctattttatatctgatttctactctattcatatatgaataagctggttttaccgtaaataggttgtcacgcgatatatacccggactccagactgcctgataggaagtaggtgagtaaacaaatatctcgtcgctgtggtcggcattgtagttattactcttttccgatgtaaacgtacgacgtcctttggcaatcagtacagcgttatgataagtctcgtcaccgttgagcaaacgggtggctttccactcaccgtctgtatcgtaaccgccttcccatacttgcttgatataacctgttttctttttgtcggtagaagtgaaataaactttgaagtt

SEQ ID NO: 8118 - DNA, 6299 bp, Unknown
  gut microbiota DNA sequence
gcggagagacagggattcgaaccccgggtacctcgcagtacaacggttttcaagaccgccgcaatcgaccactctgccacctctccaaaactcctttatcagaagtgctttccgttgaaagcggtgcaaaggtacgaatcatttttaaatctgcaaacattctgataattttttcgcgaattaatcgtatttttgcagtccattagtaagaacaaagatatgatataccctcaaaattttgagcaaaagataggattcgaccagatcagacagttactaaaagataagtgtcttagcactttaggcgaagaaagagttacagacatgaccttttccgagcaacatgaagaagtagaggagaaattaaaccaggtaacagagtttgtccgtatcatccaggaaaaagacggatttcccgatcaatttttctttgatgtccgcccttcactaaagcgagtgcggatagaaggaatgtatctggacgagcaagaactattcgacctgcgccgttcgttagaaaccatccgcgacattgtacgttttctccatcggaatgaagatgaagaagagaacgacaccccctaccccagtctgaaacgactggcaggagatatagccgttttccctcaactgataggaaaaatagacggcatccttaacaaatatggaaaaatcaaggataatgcttccaccgaattagcccgtatacgtcgcgaacttgccagtacgatgggaaatatttcccgctcgttaaacagcattctgcgcagcgcacaatccgaaggatacgtagataaagacgtagctcccaccatgcgtgacggacgtttggtgatccccgtcgcacccggactcaaacgaaaaatcaaaggtattgtacacgatgaatccgctagcgggaaaacagtgtttatagaaccggcggaagtcgtagaagccaacaaccgtattcgcgaactcgaaggcgacgaacgacgcgaaattattcgcatccttaccgagttttcaaacattctccgtccgtctatcccggaaattcttcaatcatacgaatttctggcagaaatagattttatccgcgcgaaaagctatttcgccatacagaccaatagtctgaaacccgctgtagagaatgagcaactactggactggacaatggctgtgcatcctttattacaactttcacttgccaaacacggaaagaaagtcgtaccactggatatagaactgaatcaaaaacaacgcattcttattatatccggtccgaatgccggaggtaagtccgtctgcctcaaaacagtcggtttactgcaatatatgttgcaatgcggtatgctcattcccttgcacgaacgcagtcacgccggtatattcagcagcatctttatcgatattggtgatgagcaatctattgaagacgatttgagtacctactcttctcacctgatcaacatgaaaatcatgatgaagagttgcaacgaacggagcctcatcctgattgacgagttcggtggaggtacggaaccgcaaattggaggcgctattgccgaagccgtcctgaaacgtttcaaccagaaaggaacattcggagtcatcaccacccactaccagaatctgaaacattttgccgaagatcatgaaggagtagtgaacggagccatgctttacgaccgccatctcatgcaagcacttttccagctacaaatcggaaatcccggaagttcgtttgccgtagaaatcgcacgaaaaatcggattgccggaagatgtcattgcagatgcttcggaaatcgtaggaagtgaatatatcaatgccgacaaataccttcaggacatcgtgcgcgacaagcgttactgggaaggaaaacgtcaaactatccgtcaacgggaaaagcacatggaagaaaccattgcccgctaccaaacggaaatggaagagttgcagaaatcacggaaagagatcatccggcaagcaaaagaagaagcggaacggatgcttcaggaatccaatgcacgcattgaaaacacaatacgcacaatcaaggaagcacaagctgaaaaggaaaagacacgccaagcacgtcaggaactgacagacttccgtacttctttagatgcgctggcttctaaagagcatgaagagaagattgcacagaaaatgaagaaattaaaggagaaacaagaacggaagaaaaataagaaaaacgaaccgaaagccgcagtctcttccccgtcaagtgctcctaaagtagtgccgattgcagtaggtgaaaatgtaaaaatcaaaggacagacaagtgtcggccaagtgatggaaatcaatggtaaaaatgcgaccgttgcttttggaagcataaaaacgaccgtaaaaatagaccgtttggaacgtaccaataacgcacccaagacggaaggaatcgccaaaagcacctttgtcagtagccagacgcatgaccaaatgtacgaaaagaagcttagcttcaaacaagacatcgatgtgcgtggaatgcgcggagacgaagctctgcaagcagtcacctattttatcgatgacgccatattagtcggcatggaccgtgtacgcatccttcacggcacaggaacgggaatacttcgtacattaatccgccagtatctggccaccgtaccgggagtgagccactatgctgacgaacatgtgcagtttggcggtgccggaatcacagtagtcgattttgactaacctgtaaacaaaacgtccaaagaacttgttctcatttagaaaaccactacctttgttacagtggttttctaaaacgagaataaagcatgaagaataatctgttaagcgaaaagcttatttacacaggagacagtcttactcctacccacttacatctttgtacttacaatgctaccgagatgcaggaaagcgccaacgacacctttcaagccatcaagggaacactgaacagcgatcggatcaattggctacaaatacacggaatgaaagatacggagactatccgtgaaatttgcagtcattttgaaatagacttcctagtcctgcaagatatactgaatgcggatcatcctaccaagatagaagagcatgacaaatacatcgtcctgatcttaaaaatattctaccccaacgaacataaagaagaagacgaactggacgagttgctccaacagcaagtttgtcttattctaggtaataactacgtacttactttcctcgaaaaagaaaccgacttcttcgatgatgtcagttccgctctgcgcaatgatgtcctgaagatacgcagccgccagactgattatctacttagcgtgctgctcaacagcatcatgggaaactatatttcaacaatctcttccattgatgacgcactcgaagatttggaagaagaactgctcaccatcaccagcggtgatgacatcggaattcagattcaggcattacgacgccaatatatgctgatgaaaaaatccatccttccactaaaagaacaatatatcaagttactacgggcagaaaacctgcttattcacaaagtgaaccgtgcctttttcaatgatgtaaacgaccacttgcaatttgtattacagaccattgagatctgccgggaaactctttcctcattagtcgatctgtacatctccaacaatgatttacgtatgaacgacatcatgaagaggttaaccatcgtatccaccatctttatccctttgacatttctggtcggagtatggggaatgaattacaaatggatgcccgagctcgaatggcaatacgggtatttatttgcctggattgtaatggcaattatcggtattattgtatatttgtacttcagaaaaaagaaatggtattaacaaaaacacatcatcagtcatgaaatcgataaaagagctatatagaataggcacaggaccttccagtagccacactatgggaccgcgcaaagctgccgaaatgtttctggaacgtcatccggatgctgcatcttttaaagtaaccctttacggcagtttagctgctacaggcaaaggacacatgacggatgtagccattatagacactttgcaacccactgccccggtagaaattgtgtggcagcccaaagtctttctaccgttccatccgaacggaatgacatttgcagctctggatagcaacgataaagtacaggagaattggactgtttatagcatcggtggtggtgcactggcagaaaataatgacaatccaaccatcgaaagccccgatgtatatggtatggaaaacatgactgaaatactccaatggtgtgaagataccggaaaaagttattgggaatacgtaaaggaatgtgaggaagaagatatatgggactacctggctgaagtatgggctaccatgaaagatgccattcaccgtggactcgaagcagagggcgtactacccggaccactaaatctccggcggaaagcctccacttactacatacgtgctaccggatacaaacaatccctgcaatccagagggctcgtcttctcttatgctttggcagtaagtgaagaaaatgcttccggcggtaaaatagtaaccgctccgacttgtggttcttgtggagttatgcctgccgtactttatcatcttcaaaaaagccgtgactttagcgatatgcgcattttacgtgcgttagccactgccggcttgtttggcaacatcgtcaaattcaacgcatccatttccggagcagaagtaggttgtcagggagaagtaggtgttgcctgcgcaatggcttcggctgccgccaatcaattgttcgggggcagtcctgcacaaattgagtatgcagcagaaatgggcctggaacaccatttgggaatgacttgcgacccggtatgcggattggtacaaattccctgcatcgaacgaaatgcatacgccgccgcacgtgcgctggatgctaatctttattcagctttcaccgatggcatgcaccgtgtctctttcgacaaagtagtgcaagtgatgaaacagaccggacatgacctaccgtcactctataaagaaacaagtgaaggaggattggccaaggattacaaacaaatgtaattataaaaagcaacggaccattccttttatagaaatagtccgttgtcatttttatgattaaaagttattcagttggcggccaattcgtatcatctccgttactgatatctttctcatgtatcaatccgccatcctgcgtgaaataaagcgagtagcgctggctaccttgtttcaccttaatcacagattccatcggattctgtggaaatgtcaacacatatacatctgtcactacccacgcgttatatttagaatctataaaagccgtataaacagccggcaccaactgatcaatactgttcagttcattttctgtcatcacccagttggcattagcatcaaaccagacttccaattcatcattgctcacccaacagtcagctacataataagcacctttcatctcccattctatattctgggcagccggatatacctgtttcaaggcctccgtaatattactgggcggaacaaaagtatcatcatcgtcattatcacatgcgccgaaagaaagggaagtcataagcaacactactgcccatgcgctaaacttaaatctccacatagttatcttcttgtttaggtctatttactgcaactagttaatcatcagccttgataaattttcctttcttatcaaatttgaaagaaagcccggtagacaattcaatctcataccctttgcggtcacgttccactttcgtcactccttcattcacaaaattatgtgctttcaggtagttgacagcgaatcccggaacaatactaacaggaacagtctgccctttcttagcacttacctcttcccagtttcccttactgtcaaaatcaatttccgtaccatccatcaataacacttcatacttggtagattccatcatatccttatcaattttgatatgggcaacctgtggttttgtaaaattactattgataaaattacgtgccggaagcggcaactgattcatgtctttagttatcacatcttttgcgaatgaaaactgcacggctaccagagccagtacaagtagagatagaattttcttcataatcgttattcttttagcgttaatactatactttattctatgctacaaataacgatacagattccggaaagatttaggaatattatgagtttgctctttttttgtattctttaaccatcctaaaaaacagaatcatccttccatcttccattccccaattgt

SEQ ID NO: 8119 - DNA, 12133 bp, Unknown
  gut microbiota DNA sequence
tgattttcgcgtaccagcgaacgcagggtattcagcgagttgaacagcatgtgtgggttcagctgattcttcagtacttcatactgattgcggagattctctgcctgaagctgttcgttctcaataagtaccagttgctgcttgaatataagatgaatgatacagcaactactggtgacgagacatgccacaataaaatcccgcaatggatgcaaataatgatgtaccatggcatcgatggccggaatatcaaacgttctgtgaaggaaaacaaaaaactgtcctgacaagttactcaatatccatgtcacgataaaggaaagcaaaatctttgtccctgtaattttaatggaagcctgattgaaatgaaacaaacgggtattgatggcaaaaagtaacaatagcgacagaaaggtaaacagtatttcgtttgccacatctataaacttcatccccgggaataaggaatgactttcgaaacggtcgaaaagagatactgattcaggaaaatgaatcagtacagcaaccgctaaggagatgatgactgtggaaagtatatatttatctttttttattgctttggctatcatacaacaaagatagtggtaaattatgagttaccggttataaaatgtcaatgctgttgtcacagttggtcaattattgtttctgaatgtgtgccgtgacatacataccggggcggaattgtacattttcctccttgatggaagcatatacctcgagcgaacgattggtttcgtctactttttgtccgatggaaatcacgatgccgtgaaaggtttgtgtccccattccgtttacccgaaactgtaccgggctgccgacttgtatgtctgcaagatctttctcgtaagtagtcaggcaaagcatcgggctgcttttatcgataagttcgcaaagtgcttctcccggattgatatatttgccgatattcatcgctacattagcggcataaccactaatgggggctttgacttccagtagcggttgtattccgttcttaagtaatgcctccgtttgaacgcctaaaagagaaagttgtgcagcagcggcgtcctggcgactcttcatggagagaaagtccgctttactttgctggaatttcttttgagaagctgcttgttcggcagacagatttttttgccgttcgtattcagctaagagatattcggtctgtgcgtgactgtccagataagtttgttgcagggtgatgaactccggattctctaacgtggcgattacactgtttgcagccacccattgccctggaagcagagaagccttttttacaatgcctcccatggttaaagcaatggttgcctgacgttgaggaggaagaacgattcgtccgttgaacgaaacctgattaggctttgaggtagctgaagtgatggcatccacttcgggttgtgcgatggtatctgctatcgtttcggtaacgggaattgcggcggattcgttatttgtagtttgctggtttcctttgcaagccgttagaactagtaaaaggatgggataaactatctttttcatatcttatgttttataataattattctgggtgatgtatgtcattcaatgtctcgatcttccacctacttgaaaagttcatattccagtgcagcaatattgtattggtagactgtttcaatatagcctctgcgtatctctctggcggtggtaatcgactgtatatattcggcaatgcctgtttcgctctgctgcaattgcaggttggctgcctttgtcagttcgtccgcttctttcaaggccgatgaggtataatatcgtaagctctcattatatctgcggagggatgcttccagttcgagtgttttatttcttaactcccggatgttggcatctgcttgtatttgcgctgaagtggcagttagccgtgcctgcttcactttgctcttttgtggcaggaagtagatggggaaagaaaccccgatcatccaggcattcagattcttaagtgggagaatgtcctgacgggtataccccacactgatttcaggaaagaaatggctctgctctacacggagcattgctttcgcttcatctgcctggctttgaaagtaggcagtatgtgctcccgataggtttccatccgaaatgccggtatagaataaggataaagtggaatccaccggaacaatgggatcgttggagtagcaactccattggaaacgtgccaatgccattttctcttcttcttttgcttggaaccagcggttatgcagatcggcagctatggtggtcatcatatttttctctagcaaggtgatctctccttgttggtatcgtaattctccgatgcgctgcagttcttctgccattttatcctgatcccgatacattgaacagagattagtggcatattggtagtaggcccacgcccttttcacttctgctgtgatttctttctctaccatctgccgataataggtgttcgtttttacctgacggttgactaacgcattcttatagaatggcgttagaagggagcccaggctttgctcgaaagccagttccttgtcttttttgttttctccgttaagttgaccccaggaatagctgaacgaggtaggcgttgcttctatcacttctccgcgagtggctttggcttgttgaatagcattattggctattttcaggcgaggatgattttgtttggctatttctatcgcctgttcgagactgactgtttgtgtctgttgagcggaaacgaacgcgggaagaaacaagaacaggagacacaatcccccgaaaggccagcgcagtttgattcccggacgtctccaggtagcaaatgaatttacaattttgtaaaacaccggaatgatgagtaaagtcagtacggtagaaataatcaagccaccgatgaccaccgttgccaacggacgttgtacttctgcgccggctgaagtggctattgccatcgggacgaatcccagagatgcaaccagtcctgtcaggaatacaggacggagtaagtgtggagtccctcttttgataatctggtttgtagtcatggaataggtattttgtttacgaagttcgttgaagtgatttaccatcaggataccattcaatactgccaccccgaacaaagcgatgaatcctactccggccgatatgctaaacggaagtccgcgtagccaaagtgcagcgataccaccgatgagcgatagggggaccgttgagaataccatcagggtataggtgatgttcttgaatgcgaagaacagaatcaatagaatgagcattaatgccacggggatgaccaccagtaaggtattgatggcattttgcaagttttcgaactggccgccgtattcgaagtaatatcccggcttcagtttgatgttcttgttcagtgtctcttgaatattggcgacaacttgctggatgtctgcgtcacgcacattgacaccgatgacgatgcgccgtttggttgcatcccggttgatttgcagtggcccactgacaaggtcgatgcttgctacctctccaacagggatttgaattccttccgaagtgcgtacaaataacttatcaagattcaagtcggccactttctcctggtcaagccgtaccacgagatcgaatctccgttcgttttcaaagattacacctgttgactctccggcataggcagttcggataatggtgttaagctcttgtatgttgatgccgtaacgggctattttgctacggttgtatttcactaccaattggggtaatcccatcgtctgctcaacgatgacatccgctgctcccggcactttttctacaaaggtagctgcttctttggctctttcatataattcgtgcgtgtcttctccatatagtttgatggcaatatctgcttttgctcccgtcatcagctcgttgaagcgaagttgtatcggttgcgagaagttgaattcggcacgttcggagagcggagcaagtgcatctttcattttatccaccatttctgcacggcttccggcacttgtccattctttaaatggtttcatgataatcatcacatcggcgtcttccaccgccatcgggtcagtgggaacttccgccgttcctattttggctacaacatgtttgatttcagggaatttatccattaatgctttctctgccaagcgggatacttcgatactttcggtcagcgaacttcctgcgggtagtgtcatttgcatggcaaaatctccttcgtccaaagtaggaatgaattctgctcccaggcgggtaaagagaaaaagtgaaccgatcagcgcggagaaggctacgatgacggtacgccatttgtaacgaagacaggcgcgcagggtgtgctggtagatcttgttcagtttctcgaagaagcggtcggcaagggtgggtttcacaacaatggtatgcttcagaaagagggaggccatcataggaacataagtcagtgaaagaattaaggctccgataatgcagaacacaagtgttttggccatgggggtgaagtatttcccttcaatcccgttcaatgtaaggatggggaagaagacgataaggataatcaacactgcaaaagtagccgaacgcgcaacgccggaagctcctttttccacttctttgtccatctctttgcgggtcagtgtgcggcctcggaattgttttccgtaaatgtgggcgaggataccttccaagataacgatagagccatctactacaataccaaagtcaatggcaccgagactcattagattggcggtgacattgaatacacgcatcatgataaaagcgaagagcattgccagcgggatgacggatgctacaatcagtccggcacggaggttgccgaggaagaggatgagtacaaggaagacgataaccgctccttcaatcaggttgttgacaaccgtagagatgttccggtttaccagttccgaacggttcaagtaaggttctatactgactccttcgggtaatagctgctgtattttttctacccgtttttcgagttcttgagtcactacattggcgttggcacctttcagcatcatggcaattccgccgacacactcgccctcaccatcctttgtcatggcaccgaaacgctttggagaaccgaagcggacaactcctacatcactgatatgtaccggaatcccattccggttggtcactacgatctgttcaatatccttgatgcgggtaatcataccttccgaccggatatagtaggcattctttattttctcaatgtaacttccgccggtattttggttgttgctgctaagtgcttcgaatacctcgccgatagtgatattcaaagaaaacagggcgtccggatcgacggctacttcatattgtttcaggtaaccgccgaaactattgatttctactataccgggtataccggacaactgacgtttcaccatccaatcttgaatggtgcggagttccattgcgtcatatttcttctcatatccgggagctaccttcaatatatactggtaaatctctcccagaccggtggtgatgggcatcatctccggtgttccgagttcggagggaatctcgcttgttacgctttgtatttgttcatttatcaactgccgtgcatcgagtgtggggacactttctttaaaaacgaccgttacgaccgatagcccgaagcggctgacagaacggatatcttcgacattcataatattgctcatcgctatttcgataggcatagtgatgagttgttccacctcttgtggcgcgagtgtaggagatacggtcactatttgtacctgattattggtaatgtcgggcacggcatcaataggtagtgtcagcatcgcatagatacctccgataaacaggaagagagtagtgagtcctacaaatagtttcttcttgattgaaaaacgtacaatagctgtaaacatgactttcgttgtattattatttcacgatacaaaattactacctatcttcatccgttatcactaaaaataaatgaagcggaaagattgtggggtgaagtgacggattggggaattgaaagatgtaaaatcatagttcttgtttcactgctgaacaaacatttctttcagtttactcgtttaatataaaaacaaactaaatgtatattcagcatgaaaacattcgtcttgatgatggtaagcctgttgtttgcaatttcttcggaagcgcaaaacaagtctttttatgattttacagtgaaaactattgatggtaaggactttcctctttcttcactgaaaggtaagaaagtgctggtagtcaacgtggcatctaagtgtgggctgacgccccagtatgctcaactggagaaactatatgagaaatataaagaaaaagattttgttgttatcggttttccggcgaataactttatgggacaagagccgggtagtaatgaggaaatagccaagttctgttctttgaactatgatgttacttttccaatgatggctaagatttccgttaaaggaaaagatatggctcctctttaccaatggttgacggagaaaaaacagaatgggaaagaaaacgcaccggttcagtggaactttcagaagtttatgattgatgagaacggaaactgggtgggagctgtgttcccgaaagaaagtccgttctctgaaaagattattacttggatagagaaggaataagagagacttttttcagctcttcttcgaagttgggagtgaagattcctttacccagattttcttttatttcttcgatcttccaaaatcgtccaccgtccagttcgtcgctgggatggatttcttcctcataaacggttttgtggacaaaaacaagctctttttcacggctggattcaaaaacataactggtgagaagctcgggggtgaagtctgtgatgcccaattcttcacggacttctctctttagggcgatttctacgctttcgcccaaatcaatatgtccgcccacagccgtatcccatttccccggttgaatatctttccattcgggtcgtttctgtaaatagatgtctccttgggcattgaatacgtgaaggtgaactaccggatgaagcagtttgctaccgctgtgacattctccgcgagtagcggctccggtgatatttccctgttcgtctacgatagggaacatttcctggttattatcgcttggcatagtgtcttttatattgggtgaaatcttacggagaggagaatatcttatggtattaataaagaagaatctccataacttaggaatcggaaatcatgcgccagtgcataatcataaattgtgtgccaattcccttttacaaaagctgaaaccaaaagcagcaaggtactttgcggctgatggaaattagtaaccatcgcttttactattttataattgtatcccggtgctatgataatctgtgtactggtgtgaagggtttccaaaccattcctgtcgagatatcctaatatcttttgcaacgcaacaacgggaggaatctggtcgtacttttcataaggctgccattgtttgacacgtagttcttcttccgtagcatacggattttcagccaatgtaactccaatgtgatacaggctttccagagtccgtacagaagtagtccctactgcaatagcacaaccgtcatggtcaatcagttttttgatggtactccggttgaccgatatatattccgtgtgcatttcgtgaccttcgatttcttcactttttacaggtttgaatgtgcctgctcctacatgtagagttaattcttcaagatcaatccctttttcttgaagtgcatccaatactcgtggagtaaaatgtaatcccgccgtaggcgcagctaccgaacctttaatcttagaataaacagtttgataagtctccttgtcactttcttccgtatcccggtttaagtaaggaggaataggaagttctccgaatacttcaaggatatcggcaaacgtcacttccggattatcccatgcaaaatctacccaatggctggttcctttgcattctcctcgggtagcggtcagagtaatagggaatcctttgacggtcatttcgcgtttcaactgtctgtctttccatttcttcagattgccgatcatgcaaagccaggcggcatgtgctgtctgttggaaatttaagacataatcgtttggctggatcggttcaagacaaaacacttcgatcagtgctcccgtctcttttcgaaaatggaggcgtgcctgaatgacttttgtattattgaatatcatcagactgccttgcggcagatattccggcaaagaagtgaaaacatcttcactaacttctccacgacggtatattaagagtttggactggtcgcgggtaggcaacgggaatttagcaatacgttcatccggaagaggataactgtattcactgatatggatatgtctaggatcttctttcattgttttctaaaataaaaagaggttagaacccattcggtttctaacctctttaaccagtcggggtgactggattcgaaccagcgaccacacgccccccagacgcgtactctaaccgggctgagctacaccccgaattgcggatgcaaaagtacagattaatttttaattagcaaataatccgttgatttttctagtatgaattgtgccgatttatagctattattctgattattagtctttcttgtgaacatacaaatctttatttcaatgagttagtagtttttttgattgcctcttatgtgatataaaagtacatttctttaattttgcttgaattagaaaacaatctgcttatttttcatttgaaagcattaatccttttcttgtcctaaaaacactataaaaaccaggtcagtctataataaaacgaaataggaaaatgataaatgaactaacaatcagagagtttgtttataaattaatgtaaataaaaggtgtttgacttccttagtatgatactatatttccatttttggtgcgtggtaaattaggaagttatacatttgtaaaaagacttagtttagaaaggtgttaaatgttagacattaaaaatagagagacattagagatatacgtcctgggtgacgattttaaattttatcaaaatctgaagtatcttcctttgacttcttatccttctaataatcaatcagctttgattatatattgtttaggtggaaaggccaaaattacagtgcatgaagatgtacattggatacaaccggaggaattgattatattattacccggacaatttgtctcatttagtgagccaagtgaagatttctcgaccgttacgatggttatatctacttcactgtttagtgatgcgttaagtggtgtgcccagattttctccgcatttctttttctatatgcggactcattactggtatccgcagacggaacgcgatattccccggatgtataattatctgggtatgataaaagataaagttacctctcaagatatatataggcgtgagctgattattcatttgttgaggtatctgtatctggaactgttcaatgcttatcaaaaggaatcgaccttgatgactgcccgcagggatacccgtaaagaagagttggctaataaattctttgggcttatcatgaagcattttaaggagaataaggatgtggctttttatgcggataaactgtgtattacttccaaatacctgactatggtaattaaggagacaagcgggaagtctgctaaagactggattgttgaatacatcatattagaaatcaaggctttgttgaaaaacacaagcctgaacattcaggaaatagcgattaaaacgaactttgcgaatcaatcgtcgcttggacgtttttttagaaagcatacaggaatgtcgctttcacaatatcgaatgagtaacttagaacaatagtgcggacaattgcctcacaataggcaataatatctatagggattgggaagagaaagggaatgaagtctatttcattcccttttactatgtggtatatctgatgtaggatggattaaattcccatacattcgcgatagaagtcgagcatttcgaagatagtgtccttatcggcagtctgattgatgcaaatgtctccaatatcttttagtaaggtgaaattgatagtacctgaagtattctttttatcatgcgtcataaatgcatacagttggtcatatttcttgcagtcgaaagtaaatacaccataattatccttgataaactggatcgtttgccgcattttctctttcgggaaacctactttgagatgagaaagatacagttcgcacacaattccccaagctactgcatatccatgtaatacaggacggttttctgccagtgccatactttcgaacgcatgtcctacggtgtgtcccagatttaatgctttgcggattccatgttcgaagggatcctgttctacaatatcttctttcacttgtaccgattgacctaccaattgtttgagagctgcataatcaatactagaggaatcgaaattgagcaattctgcccaatgtgccgtattgctaatcaaaccgtgcttcaacatttcagcatatccggagaagaaattgtgtgtgtccaatgtgcgtaggaattcagtttcaatcaatacactgtttgccggagcgaaagcaccgatttcatttttcagtccgttgaagttgattcctgttttaccccccactgatgcgtccaccatagcgagcagagtagttggtatattgatataggaaatgccccgtttgaatgtagctgcggcaaaacctccgagatctgtcaccatccctcctccaagattgataagtaaagagtggcgggtagccccttgagtacttaatgccatccagacggaagcgagtgtttccagagttttatgcacatcttctgctccgatacagatttctacagcatcttttaacagatccgattcctttagagaagggagacaaagacgctgggtatgctcgtctgtgaggacgaataatttgtcatgcggacatagctcaatggcacgaccgaggctcgtttccaagctttcgcagagaataacttcttgtttactcatgattcttttgcttttttactctgcaaatgtatataaaatatctttttttacttacttttgtctcattaaaacgtttaatcatgaaagcattattacctgtatattgtcgtcctttaggatatgttgtcttgttggtagctctgttcatcccttttattttggtgatgcagggagtagtaactgatactaacttgctgttttataaagaatgtacaaagttgttgatgatggcaggatgcttgttaataatctttgcattgagtaagaatgaaagccgtgaaacggagcaaatccggaattcggctgttcgtaatgctatctttttgacattcttgttcgtctttggtggtatgttgtggcgtgttatgcaaggagatgtgataaacgtcgatacttcctctttccttacttttctggtttttaatgtgctttgtctggagtttggtctgaaaaaagcgcttgttgatcgattctttaaaagataattttcttttcaattaaaccttttacgattcgatttgtcaaaaagacattgttattgctactaatataatcgtaaataaggtaaatgaaaagattttcagcagggttggtgctgatgttgctatgcaccttctcaatttttgcacagaataaggttattaccgtttcgggacgtgtggtggaatccgatactaaagagcccgcagcgcaggctacagttcaattgctatcattacctgatagtgcttatgccgccggtatagccagtagtaaccaaggatggtttactctccccaaagtaaaagccggaaaatatgtgttgaaagtttcctatattggattccgaaccaagctcgtaccggtacaattatctgctaacgccactgataaaaaattgggaaccattacattggatccggatgctgtcatgctgaaggaagcggtgattactgccgaagctcctcctgttactgtaaaagctgatacgacagagtattctgcagcagcttatcctgtaccagaaggttcaatgttggaagagttagtaaagaagat

SEQ ID NO: 8120 - DNA, 8433 bp, Unknown
  gut microbiota DNA sequence
cagagaacgcagaggacacagagattattatctaataataaaagactctgtgtcctctgcgttctctgtggtgaataaaaattagtggccattgaagaagatgtaaagcccaatcatggtcacaataagtaatccccataggataagaacaattcgtgcaggtttgtcctctatcttttccatattcaagatgcccaattgcggagacttatcccacaggctgactactatcatgcctattccgatgataacgaataagtagaaggaaagcagcataaaatgaggccatgcatcatattgttctgccggaaacacccataaatacaagattcccactccgatgctgaacactgttcccaatgtcagagccatattagctgccagagtagtggtgcgtttccagaacacgccaaagaggaatacggctgccattggaggagctataaatcccagtacagactggaaaacattaaatagattcagtcctttgatgctgtcgatcgctatggttattatcacagagatcagtgcaccaactaccgtaaccacttgtcccactctgataatctctctctgtttggcctgcggtcggattttcttcacatagatatccatcgtgaataccgtacttaatgcattcaatgcagaaccgacagtacttaccaatgctgctgtcaatacagccaataccaagccgaccattcctgtcgggaacagatgagtcaccattgtcatgtaagcctcatcgggattctccaattgtgggaataaagcgaggcagataatgccgggaagaatgtaaagaggtacatctaatattttcaaccatccggtaaagttggttcccatctgtccttctttgagattcctggcagcaagaaccggttgcaccatcgactgatccgtacaccaaaaccaaactcccataataggataacccagaataataggtagccaaggaaaagccgggtcatcatttggatggaaaagattccagtaatccgctggaacggcatccaccagtgcgcctacaccgcccactttatagattcccatgatagccagtgtggctgatactacaatcaacagtatcatttgatatacattcgtgtaggccacagctttcagtccgccgagcatcgtgaagaaagcggagatgacaagtaacagcaatgccgattgccacataggaatatcgaagacctgacggatcaggaatccaccggcaaataaagtcaatgcaagccatgaaataagaatggtaataatggtataccaggcaaggatgttacgggtagattgtccgaaacgttttcccataaattcgggcaatgtcgtgatgcgactacccaaatatcggggagcaaagacaaaagcaagcagacatataaagacaaatgcataccaggcataattccccgaaacaataccagtagtaaatccggcacttgcggaagctatcaacatggaaggtccgacattcgtcccccacatggagaagccgatatgataccatctcaacgaattctccgcaaggaaaagactactccccttttttcgtttagaacttgcccatataccaatagctatcaaaataaggaagtaggcaatcagaatactccaatctaatgtctctaagaatttcacatgcataattcaagtattaaataagtaacgtaagtttaaatctaattttctttaggcaaagattacatggatttcacggttttaataggctatgtaattaaaagccgtgtttatccgtgtaatccgtgcctttttattctattttttatttccaatcagttctttggcaactgctacggctgtattcgcattatcactatatccgtccgcaccgatttcgtcagcaaacccctgactgacgggtgctccgccaatcatcactttcacttgattacgaataccggcctcttccaatgcctggataacctctttcatatacgtcatggtagtagtcagcaatgcgctcatgcacaagatgtcagcatggttttccttcacagcttccacaaacttgtcacaagtcacatcaataccaatattaatgactgcaaagccgcaaccctccagcatggaagccaccaggtttttaccaatatcatggagatctcctttcactgtaccgatgacaatcttacctattgtagtggaagcacttcctgccaataaaggtttcagtagctccaaagcccctttcatggcacgtcctgccatcaacagttgaggaacaaaagcttttccatcctggaaacgttgtcccacttcgcccattgctttaatcatataattattgataatcatttgaggagctactccttccgcaatggcttgccgggtgatttcaaccgcaggttccagtttcccggcaacaatggcttcatacagaggtttcagtttatcctcttcccgatgttgttcttcccgtatacaaatacgttcctgtccggtagctgccaagtcggcatcctgttgatgcttattggtatttacagcggtagaagaaccggtatattcttcgacaatccgcatggcctgttccacttccttttcgttatggaaatccatttccaaatgtacaccgtccgcgccgatatgatccaatagaggttttagttcgtctaatgtcacccagcaagccattacgctctttccgcctgccagaatcttcttatacagatcgtaccatttgggagatcctccttgtggttcgcccactccgggagtccattgaatcgcattcaattcttcaatttcaagcaaggcaggcaggtgatgcatagctcccactccatccagatgataaagggtataatcaatcttctgacattgttcacgaataaaaggttgcacaaaccggcgataatcatcctgactaatcatggtcgaaatatcactttgcagtttactcatctttccgggagcccaggacgagaaataacagaatgccatctcgtcgccttcacggatgatgtcgtatagttcatcaaatactttgaagtagatgtcgttgatttgctgcatctgttgttccaagatttcgggctgcatcactgtgtccagtaataccctatccgttcctttcagtgcggccagaacatccagtccttccatcaggtcgggcataccgacaaagtagtgtccgttggctttcgctttgcaggctttcaggagttctttatgaagaatccagttcgggtgttcggggttaaagactatttcatcggtgaaatccgggttgggatgaatccaaatggtgtcttccccgccttcaaacactccgcctaaaatggcagctagagaaccgggacccagttgggtattcgcaaccggaagaatatccgctttcagactgctgtgcgctacgtaccagtccagatattcagccctccattgagggtcgaaccatttttgcgacaaatcttttgccggtgcgggaggcattatctctgcatgtggttgcactccttcctggaagtgctcccacatattgagaatgattcctttatggttccaccaatttatataacgttgttttgtttcttctaaattactcttccatgttttcatactctgccattttttatttattctactcaagtttcggaagtaatttattaggttgaaagcctcttggtatatagcgtaaggtatcactctgcgctatattatgtaagcctttcaggctacttacaaaacttgagttatttctatttatctattccaaaatcctttataatcattatctatacgtagagctatgcttttgcttaaatccatttcatccgtacagtccacgtcttccggatagatggggatcacggcattttcacgcacatatacgggcatttcttccaatggaacgtatacgtctttcagccagcatgctccttccagacgttctcccgtaaagaagttcacccattttccttcgggaagatagatatcccgacagttctcgctgttcatcaccggagctaccaggaaatcattgccgaaatagtattcatcatctatatgccaacaaagtttatcttccggatgatgcagaatgagtgcctgcaagagcggatagccgctttctatggctagtttactttgttctacgatgtatggaatgagcgaataacgcaatttccaccactttttcaccaacggagctatggccggatagtgccagggttcacgcttattggttccgtgataacggatatgcgatgtgaatacgccgaattgagtccagcgcatgtacacatcatctgctactaccgagttcataaaattgggcaatgtatggaagccgggaacatcatggctccaaaaagcaaatcccgacagaccgaaatgcagaccgcctttcagagaacctgccattccatcccaagagctacaggaatcgcctccccaatgcaaaggataacgctggcatcccgcccatgcggaacgtgcccagacaataccgtcacctgtcacttctttcgtaatttcgtaagcggccttttgataaagcagggcatacaggttgttcaacaattccggcttcatacctttatagagggcgtccatgtgaatgttttcaccgaaatcggttttgatacaggttactcccatatccaggagttgtttcaatagtcctttgtaccattcggttgctttcggataagtaaagtcgattgttccggcataatccagggcggagaagttggaaccatcggtcgcttgttgtttggtcaatggggctatataatcattggctctggcttcatcaatctgctctgcattttccgcaacgtatggaagttgccataaagagacacgatagccgttctttttcaaccgcccgatgaatcctttcggatcggggaaccgttcttcattgaatttccattcgcagagccaatcggtacggaaccagcccgtatccagatgaattacatcacagggatagtgttcggcacgcatgcggtcgcatatttcgtctacttcatcggcactgaaataagtcatacggctcatccaaacgccaaaactccaaaaaggaggcatagacggatagccggtcaggtcacgataaccgcgaagaatatcttccatcgtatcaccgcctattacaaatacatccagcaatgcctggtcgcttagaaactgtacggaacgggtggaatgtccggccagcgagagcttgctatgagcacatgtatggtagaatgttccatacatgcggctggatagatagaaggggatattcttataagtacgccggttattgactccttgcccgtcctggtttttcaggaagaaagtctgtccgcttaagtccattttaaagaaacgttctccggttccggcaaaacattcatcaggcttacattcaaaagaaagcgttgcacgttctttccgaccgtcgcgtttgcaaaaagcaacaggtaacgcatcgtagcggggaggcgaaaaatggtcgtaggctgacaagcggatttcacgctttccgtcagggtataaagtgatatcaagcgtttcttgagggtcgggaagcaattcgctccatcggtctaatagaggctcttccacattgataacggcacgcttcgttccgtcttccgtcgaaagaatccattttcctttttgttcttttataaacaggggcactttctgaatccggtcactgaattgcagcatttccgactcatctgtcagtacataatcgccgaagccaagaaacagacgggtgatgccgatgttatactgacggatgattaacgtatattcctcctggggaacatcggtatccgccatcatatcgttagccagcttttgcttctgaaagggaactgttacgtaaatatctccttccttttcataaacagccgttggcttgtatgctttccaaagtgactcattccttgataactcggtatcgaaatcaaggaaatcaaataaatggtagttcgttggtttcatctattttattgattaaatatcgtttattgattactataattatcatattagttggaataattatcatactagtctagttctaatgattattacactagtttattgattgctatactagtacattgatgactatgttaatccattgatttgtttcaatcttgctttattcttccagctttgtatttaatactgtccgccacttgaggcccgttattcttccacacgttctttttcccggggcggttcgaatcaaaacgttcagtgggacaccagttgttttccattgtatatccgtccgtagcttcatccagatagatataaaaagcccggtcattcgtagcgtagggtgcctcgattaaatgttcgatccggttatttcgcatgacggaacccggctggttggaaagagtatacaggccgcctgcatcgtatagccgccgggcaaagtgatgtacatagtttgcttctatccggttgttgcacattccgctctccagcgatgtccatccccagcctacacaaatccctgaatagttcagatggcagacttcattatgagaaatatccatgtttctgacatatccggcgccgatacctacacatccccagtcttcattagtcacattactaatgaaattgtttctgatagtaatatgggaacataattcccgtacgtcagcaggaataaaagggacgtgcgtctcaaatcctccgtccggaaatgcaccgaccagtaaagccgttcctccaatatccgtaaattgacaatcttcgacgctcgatgcagtaacggcccattcataatccagtccggtggacgataaatgacggaacgtgcaatgcttgaaatcaatatgctcggcacctcttacacatattgccgtttcgggacgggtgatccaggcttgattttccagttctgctttttccggaagccccggttcttgtagtttataggcatccaataaaggaaatcccccttgcagagtgacgtgtccctgataagaaggacgcatccaggaggtatgctcaaaagtaattccgttaaattgtatatgttttaccggacgagacaatgtaccgtctatggtcactaaagtttccaaggcagggataatcacttcagctgtttccatattttcgcccgcctgcggataatagtaaatcgtgccggaaggatattcctggaaccattcaccgggttggtccagcaattccagtgcattggtcaagcagaaagaagaatttcctttctctcctccgatgacgggttgcggccagggatgcgcaaactccaggtaactttcgggttcatggaagcgaactacagcttgtccgtctttcgcgtctatacttttcacgcgcaaaatagcaatcgcccagcgttgatggacaatcatttccagttggccggcattttgtagtcttttcggatttacactttgagaaacggggatcgttattgtctgctcttccggattgaagtcaatcattcgttccaatcctccgtcaggaaattgcgcagctctttgaactttatgaccgttcacccacatttgccgggtttctactcttctatttcctattaggggagcctctgccgaccatatcttctgccttagcttttcaggaattgccggatgattacatccacgcttccaccccgtaacagcaactccaccactaattacagggtgagcaccatctactgcacaaatcactgttggagaatcgggtgtcccactatcttctggacgaagaaatagagaattgcgctgggcataaacaccctcttccaaacgaatataaattcctccggctatttccggccgattcagtctacgccattcacgagcctgcttgattgcccggtttaatgtataaaacggagcttcctttgtcccggaattcttatcattcccctgcagggatacataaatttctcccgcaaaaagcgagggaaaccaccccaagaaaatgataaaagaaagataaataaaagtctttttcatggtactacctcaatgtgctacttcaataaagacgaacacacatcgatttagtactctatgtaaaggcaatagataggttattcttacgaatgttttacaacatcaaataggttaccgaataagacctatgataaattgatagcaaaaataaccgcagacaacgaacttcagtaaagttccgaatataaatccgagtaaagagcccacacctgatttaagtgcctgcgagaactctttatttcctaatagttcaccaatcaccgcccctagaaacggaccgagaataatgccccaaggcaagaaaagaagaccgacaagagttcctatgatacatccccaattcccccatttactaccgccactatatttacttcccagcatcggagtgaaataatccaatacctgcaaaacagctacaatcaataaccatacgattaat

SEQ ID NO: 8121 - DNA, 22355 bp, Unknown
  gut microbiota DNA sequence
cagtctgattgaaaagtttgttgagcgcaatgaccccagagcaccacaagcatttctggagcccgatcccaccggctatattgcttatggatacggaggtacgcaagctacagacatcgcaggtatcaaagcggctcctaacggaactccgcaagagttgcagaacaattatggtatgtcaatgatatcatgggcaatgtcggctcctactcttttaatcagttatcacgaagtgaaattcctcgaagcagaagcattatgccgtttgggaggcagactgagtgaagctaagaatgctttaaaagctgcaatcactgccggattcgagaatctggaaaactcaattatagatgccgccgacacttgggtatatgatggtgacagcgatttgggggcagatgtagcagaaacctatttcacggatgaagtagaaccgttattcgatgccaaccctctgcaagagacaatgatacagaagtatctcgccttcttcggtgcatccggcgaatcactggaagcctataacgactaccgtcgtttgaaaggtgcaggagaaaacttcattgtactgaagaacccgctgaacaacaataagttcccattgcgcttcggttatggagcagacgacgtattggcaaatcctgaagtgaaagctgctttcggtgatggccagtatgtatatagcgaagctgtctggtgggccggcggaaacaaataatgaacttaaaatctctcaaaggagagactttacatagagtcgtttctgtactctaacaaattaacagaggcgaacaaaaataggccaaccgtgaggttcgcctattttattttatccaatttcatcagatgaatgctcaaataataatagagaaaaaggaatattcaacggcatcttttatataccatttttctacccgatcatactctttttctactttattccgtatttaccgtttaagcaccttttaaataaatttaaaaaattcccgtaccaatcaatttcaccactgcaaatcgggtagatatttgcttaaagtagtgcggagaatactcaaagtaataggtttcaccaacacttcagttgctcctgcattcattgcgttttccttatccgagctgaaagcataagctgtctgcatgataataggaatttcggtattagactcacgaattatcttcgttgcctccaacccgttcatcaccggcatcttgatatccatcagcattgctttggttctttcctgatgctgttgaaacaactccaccatttcctggccatttttagcccactcgatatcacactttttgcctatgatagccttgattaatttaaagttgctgtcatcgtcttcagctactaaaattaagggtctgaattcattcatttgttcgctttccatatcgcttatatattgtttttttatctgttttttgagattaatctcccttttcagcccgcaagttataaaaaagattcatatatttcgctatctttgcgcctcaatttaaaagaatagtatgatttctgttgacggactagccgtagagtttggcggcactactttatttagtgatatttctttcgtaattaatgaaaaagaccgcatcgcactgatgggtaaaaatggggcgggaaaaagtacgctgctgaaaattttggcaggcacacgacaaccgacacgtggaaaagtttccgcgcccaaagattgcgtagtagcctatctgcctcaacatctgatgacggaagacggaagaacagtgtttgacgaaacggcacaagctttttcacatctacatgaaatggaagcgcagattgaaaaactgaacaaagagctcgagacacggacggactacgagagcgacagttacatggcgctgattgaagaagtgtctgccttgagcgagaagttttattcgattgacgcaactaattatgaagaggatgtggaaaaggcattgctcggattagggttcacccggagcgattttcaacgccagacgagtgatttcagcggtggatggcggatgcgcatcgagctcgctaagttgctgttgcagaaaccggacgtactcttgctcgatgagccgacgaatcatctggatattgaatctattcaatggttggaagatttccttattaataacgggaaagcagttatcgtaatcagccacgaccgcaaattcgtggataatattacaacacgcaccatcgaagtgacgatgggacgtatttatgattataaggtgaactattcccaatatctgcaactgcgtaaggatcgccgcgaacagcagcagaaggcatacgacgagcagcagaagtttattgctgaaacgaaggagttcatcgaacgattcaaaggaacatattcaaagacgttgcaggtacagagccgcgtcaaaatgctggaaaagctggaattgctcgaagtcgatgaggaggatacttctgcattgcgactgaaattcccgccttcaccccgttcgggcagttatccggttatcatggagggtgttggaaaggcatacggagagaaagtggtgttccgcaacgccaatctgacgattgagcgtggtgataaagtagcttttgtcggtaaaaacggtgaaggtaaatctacactcgtgaaatgtatcatgaaggaaatcgaacatgacggtacactgactctaggacataatgtacaaatcggatatttcgctcaaaatcaggcttcgttgatggatgaaaacctgacagttttccaaacgattgatgatgtagccaagggggatatccggaacaagattcgtgatttactgggtgccttcatgtttggtggtcccgaggaatcaatgaagaaggtgaaagtactttcgggtggggagcgtacccgccttgccatgattaaattgctgttggaacctgtcaacctcctgatcctggatgagccgacgaatcatctggacatgaaaacgaaagatatcctgaaacaggcattgctggattttgacggcacgctgattgttgtttcacacgaccgtgacttcctcgacggactggtgaccaaggtatatgagttcggtaatcaaaaggtgacggaacatctttgcggcatctacgagttcctcgaaaagaaaaaaatggattcgttgcaagaactggaaaagaaataataaataataaaaagagggtatcggctgcaggcggaataaaagtatttgtatatttgcaacatcatttataacaggcagttagaaaaaaatggatgaaacaaggcagttatacattataagcggatgtaacggagctggtaaaacaacagcttcctacactgtactgcctgaaattttattatgcaaagagttcgttaatgcggatgaaatcgccaaaggtttatcaccgttcaatccggaaagtatggctatagaagccggccgtctgatgttgaaacgtattaatgaactattagctgctaaagtaagtttctctattgaaacaacattggcaacccgttcatacacccggctcattcaaagagcacaaaatgccggatataaagtcagcttgatttatttctggctgaattctccggaacttgccgtcaaccgtgtgttacaacgggtcaatgaagggggacataatgtaccgatggacgttatctaccgccgatatcaggcaggcattaacaatctgtttcagatttatatgccgcgtgtagactattggctgttagccgataacagtatttctcctcgagtaattgtagccgaaggttaccaacatggcgaggatcgaatatatgaacttgaactttttaaatgcatcaagaattatgtcaaataatgaaatgcaagaattgagcgataaattacgacgcggtcttcagctggcagaaaagcgattgctggaaaaaaatgctcgcaatggtaaactccttagtcagggaacaccagatggaaaagtaatttatgtatcagcaacagaattgctggaacgtttgcaagaaaaagaaaaggaatcaataaaaaaataaattctctaaaagaaaggatgaaagggaagaaacgaataatagtaactctgctgtttttaatcaacatcataatgttggtggcagccgttattccccatcaccatcaccccaacggaatgatttgcatgaagcaggacttgcctgtagaacaacaatgtcccacgcatcatcatcacccgggaaacgattcatgttgcagcagcgaatgtatgactcgtttctactctcccactccatccgtacatacggatagcggaccggattatgtattcatcgctaccctgttcacggatgtaatcatcgaacatctattacggccacaagagagacggattaagaactattacgtctaccgagactctctgcatggcacggatatacaccgtgccactcctcttcgtgcccctccctactctgtttttgcgtaaaagcgtaaatgcaaatcagttgcatttgcgttaccttatctttgtagcgtaaaaaacagtaaaatttagtaggaaaatatcattatgaaaaaacttattttcgtaggaatcctaggcttattcgtgctgggttcctgtaataatagtaccgtcacacacacacacaatgaacacgatcatgccacagaaggacataatcacgaggcagagggttccgatcattctcatgaaggcgaatgtagcggagaacacaaccatgaagcgaccgatggacataacgagtctgccgaagcgcacagtgatgaaatcatccttccgaaggcaaaagctgaagcagccggtgtcaaggtgagcgttatcgaacctgcacctttccagcaagtgattaaaaccagcggacaggtactggctgcccaaggtgatgaatcggttgccgtagctacagtggccggcgttgtatctttccgtggaaaagtaacggaaggaatgagcgtcggcagcggcacgccgctagtcacgatttcttcaaagaatatcgccgacggtgatccggtacaacgtgcccgcattgcctacgaggtatctaagaaggagtacgaacgtatgaaagagcttgttaaaaacaagattgtatctgacaaggattttgcacaggcagaacaaagttatgaaaatgcccgccttagttacgaagccctttccaagaatcattcggctatcggccaaagtattacagctcctattgcaggatatgtgaaaagcattcttgtgaaagaaggcgactacgtgaccatcggacaaccgctggtgagcgtgacgcagaatcgtcgtcttttcctccgtgccgaagtgtcggaaaagtattatccatacctccgtacaatcagttccgccaatttccagactccttataataatcaggtgtacgagctgaaagcattgaacggcaaacttctctcttttggaaaagctgccggagacaactctttttatgtgcctgtcacttttgagttcgacaataaaggggaagtgatccccggctcattcgtagaggtgttcttgctttcttcaacgatggaaaacgttctttctctcccacgcacggcactgacagaggaacaaggtatcttctttatctacctgcaactggacgaagagggttataaaaaacaggaagtaacgataggagccgacaacggtaaaagtgttcagatcctgaccggagtgaaggctggcgaccgtgtagtgaccgaaggtgcttatcaggttcgactggcaagcgcaagcaatgccatcccggcacatagtcacgaacattgattaaatgaagaattagaaatgaagaatgaagaatttggctgcgcaataattggtatatgtttattgcacgtgctgcatagtcattcttaattcttcatttctaattcttaattcttaattcttaattcttaattcttaaagaaatgcttaataaaattatacattactccctacacaaccggttggttgtagtctgcgcggccatcctcctgctaattgcgggaacgtataccgccatgcatacggaagtagacgtatttcccgacctgaacgcacctacggtagtcatcatgacagaggccaacggtatggctgcggaagaagttgaacagctcgtcacttttcctgttgaaactgccgtaaacggagctacgggtgtacgtcgtgtccgctcttcttctaccaacggattttccgttgtctgggtagaatttgattggggaaccgatatttatcttgctcgccagattgttagcgagaagttagcagtagtgagtgaatcactgccggtcaacgttggtaaaccgacactcggcccacaatcttccatcttgggcgaaatgctcatcgtcggtctgactgccgactccacttcgatgctcgatcttcgtacgattgcggactggactatccgtccccgtctattgtctaccggaggagtggcacaggttgccgtactcggaggagatatcaaagaatatcagattcagctggatcccgaacggatgcgtcattacggcatttcgatgggagaagtgatagctgtgacacaggatatgaacctgaacgcaaatggaggtgtgctctacgaatttggaaatgaatatattgtacgcggtgtactttcaacttccaaaacagagcaacttggcaaagcggtagtaaagacagtgaacaacttccctgtcacgctggaagatattgcggacgtaaccatcggaccgaaagccccgaaactgggaactgcttcagagtgtggaaaatctgccgtactgatgactattaccaaacagccggctaccagtacgctggaactgacggataaactggaagcatctttgaaagaccttcaaaagaacctgccaccggacgtaaaagtttcaacggacatattccgtcaaagccgctttatcgaaagttccatcggcaatgtgaagaaatcactctttgaaggaggtatttttgtagtaatcgtactcttcctgttcctggcaaatgtgcgcactacattgatttcattggtaacgctgcctctttccctgcttgtttcgattctgacactacactacatgggactgacaatcaacaccatgagcctcggaggtatggcgatagccatcggatcattggtagacgacgccatcgtcgatgtggaaaacgtgtataaacgactgcgggagaaccgtcagaaagcaaaagcggaaaggttaagtacactcgaggtggtattcaatgcttcgaaagaggtgcggatgcctatacttaattctacgctgattatcgttgtcagctttgtaccgttgttcttccttagcggaatggaaggcagaatgttggttccgctgggcgttgcctttatcgtagcattgttcgcgtcgacagtagttgctctgacgctgactccggtgctctgttcttatctattaggaagcaataagacaaacaaggaactgaaagaagctccccttgcccgttggatgaaaggggtttacgaaaaggcactgacttgggtgctcgcacacaaacgagtgacacttggaagtacaatcgcactctttgtggttgcgctcggagtgttctttaccctcggacgcagcttccttccttcctttaacgaaggttcgttcaccatcaatatcagttctctaccgggtatttcactggaagaaagcaataaaatgggacagcgggcagaagaattattgatgacgattcccgaaatacaaaccgtagcccggaaaacgggacgtgccgaactggacgagcacgcgttaggggtaaacgtttctgaaatagaagctccgtttgaactgaaagatcgttcgcgcagtgaactggtagctgatgtacgtgaaaaattgggtactatcaccggggcaaatatagaaatcggacaaccaatcagccaccgtatcgacgctatgttatcgggtacgaaagcgaatatcgctatcaagctgttcggagacgatctgaataaaatgttctcactcggtaatcaaattaaaggagctatcagtgatattcccggtgttgccgacctgaacgtggagcaacagattgagcgtccgcagctgaaaatacagcctaaacgggaaatgctggctaagttcggtattactctgccggagttctcggaatatgtgaacgtagctttggctggaaaagtgatctcgcaggtttatgagcaaggcaagagtttcgatctgatcgtgaaagtgaaggatgatgcccgggatgaaatagaaaaaatccgcaacttgatggtagacacgaatgacggtcgcaaagttcctttgagccatgtagcagaagtggtatcggccatgggaccaaatacgatcaaccgcgagaatgtaaaacgtaaaattgtgatttctgccaatgtggccgaccgcgatttgcgtagtgttgtaaatgatattcagaaacgcatcgacacatcggtgcaactgcccgaaggctatcacatcgagtatggcggacagtttgaaagtgaacaggctgccagccggacactggcgctgacttcatttatcagcattgtagtaatcttcttgttattgtataatgagttccgcagcgtgaaagagtcgggcgtcatcttgctgaatcttccgctggcactgatcggtggtgtatttgctttggtgattacaacaggagaagtcagtattccggctatcatcggtttcatttccttgttcggtattgcaacgcgtaacggtatgttgctcatcagccactacaatcatctgcaaaaggaagaaggtttgaatgtgtatgatagtgtgatccgaggttctctcgaccgtctgaatccgattttgatgacggcattgtcttctgcactggcactgattccattggcactcggcggcgacctgcccggtaacgaaattcaaagtccgatggcaaaagtgattttaggagggttattaacgtctacttttttgaacggttttatcgttccgattgtttatctgatgatgcatcggaaaaaggcccaggaaagcctgtagcaggtgatgtttttcctcggtgaggaaaccatcgttccccggtgaggaaccaagtgtttctcggtgagaaacgggtcgttcctcggtgccaaacaaatagatgtcttaccataaagtatctatcaacaatagcttgtaataaataaagaaattagaaatgaaacaaatcatgaccataagcgctgcacttcttttcttaaccataggcgaagtgcaagcccaaaacggaattgaacaggtattgaagaatatcgaaacgaacaataaggagttgcaggcaaacgagcaactgattacttcgcagaagctggaagctaaaacggataataacctgcctgatcctactctttcttacgcacatctatggggagcgaaagataaaagcgaaacaatcggcgaactggttgtttcacaaagctttgatttccctagtttatatgctacacgcaacaaattgaatcgtctgaaaaccggagcttttgacagtcagtcggatgttttccgtcaagagaagctgttacaggcgaaagaactttgcctggatattatcatgcttcgtcagcaaaagcatattctggaagaacgcctccgcaatgcggaagaacttgcaaagatgtatgccaagcgtcttcaaacaggagatgcaaatgctctcgaaaccaacaaaatcaatctggaactgttgaatgtcagaacagaagcgtctctgaacgaaacagcactccgcaacaaacagcaggagctgaatacgctgaatggtaatattccggtagttttcgaggaaaaccaatatccggctatacctttccctactgattatcaaatattgaagtcggaagtcatggcaacggaccgtactcttatggcactcggcaacgaaagtcttgttgcccgtaaacagattgctgtcaataaatcacaatggctacccaaactggaactcggctaccgccggaacacagaaacaggcgtacctttcaacggtgtagtggtaggtttctctttcccacttttcgaaaaccggaataaggtaaaaatcgctaaagcacaggctcttaacattgacttgcaaaaggataatgctaccctgcaagtagagtccgaattggcacagctttaccgggaagcgaaaacactgcacgcttcgatggaagaatacagcaagactttccagtcgcaacaagatctgtcactgctgaaacaagctttgacaggtggacaaattagtatgattgaatatttcgttgaagtttctgtcatctatcaaagccatcaaaattatctgcaactggaaaatcagtaccagaaagcaatggcacggatttacaagagtaagctgtaaatagtacataaaatcctttagacatggattacgccgaacatattaatttctattttaagtgatgtaagtatgtttatataataatttcaggcacggattacacggatttcacggattacgctgttactttatgacaatcatatttctaaaagccgtgaaatccgtgtaacccgtgcctgaatatatctcccctctccctctcattttcttcaagttccaactaaatatttcaaaataatatgttacatttgcaacgaacataaaatacagattatgagacctaaacaattctatctattcatgttatgttgcatccttacactattcagtggatgtaaagaggatgaagaaaatccacttcgtttttacaacagtgaatatgaagtgcccatgggtggcagacgttaccttggactggaaagcggaaatggtgattactcacttgaagttaaagacacacgcatcgcaagcgcaggaaccgaaaccggctggaccggagtacctgccggacgtatgatttatgttaccggtattctcaccgggcaaacttatctgacagtaacggacaacgccacacaagaaacctgcaccctgccaatcaaggttgtcgacaattacgaggatataaagttgctccgcagctacttgtctaacttacccaacggagacgcaaatcttctgcccggcatttccgacatttttctaattaacaatcacgcacgggatgcttattttttcaaacagggagaacaaacagctttttcatccggactaaccttaataactcgaggaagttacaaactggaaaaagaagaaggaaataatgagaaagctatactgactctcaccttttcggaagatgtggcaacacctatttccaatcataaattcatcttgtggggaaacgcatacgtatttcaccgcttggataaaagcttgaatctgaattggaatactccacccatcggagaaacgcggacatcacctgcaccacctccttcctacacgctggaagaaatcgctggaggtgaaccaggcacaggcaaacaaattagttttaccctttccgaacaggaaatacctgccggaatactgccttaatcagcagggtcttctttaatcaactgtactttccgataatatgcgtatattttccggcaagtatccgctacgaatacgccattcttgcggataaagattattggcacgattaccgatgtttttcacaaatccgagaggaatatgccggtacgtaagcaaaacatatccacgaggggctgttaccggcaaggtaatggcctcttttcgtaaataagtgatagcctgtttataacttatttcttccgtagcgaaagcttcccggcataaaagtgaactacacatcgccaatgcatggtcaggtatcaaatcctttcctttcacttctcctatctccactcctgccgatacgattttcaggcattgtttcattgccattaattcatcagcataatgctttgaaaaagcccggatacttgttccttctgccgacaatatatacttgtccgaattttcatcattcagccagctttttgcaatattcagctgttctttcgaaacaggagaagatgctgctcctcctttcttatctttctttttagaagtcttctccttcgagaaagaagatatcggaatctcgtttcctgtctccggcttccgaaaagctgccaggaaaaagccttcgcctttcgtcttatgagggaaaaaatgatagacaggaatagaagatttagaaccatcacaattatccggtaaaagatctcctgttatattccagttttcctgtatctgcacagttaacggttcggctccatactcttgttgaatccaacgtgcattctcttcgtcctcttttgtattaaatgtacacgtactatatataagaattcccccaggcttcaacgtatcccaaatatcaccaataatccgccgttgccgctgccaacagatttctacattctcgggactccactcttctacagcgacagggtctttacggaacataccttcaccggagcaagggacatctgtaagaatcacgtcaaagaaagacggcaaagccgcaaaatctgccggatcattattggttactaccacatccggatgtccccacttcgttaaattctccgcaagaatctgcgaacgattccggatgacttcattagccaccagtaaactaccttcaggaagcacactacgggcatgagtagactttccaccgggagccgcacaaagatccagcatctttaccggtccagtgacatactgccggagcacctgttccacaaacatagaagaagcctcctgaacataataacaacctgcatgaaacaatggatcaaacgtgaaagtgagacgctcatccaaataaaagccttcggaagaccaagggacttgatttaattctaaattaaaagttgaaagttgaaaatcagtaatacagcctgcttgcggtacaattctgcattttccattttcaatttttaatttcccatcattcaaccggatgctgacaggtggttcttgtcggatggcaacagctaatttgtcgtattcttcatcgcccagcagggaacgggtatagtctataaaagaagcgggtaattccatttttcgttattaatttccgcaaatatcaaaaatatttcgtctctttgcaactttctatgatattaactacgtctaacagacaaagaaataaataaaaaaactattgatatgaaaaattttctattagcattgatggttgtactgaccacttgcacactggctattgcccaaaaccaaactactgttgtccgcgattccgtcggaaaagtaaaggtaactgtgaccaaagacaataaagcaaaaacaaacaatactgctgtcacagtcatcggtgtagatacagcggacactgattccacagaagtagatgcaaactcaagtaatgtcagtactggtcatggtaaggccagttttacattcgaatcggatgacgatgatttcccattccacggctttggtatcaacggaggaattctcgtagcaatcatatcgatcattgccgttttcggatttccggtattcattctgtttgtaatcttcttcttccgttataaaaatcggaaagcacgctatcgtcttgccgaacaggcactcgctgcaggtcagccattgccagcagaatttattcgtgaaaacaaaacggttgactcacgttcacaaggcatcaagaacacctttacaggtatcggtcttttcatcttcctttgggcaatcaccggtgaattcggaattggagcgatcggtttactcgttacatttatgggtatcggacaatggatcatcggtagtaaacaacaggctcaaggtacagatgctccccggacgtatactacccataaagatgaaaaaaagaatcaggataacgtcaaaaacgatagcttcgaaatcatcccttccgaatccggagagaaagataatggagtaaacgaagcaaagaacgacgagaataaatgagccaactcaatgatatatcgttagtcgcgcaggtcgtggtgttcaagaacaccagggccttcgaccagttggtggagaagtatcagtcgcccatccggcgattcttcctgaacctgacttgcggcgacagcgaattgagtgacgaccttgcacaagatacatttatcaaagcatatacaaacattgcctctttccgaaacttgtcaagtttctctacgtggctgtaccgtattgcttataatgttttttatgattatattcgcagccggaaagagacagccgacttggatacaaaagaaatagacgccatcaacagtaccgaacaagagaatgtaggacagaaaatggatgtttatcagtcactcaaaatgctgaaggaagtggaaagaacctgcattatgttgttctatatggaggacattagtatcgacaaaatagcaggtattgtaggagtaccgtcaggaacggtgaaaagccacctgtcacgtggaaaagaaaaattagcaacgtatttaaaacaaaacggttatgacagaaatagacaatgataagctcttgcgcgatttcttcgcagaaaacaagcaggaaatagcagacaacggattcagtcgccgtgtcatgcaccatttacccggtcgtagcaaccacctggctcgtatctggagtgccttcgtaatgactgtggctgccgtactttttgtatggttaggcggattggaagcagcttggggaacaataagagaagtatttatcagtatgattaatcatggtactaccggccttgatccaaagtcaattattatcgcggctgtcgtattattatttatggctacacgaaaggttgcttctatggcataaacaaaataaatacagattaaaagtccaaagcataagtttcccggatttttatctttatgagtcaaagaactctttatccctctcttttagtgttaaacaataataaatctaccctttactccaagtaagcccaaacatagatgttgtatatttgttgctctgtaaactaaaatagagagaagagttttgaaactacgtatatttattttatttctattcctgcctttattacatgttcaggcagatgtcatcgacagtctgatgacgcagcccagagactcaatcggactaacaagcgattccctagtactgcatttcttggaagagtcgggaatccctatatctgataataataaagtcaaactgctaaaaagcggacgggagaagtttatcgatttatttgaagccatccgggaagctaaacaccatgttcatctggaatatttcaacttccgaaatgactccattgccaatgctttgttcactttattagccgaaaaagtgaaagaaggtgttgaagtacgagctatgtttgacgctttcggaaactggtcgaacaacaagccccttaaaaagaaacacctcaagaaaatacgtgaacaaggaatcgaaatcgtcaagtttgacccgttcaccttcccttatatcaatcacgccgcccaccgcgaccatcgcaaaattgctgttatcgacggaaaagtggcatatacaggcggaatgaatatcgccgattattatatcaacggactacccaaaatcggaacctggcgtgatatgcacatgcgtattgaaggggatgcagtcaatgatttgcaggagattttcctgacgatctggaacaaagagactaaacagaacgtaggaggagaagcttatttcccccaacatgagggacagacagacagcacaaatatcgttgtagcaattgtagaccgtaccccgaaaaagaatagccgtatgttgagtcatgcctatgccatgagcatttattcggcacaaaagaatgttcatatcgtcaatccttattttgtaccgacttcttccatcaaaaaggcgttgaaccggacaatcgaccggggagtagatgtaaccatcatggtttcctctgcttccgatatcccttttactccggatgccgcactttataagttacataaactgatgaaaaggggagctactgtctacatgtacaacgggggattccatcactcgaaaattatgatggtggacgacttgttctgcacagtcggtaccgccaacctgaacagccgcagcctacgatatgactacgaaacaaatgcctttatttttgataaaagaataacgggtgaattgaataatatgttccgaaacgatatcgagcattgcacccagctgacaccggagttttggaaaaagcgttctccctggaagaagttcgtcggctggtttgctaatttattcactccatttttgtaattttgtacggagaatcattttcactgcaaattattcattatgaaacaatacctggatttactcaatcgcgtgctaaccgaaggcacggaaaaaagtgatcgtaccgggaccggaacgatcagtatcttcggtcatcagatgcgttttaaccttgatgacggtttcccgtgcctgacaaccaaaaaactgcatctgaaatcaatcatatacgaattgctttggtttctgcaaggagatacaaacgtgaaatacctgcaggaacacggagtacgtatttggaacgaatgggcggacgagaacggtgatttgggtcatgtctacggttatcaatggcgttcatggcctgattacaacggcggcttcatcgaccagattagcgaagtagtggagacactcaaacacaatccggattcacgccgtatcatcgttagtgcgtggaacgtagcagatttgaacaatatgaatctacctccctgccatgcattctttcagttttacgtagcagacgggcggttgagcctgcaactatatcaacgcagtgccgatatatttctcggtgttcccttcaacattgcttcatacgcattattactgcaaatgatggcacaagtgacaggtttgaaagccggcgatttcgttcatactttcggtgatgctcatatctacctgaaccatctggaacaagtgaaactccaattatcacgggagcctcgtccattgccacaaatgaaaatcaatccggacgtgaaaaacatcttcgattttaaatttgaggacttcgagttagtaaactatgatccgcatccgcatattgcaggagcagtagccgtgtaaaaaatatgagtaaagtatccatcattgctgccgtagaccgtcgcatggctataggcttcgagaataagcttcttttctggttaccaaatgatttgaaacgtttcaaagcattaactaccggaaacaccatacttatgggacgcaaaactttcgagtcattaccgaaaggcgcattgcccaatcgaagaaatatcgttttatcttccaatccggacacggtatgttccggtgcggaagtgtttccttcactcgaaacggctttgaaaagttgccgggaggatgaacatatttatattataggaggggcgagcatttatcagcaggctctgtcttttgctgacgaactttgcctgacagagatagacagtacagctcccgaagctgacgcctattttccggaagtatcttcaaaggtatggcaggaaaaaagcagagaagcccatcctgcggatgagaaacatctctgctcttatgctttcgttgattacgtaagaaagtaaggaaattgtttcttactgtaatccaaccacgaatactgactaatgattaatcttcatcttctatgtcgaccataatcggcatctgccgcttaatggcttcatggaaggagattaatgtttcggtacgcgccaagcccaatggttgcaacttatcgtgaataatactcaataagtggtggttattctttgcgtaaattttaataaacatatcgtattttccggtagtgaaatgacattccaccacttcggggatagcttctaaagcttttgttaccgagtcaaaggattcggggtcttttagatatataccaatataagcgcaagtctcatatccgattttctcggggtcgataacatactccgaaccttttaatattcctagattagtaagcttctgaatacgctgatggatcgcagcaccggaaacattacatgctcttgccacttctaaaaaaggaatacgcgcattccctgcaatcagtctcagaatttgctcatctaatgcatctaattgatgatgtcccatttttgaatcaaattgtttttatcaatgaatcttttatgcaaagttagcgatttttcgacaacaaatactataatctattacttttatttgcagaaagcggataagtcaacaatagttcgtacctttgcgaaaaacataaatataccatttatatgaaacatatttgctgtatcattctgtgtttctgcacttctataggaagttatgcccagaattttgctgattattttcagaacaaaacattgcgagtggattatatctttaccggggatgctacacaacaggctatttatctggatgaactatcacagctccctacctgggcagggcgtcaacatcatctctccgaacttcccttggaaggcaacggacaaattattgtgaaagaccttgccagcaaacagtgtatctacaaaacttctttctcttctttatttcaagaatggctgtcaacagacgaagccaaagaaacagctaaagggtttgagaatacctttcttcttccctatcctaaacagcctgtggaaatagaagtgactttatattctccgcgaaagaaaacaatggctacttacaaacatatcgtgcgtccggatgacatactgattcataaacggggagtatcacatgttactccacaccggtatatgttgcaaagtggcaatgaaaaagactgcatagatgttgctatcctggcagagggatatacagaaaaagaaatggatatattctatcaggatgcacaacgtacctgcgaaagtttgttttcgtacgagccgtttcgttccatgaagggtaaatttaatattgttgccgtagccagtccttcaacggatagtggtgtcagtgttccccgcgaaaatctgtggaaagaaacggcggttcattctcatttcgataccttttattcagatcgctatctgactaccagccgggtaaagtctatccacaatgcattggctggtatcccttacgagcatatcattatcctcgctaacacagatgtatacggcggaggaggaatatacaattcttatacgctaaccacagctcatcaccctatgttcaaaccggtggtagtgcacgaattcgggcacagctttggtggattggccgacgagtatttttatgaggatgatgtgatgacggatacttatccactggatgtcgaaccgtgggaacagaatatttcaacacaggtgaactttgcttccaaatggaaagatatgcttccgtcagacactccgatccctactcctattgctgaaagaaagaaatatccggtaggagtatatgaaggaggcggctattccgctaaaggtatttatcgtcctgcctacgactgtcgcatgaaaacaaacggatacccggagttttgcccggtttgtcaacgtgccatccgccgaatgattgagttttatgttccttaattgaataacaatcatcgatggtaaccgatggtaaatacctacttaaaaacaaaatcaatatacaatcatattattgtcaaacttaaaacccaaacctcatgattagacttcaaccaatcagtacgtcggacctgcaacattacaaattcatggaagaactcctgattgatgcatttccaccggaagagtaccgtcagctggaacaactgcgcgagtacactgaccgtacgggcaactttcataataacatcatctttgatgatgacttgccagtcggcttcattacctattgggactttggcagtttctactatgtagaacactttgcaaccaatcctgccctgcgaaatggaggttatggaaaacgtacactggaatacttgtgcaattatttaaaacgcccgatcgtattggaagtagaacgtccggtggaggaaatggccaaacgacgtatcagcttttatcaacgccagggctttacactatgggaaaaagactactgtcaacctccttacaagcccggagatgattttcttcccatgtatttaatggtacacggagagctggattgtgaaaaggattttgaaacaatcaaaaagagaatacataaagaagtatatggagtaaaagacaattaaaaaagaatcccgatagaaagagttgtacaaatgtgtaatattaatatataaaaaggaagggtgtccaaaccgatttggacacccttcctttttatatatcaaattaactaattacttttcaccacgtttagtagctgaatagttaatcttcaaagcataagattttctaagagcattttttacgtcagtaataatacccatctttgtcttttggtctactttcagagatacagtcattttagctgcatcaccttcattcatacttgcacgttcctggaaaatgaagtcctgtacttcaccaacttcagcatagctgtcgttgagctgaatacgactttcagtacccatttttgcgcgatattcctgtgtaggttctcctacatagatgaatgttaccagcgatttcttctccagtttttcgagttcagtaccttgcggaagtgtaaactgtacctttaacgttacctcacgcattgttgttacaatcataaagaagaacaacaaggtaaagataaggtcaggcaacgaagaagtattcaatgccggcatttcacgtttaccagtcttattaaattttcccattacttacttctttttttctccgtattttttaggttctgcttcagaaattcgttgcggataaatttcacgaatcgctttttgctgatcgtcattcaattccgcatatgtagttccaaatttctgttcagccaactcgtctctcaattcattgtatgcagccaccaattcgttctgcacgctgatataagcctgataagaagatccacggtcattctgcaaagaaattacatgcttgtcattaaccagatatgtgccaaagaattctacattcttttgtgttttttcaggcatatgttctgcgttagcaacgttagcaataaattctttagctttctctctcaactgatcaacaccaatataatcattaccgcacatcaaagcatcatctttattcaagtatacctgcaatacgttacgttctttgattttatcagtattatcctgatcttgatcttcgggcggtggaggcaaaagtcttgccaaaccacggtccgtatccattgatgttgtaatcaagaagaagatcagcaacaagaaagcgatatccgccgtagaacttgagttaatatcaggaacttttctttttcctcttgccattgttattacttatttaattgagaattactcaattgattaggataatttcttctttatgccactcacgatgattgcaacaactgttacaaacaacaggatgtaaatagaataaaggaacatatcagtcagtttcagccaaaaaggaacgttgtctgtaccgctatagccttgaatctgcattggtgttccgtcacccatagaccaagcaacaactaaaacaacaactaaaagaaccaaaccaagtaaagatttgatagcatttgccggattatctttcaaagctgctccaaattggaatattgcaccaagtatagtagctgcaatggcaatgccaaacaaagcatacatcaaataaagtaaggcgtctgtttgagccggctgccacatctcgggatctactcccgcaatcactgcatcgcctgtagcatctcctcctaagaagaaaaggcacaatacgatcaggatgatggcaaacatcgcataaagtgcataatacgatgctctatatgttaacttactcatcttcgattattttttgtatttcaagttatatttgattaccatgtctaacaaagagatagaagaatcttccatttcgctagtcagagcttcaatcttagcaagtacatagttgtagaatacctgaaggatcaatgctacgatcaaaccgaagatagttgtaatcaaggcaactttcataccacctgcaacaaccgtcggagagatatcacctacctgctggattttatcaaatgcctgcaccataccgattacagtacccaagaatccgagtgacggagccattgcgataaacagtgtgatccaagaacatcctttttcaaggtaaccagcctgtacaccaccgtaagatacaactgacttctcaactacatcaataccctgatcaattctcatcagaccttgatagtaaatagaagcaaccggacctctggtgttacgagcaatgtctttagcagcttcaacatcacctttttccaaagcagcttcgatagatgccatgaatttttttgtgttgatttc

SEQ ID NO: 8122 - DNA, 8218 bp, Unknown
  gut microbiota DNA sequence
gtgaggggtggtgagggtagatttataactttcgtatttttttttatagataaaaaaaggagatagtatagaaaataataaaataaaaggttataaatctaccctcaccacccctcacccttgacccatatcttataataaaaagataacggggaatcttaaaaactcaatcatctttttcagatttgccacaacgtttccagaatactccattattttattcaaaacggtaccggcatgaacaagattcccctctgtatcctctgcgtcctcctctgtggtgaataaatgaactttataaagcgactattgttttcttcaaacctaaacttttaacgaataagcattatgaagatacagacgggacgaggaacaattcctcttatcactttaattgccatttggtctatttcggcattgacttcattgccgggactcgctgtttcacccatattgggtgaccttacaaagatatttccgaaagctacggatctggacatacagatgttgacatcactgccatcattgctcatcataccttttatattgctgggtggtaaactgacggagaaagtcgattatgtccgtgtattgaaagtcggactctggctttttgctgcaagcggtgttctgtatttgatatccaatcgaatgtggcagttgattgtggttagtgctctgctcggcatcgggtccggacttattatccctttgtctaccggattggtttccagatattttgtgggaacttatcgggtgaaacagttcgggttgagttcggccataactaattttacgttagtgatagcaactgccgtgacgggctatctggcagaagtcagttggcacctgccttttcttgtttatcttcttccgttggtttccattctgctggtgggacatttgaaagaagaccggtccggagaagccgctttaacggcatcttcttcgtctgatactgctactactacggcggcaaatgtagcaactgcgaatgcggcgacggtgactgtgccggagacgagttcagcggacgacagcaaagctgcccgacagtctgccatagacattgaaggcagtaaatatggtattcacatcaagcatctgatagaactgatgcttttctatggggtgattacatatatcgtaatagtagtgatcttcaatctgcctttcttaatggaaaagcatcatttctccagtggtaattccggactgatgatttcgcttttcttcctggctatcacggctccgggcttctgtctggataaaattgtaggcttgcttaaagaacgtacgaaggcatatagcctgttgtcgatggcattgggactattattaatctggatagctccgatagagtggttgattattcccgggtgtattctggtcggtttagggtatggcattatccagcccatgctttatgacaagaccacgcagaccgcattaccgcaaaagaccacattagctttggcatttgtgatgatgatgaactacctggctattttgctctatccctttatcgtcgattttttccagtgggtattccatacccaatcgcaagagtttccgtttatctttaatctgctgattactgttgttactcttttctgggcatataggcgccgtcatacctttttgtttaacgaccaattgaaataaaaaatgaagaataagaaactggaagccaatcttagcatggccgtctcgaaagtttttagcgggttaaatatgaatgccctgaagtatcttctgcctttgtggatgagtccgctgacaggagcaacccttcgctgcacgtttgcggcagcagccttttgggtaatcgggtggtttatgcctccggaaaaatcatccgccaaagataaatggctccttttcctgttgggggccttgggactttatggctttatgtttctctacctggcgggattgagtaaaacaactcctgtttccagttccatttttaccagccttcagcctatttgggtttttctcatgatgatattcttttataaggagaaggcgaccactaaaaaaataataggaatttctatcggtctgataggagcattggtttgtattttaacccagcaaagtgatgatttggcgtccgatgctttcacgggaaatatgctttgtcttcttagctctgtggtatatgctgtctatctgattcttagtcagcgtatcttgactgccatcggagcaataaccatgttgcgctataccttttccggtgctgctgtatctgctataatagtaacgttcattacgggatttgatgctccggtattttccatgccgttccattggacacctttctttatcctgatgttcgtattgattttcccgaccactatcagttatatgttgttgcctgtcggtttgaaatatctgaagacaacggtggttgctatctatggttatctgattctgattgtggcaactattgcctcccttgttttgggacaagaccgttttagctggacgcagacgtttgccattatttttatctgtatcggagtttatttggtagaagttgctgaaagcaaggagcgataaaagtttctcggtgtggaacaggttgttcctcggtgaggaacacttcgtttcacaccgaggaacactttgtttcaaggcatggaacaaaaaaagagcgtccttcacagaacgctcttgcttatttcatcatcatgttttatagagaggagttgattgcttgtgctatggacttgaattcttcatccgacaatttcagtttcggattcgagaacaacatatccgattccttttgaataggaattaaatgaatatgtgcatgaggaacttccagtccgataaccgcttcgcccacctttttacaggggaaagctttttcaatggcacgggccactttctttgcaaatacatgcatagcagccaggtcctcatcgctcaaatcgaaaatatagtctacttcctgtttgggcaccaccaatgtgtgtccctttaccaacggattgatatcgagaaacgcaaaaaacttttcgttttccgccaccttgtagcaggggatttcgcctgtgatgattctactgaatattgttgccataacttttattgataaatgaaggcaagccccacaaggagacctgcctttacgttaaattgatatgtttactacttccaatgcaattttaccttgtggaacagtgatttcggctacatcacccaccttcttgccaagcagaccttgtgcaatcggggtgttaacggaaatctttccttccttcaggttagcttcactttcggaaacgatggtataagtcatcttcataccgttctttacattcttcagttccactttatttaaaatctgtacagaatctgttttcagtttagattcatcaatgatttttgcgtctgcaatggtagctttcaatttgttgatgcgcatttcaagcataccctgcgcctctttggcggcatcgtattctgcattttccgacaagtctcctttatctctggcttcggctattgccgcagagatcttcgggcgttccactgtttccagttccttcagttccgccatcagtttcttgtaaccttcttctgacatataagccatgatgttttcctcctttaattgttttaaatggtcatataaacaaaaaagaattccaacatgagccatgttggaaccctcttatcattatttctttgcaaagatagacttttaagtgatacgtgtcaagtgaaaaaagatgctatgtaacatatttaaatgaaatatgctaaattataacaacttagagcaatgacttgacagctgcttccaaatccttgatatcttcgccgcgaagctttaattcgttgttacggttaatcaaaaagatagatggaacttgacgaacattatatacagctacgttggtagaatatactccgttttcatcgcgtacacaaacccagggaaggttgtctgccgcagttttccagtagtgttcgtccgcatcgagagatacttggtatatttccagtccttgttttgcgtattcattatatagttcgcgaagcatcaggttgtgaggagaaccggcaggcgactggaatacagagaaatcgagcaatacgacttttcctttcaggtcggtcagtttgcgcacatttcctttcacgtcacgcagggcgatgtcgataatgccggtttccacaattttctcttgaggaatctccaatgctttcgcctgtggctggcgcgtgttcttcatccccttaattacaatattataaaggttcttggaacgtacggcatgagggaacgcattgttgaggctcgtagcgacagcagcgaaacatttcacatcatctttattgttcaacggatcgaatatcagataattattgagtttctggaacagggcaaagtaagcggctgccgtgttgggagcagcgaaaatatagttcactttgacatcttccttgtaattgttgagcaacgttgccagactgtcttcaaatacatcatgccccattctgttactgcgtaaagctgccagcaagtcgtccacctctttttgcaggcggatctgcttcagcgtcagctcttttatcttgttgctgttttccgaaccttccaccgtgtaagtagtggagaaatccacatacggcgctttgatctgaattgtttcgatagaatctacagaaaaattgatgattttgtcgtcaatccgcaagcgataaaattcgggtgattcgggacgaggctgcttgaaactgaatgtaccttcccccttcagcttcactgaatcgagtggaacaataccttccagaccggaagcttcgagataaagcattttaccgtcggctcctgatacatccccgttcacctggaatttaggaccggaactacaagcagtaatagtaagtgcggcgagcgctgcaaaagtaacctttttcatatagtgtgtgttattaacgagatgcaaatatacttcttttcgagattagtcaaagcattttgccgggttcttcatcctaattttgaaaaaaaatcagttcaccactaactttttacctcatttccacctgattaccacgataaatgtatatctttgcaggaattttgaaagaaaaagtatagataaaacaatttttatgattaacccaattgttaagacaatcgagttacctgatggaagaaccatcacactcgagacgggaaagttggcaaaacaggcagacggttctgtaatgcttcgcatgggcaacaccatgttgttagctactgtttgtgccgctaaagatgcagttcccggaacagattttatgcctttacaggtagagtacaaagaaaaatttgcggcattcggccgtttccctggtggtttcaccaagcgagaaggtagagcttctgattatgagattcttacttgccgtcttgtagaccgtgctctccgtcctttattccctgataattatcacgcagaggtatatgtgaacatcatcctcttttctgctgatggtgtggatatgccggatgcattggcaggacttgccgcttctgcagcacttgccgtttcagatattcctttcaacggaccgatctctgaagtgcgtgtagcacgtatcgacggtcagttcgttatcaatcctacttttgaacaactggaaaaagctgacatggacttgatggtagccgctacttatgagaacatcatgatggtagaaggtgaaatgcatgaagtatctgaagctgaattgctggaagcaatgaaagtggctcacgaagctatcaagattcattgcaaagcgcagatggagttgactgaagaggttggaaaaactgtaaaacgtgaatacaaccacgaagtaaacgacgaagacttgcgcaaggctgttcgcgaagcatgttacgacaaggcttacgcagttgctgcttccggaaacaataacaaacacgaacgttttgctgctttcgaagcgatccgcgaagaattcaaagctcaattctctgaagaagaattggacgaaaaggctgcattgatcgatcgttactaccacgatgtagaaaaagaggccatgcgccgttctatccttgacgaaggtaagcgtctggatggtcgtaagactaccgaaatccgcccgatctggtgtgaagtaggtcctctgcctggccctcacggatctgctatctttactcgtggtgaaacacagtcattgacttctgttactctgggtacaaaactggatgagaagattatcgacgatgttttggaacacggaaaagaacgtttcttgttacactataacttccctcctttctctacaggcgaagcaaaagcacaacgtggtgtaggccgtcgtgaaatcggtcacggtcacttggcttggcgtgctttgaaaggacagattcctgctgactatccgtatgtagtacgtgtggtttcagatatcctcgaatctaacggttcttcttctatggctaccgtatgtgccggcacattggcattgatggatgcaggtgtgaagatcaagaaaccggtatcgggtatcgctatgggattgattaagaatccgggcgaagaaaaatatgctgtattgtctgatatcctgggtgacgaagaccacttgggagatatggacttcaaggtgaccggaacaaaagacggtatcactgctacacagatggatatcaaggtagacggtctgtcttatgacattctggaacgtgctttgaaccaggctaaagaaggacgtatgcatatccttaataagattactgaaacaattgctgaaccacgtgccgacctgaaagaacatgctccacgtatcgaaacgatgacaattcctaaagaattcatcggtgctgtgatcggccctggtggaaagatcatccaaggtatgcaggaagaaactggtgctgtgattactatcgaagaaattgatggtatgggacgcatcgaagtttccggaacaaacaagaaatgtattgatgatgcaatgcgcatgattaaagcaatcgttgctgttcctgaagtaggcgaagtttataaaggtaaagttcgttctattatgccttatggtgcatttatcgaattcttgccgggcaaggatggtttgctgcacatctccgaaattgactggaaacgtctggaaacagtagaagaagccggaatcaaagaaggtgatgaaatcgaggtaaaactgattgatatcgatccgaaaactggcaaattcaaactttcacgcaaggtattgttgccaagaccggaaaagaagtaagaaagcgatagcttctatatataatgaaggctgtttcaaatttaattttgaaacagccttcttttttattagtatcctccggagttgaactgttttatatatagagttagtatatattagatttatccagtttattaaaacctttaaaaagatgaaagacaccttattatatcctccccaaaaaagaatcggaaagtacccccatacttcccgattcgaaacagtcaaaaatcgaccttaatcaatttattaacttaacacgtcgcaaagatatgagaaaaatttctttgaaagagcttttttatttaaaaagtttatgatacaggcaaatataccagttaataaggtcgtttttcttgctttaaaaccaaagcttcactccttttaaaggaacgaccccttcctttaaaaggaagaggccgttggttctaaagaaatctggtggggtgtttatatagaaatttggattaatgatttttcaattatataaatccgtttacaagtttgttttatactcctcttttattcgtattatgtgtgctaagttcttttccagtaattcatttagctcatcatccgaaaaacattctcctaaatagatcgtgctttctgtttcaaaatcaaatgattcgtcgtcttcattcacaacaatctcaatttttccttgtgcatctgtagagatcactgcattgtatttagtcatcaattctttgagcccttttatgaacctgtattctttgcttgtcaatattcttttcatcttcacttgctcttttgttttgttgccctttcgtgcggtaaagttcgtgataatttaacacattatgcgctgtttgaagtattcattttattctatttgtcaagttgtaatattccttttatccatattatcacatctattcgtttttttcgtatatttcctctatgaaaagcaagaccgcgactatct

SEQ ID NO: 8123 - DNA, 17346 bp, Unknown
  gut microbiota DNA sequence
ccaacattgtgtttggcgcactgcatagaacagaaatttaattaaataacttttagtatgggattattagacggaaaaacagccattgtaaccggtgctgctcgcggtattggtaaggctatcgctcttaagtttgctgccgaaggcgcaaacatcgcatttactgaccttgtcattgacgaaaatgcagacaatacaactaaagaattggaagcaatgggcgtgaaagccaaaggttatgcttctaacgctgctaactttgaagatactgcaaaggtcgtagaagaaatccacaaggacttcggacgtatcgatatattggtaaacaatgccggtatcactcgtgacggcttgatgatgcgtatgagcgaacagcaatgggatatggtaatcaacgtgaacctgaagtctgcatttaacttcatccacgcttgtacacctatcatgatgcgtcaaaaagctggtagtattatcaatatggcctctgttgtaggtgttcacggaaatgcaggacaggctaactatgctgcttctaaagcaggtatgattgcattggctaagtctatcgcacaagagttgggctctcgcggtatccgtgccaacgctatcgctccgggattcatcctgacagacatgacagctgctctatctgacgaagtaagagctgaatgggcaaagaaaattcctttgcgtcgtggtggtactcctgaagatgtggcaaacatcgctaccttcctggcttctgatatgtcttcttatgtatcaggtcaagtgattcaggtagatggtggtatgaatatgtaatcgaacagaatgactgttgtatacgaagacaaccatatcattgtagtcaacaagaccgcttccgagattgtccaggcagacaagacgggggatacgccgctttcggagactgtgaaacagtatctgaaagagaagtatcagaaacccggaaatgttttcctcggtgtgacacaccggctggaccgccccgtaagcggtcttgttatttttgccaaaacgagtaaggcattaacaaggctcaacgaaatgtttcgcaccagtgaggtgaaaaagacttattgggcggttgtgaaaaatgctccgcaagaaccggaaggtgaactggtacattttcttgtacgtaatgaaaagcagaacaaaagttatgcatacgacaaagaagtgccgaacagcaagaaagcgatcttgcattaccggttgatcggtcattcggagaattactatttgctcgaagtcgatttaaaaaccggacgtcatcatcagattcgttgtcagctggcaaaaatgggatgccctatcaagggagatttgaaatatggctctccacgctccaatccggatgggagcatttgtctgcatgcccggagagtacggttcatacatcctgtctcaaaagaactgatagagcttgaagctcctcttcccgaagggaatttatggaaaggattcgccatagattaacacggatttccacagattcatttattatgttatttagtagacggtacgcagtttttctgtggaaaaccgtgtaaatctgtggttggaacttgccaaaagagtaaacctgcctgccatttttcttgtaaactctagcgacagttagttaattcctaaataggtagtatatttgcatcattcgctaactataattttcaatcataccaaagaaaaatacgaatgaaggcatttaaactacttgcacttacttcttgtgtcttgcttgcagcgggaaatggagtagcgcaacagaactattcaaaaagtgaaggattattgcagtacgtcgatccgtatatcggatccggttatcatggacacgtctttgttgggacgagtgttccgtatggaatggtacagctgggccctaccaatatccataaaggttgggactggtgctcgggttatcattattccgatagtattttaatcggcttttcacatacccatttgagcggtacgggttgtactgacttatgtgatattctcatcatgccattgaatgagatccgtacccccagaggcaatcaggatgatatacgtgatgggtatgcttccagatattctcatgcgaatgaaatcgcccgtcccgaatattactctttgcttctcgaccgttacaatatcaaagccgagctgacagctacagatcgtgtaggcttccatcgttatacttatcctgaaggaaaaccggcttccatattaatcgacttacgtgaaggaaacggatcgaatgcttacgacagctatatccgtaaggtagatgattatacagtagagggttatcgttatgtgagaggctggagtccttcccgcaaagtttattttgtgttgaaaagtgataagaagatagagcagtttactgcctatgatgataataccccgcaaccttgggaccaactgaaagtggcatcggtgaagagtgtcctcacttttggtaacgtgaaggaagtgaagataaaagtcgccctttcttctgtcagctgtgacaacgcagcgatgaacctgcaatccgaacttactcactgggattttgataaggtggtggatatgagtgccgaccgatggaataagcaactggagaagatgacagtagagactgatgatgaggcttccaaacgtgtattctataccgcccattatcatactatgattgcccctacgcttttttgcgatgtgaatggagagtatagagggatgaatgacatgatttacacagacccgaagaaagccaactatacgactctttctttatgggatacctaccgtgcattaaatcctttgatgactattactcaacctgaaatggttgaccatgtagtcaattcgatgatttccatctatcgtcagcaggacaaactccctatctggcctttgatgagtggagagaccgatcagatgccggggtatagctccgtgccggtgattgccgatgcatatctgaaaggatttaccgggttcgatgcggaagaagcattgcaagcaatgatagctacagctacttatgaaaagcagaaaggagtaccttatgtagtcaaaaaaggctatatccctgccgacaaagttcatgaagctacttccatagccatggagtatgcagtagacgactggggaattgccgctatggcacgtaagatgggaaagacagaagatgctgaaacattctcaaaacgtgctcattattacaagaactattttgattcttctatccatttcattcgtccgaaactggaagacggctcttggcgtactccttacgatccggcacgttccatccatactgttggagatttctgtgaaggaaacggatggcaatatactttctttgctccacaagacccctatgggctgattgccttgtttggcggtgacaaaccttttacaacgaagcttgatggtttctttaccaacaccgacagtatgggtgaaggagcatcgagcgacataaccggattgatcggacaatatgcacatggaaatgaaccgagccatcatgttgcttatctttatgcgtatgccggtgaacaatggaaaacggcggaaaaggttcgttttatcatgagcgatttttacacagaccagccggacggcatcatcggtaatgaggattgtggccaaatgtctgcctggtatcttctttcatctatgggactctatcaggtgaacccgtcggatggtgtatttgttttcggtagcccttgttttaagaaagtagaaatgaaggtacgtggtggtaacacttttactgtagaagcacccaataacagcaaagaaaatatctatatccagaaagtgtatttgaatggcaagccttatgataagagttatatcacttatcaggatataataaatggcagcacattgaagtttgtaatggggaaaaagcctaataagaattttggtaaggctccggcaaacagaccggttgttttgaataagataaatggataaagatggcttacttataaaagacagctaattgttgaaaggaggaagaagcctccgacaatgaaagaataaagctggttctcaatattcaattcagttttcaataggtattataaggctttccgattgtagcatttaattctgcttcggaaagctttattttatactagaaacggctgaaaagcaaatccttaacaagaacttactgttttcagccgttttggggaatacagttttaagaaataagttagtcctgattacatctttcctttaaaaaagaatgtaatcaggactatttttataaactacggaagcggatcagcctttgccggccgtttcggatcataaacggctactcctactttggagtcagcacaaccataatacaaataccatttgtttttgaagtagaccattccttcgataaatacggttccatccacatattgcccgctcttttcaaagctgtccatcggacggaagaacggttcatcgagacgggtgataaagcgggtaggatcattggcgtcgaagagtgcttgtccagcagcatagacattggcggtatagcgtttgtcacctcttcctgaatggttcttactattataaagaaggacgattcctttcggagtgtagatagccggaggtccacattcggtgagatggctgtcaaagtagccgtcacggggagaaaacagcttttttagggagccgtcaatattgacaataggtgtccagtggattaagtcatcggaagtagctgcgaatacatgctcttctccccagtacataaagtatttcccgttgactttcttgataacctgtttccctttaacaacttcggtcaggatagagccggacttacaacccaggttgaagaactttccatcaaatgctttggcaaaagcaggaccgtgttttgtccagtcttttaggttgcgggaggtcgctactgccaggcgaggtacatggcgattccattgggtgtacatcattacatataatccgtcatcggttacggcaattcgtgggtcttcgcagccgccgggccattccaactctttttgtgaatcattatccggatagaatacaggagtcttttcccgttggaaatgtgtgccgtcggtagaagtggcataaccgaggcgagaagtccggtgtccgataccgacacctgatttatcctctgcacggtataacacgacaatctcaccattgtagagtgtagcagccggattgaatgtatcgttcgattcccacgcaatagaatctttggtcaatggacagtaaaacttggtgttttctataggggatattaccggattgacattctttggacgttcgaaaccaccgaaagcccaattgggtaatttgttctctttatgattggaggactgtccgtaggcagtacaagtcatcatggttgtagcaagtaggaataaaaaagttgatttcatgttgttcatattgtatgggtcatttattttttaggagtcatatactccctgcatataaattggaaaataaataaaatgctgtcatctgtcacctgattgggcataaatgattgattataaatatactgcagtgtgacagcatgatgtgacggcaaggtgacgacaactttgctgtcaccttgttgaaagtaaggattttattgcttctctgctatgtgggcacttatttttctatccggagcggtattcaaggattatcagactattacggaagagagagtttcagtacttgaaactaaaagttctattgcttgaaacttttgtttcgtcagcgagaaactctagtttctcttacttgaaactgtggtttcaaaggcgtgaaactaaagttcttcaaccttgaaactactttggaagcgtaagcttcaaggttagaaacagttatctcataagcaggaatacaataaaaacataatagaagactattgaatactatttagtaagtctaccttgccttcattcacgagttttaggattagttctccaaacagcgtattttgccatgcaaaccaggaacgagtaaagttcttcgggtcgttcttgtggaaagattcatgcatgaaccctgttccggcatccgtatccatcagcattttgatgcaggtcttgatttctgcgtcgttttgactggtgaatgctttcatcataatactcatgggccaaatcatatcatatccgatgtgcggaccgccaattccttcaccagcagtacctttgaagaagtaaggattatcttcgctccatacaaacttacgggtattctgataaataggatcgttcactttcacatccccaagataaggcagggcaatgagactcggcacattggcatcatccattaacagttgattgccgaaaccgtccacttcgaaagcatagattttgccatatttcggatgattgtaaaccgcatactgtttcagggctgcttccacttcgttcgacagtgtagtacattctttagctaaatcaggtttcttgttgaccgtattcagaatttcggcagctttgcgcaatgaagttacagcaaagaagttggacggaacgaggaactggaaagttgtagcatcatccgaaggacggaaagcagaagcaatcagtccgaccggctttacaggattaccccagccgtcgttggtcatcgtatcgagtgcacgttccgttttacgttggaaacgataaggacctttcggatcttcttttcgttgctgttccttaaacgttttcagaaccttggcgatggctgtaagccattcgtcggagaatatactggcatctcccgtcgtcttccagtaatgataagcaagacggataggatagcagagcgagtcgatttcccatttgcgttcgtgcagttcgggcttcatgtccgtaaggtcgctcatccattcgccgccttcggaattcatgttgaaagcattggcatacgggtcgatattgatacacttgaactgacgtttgataacgccggccagcatctttttcagttccgcgtctttgttggcgagttgcacgtaaggccatacttgtgcacccgaatcgcgcaaccacatggcgtggatgtcacctgtataaacaaacgtatcgtctttaccgtcaaaatgaacagtagtgtccaatgtgttcgggaaacagttttcgaacatccatgccaagcgggcattcgtcagcagttgcttgatatgcgcaatctgttgttccacagcttgcgagacaaacagacgtttcgatgcttccgggcggttcgtctgatagttgttgatttgggtattatcttgttggatgacaaaatcactgttcgttatagcctgcatattgctagcaccaaagagtgctatggacaaacaaaaggctttagttatattcatggtaatagtcttttttttgttgattagtattgattatgaaagtgttgcggagaagaagtgttaaatctctgcaaagaattcaataagacaggcattgtcgagcagccatttatacttctccttgttatgtcccgaccaatccctgcctaataatccgttttcatcccggtagttttcccaggcgtgaagcgcattttccaccatcgcattgacatacgccggattcttgtcaatcttatacagagctttcagtcctctgaataagatcacgttaaaccaggccatgtctttatgcactttgacagtcgggtctttcttgtcggcttttgtgcggaaaaaggcatcagttcctgcggctgtctgctgtgcatcgcgcaaatactgttcatctcctgtttcttcatagagcaatacgcccgcctgaatcatctgtccactgttgtaggcgtacttctctttggaaactttccctttcaggttgatgttatcccagtaaagatggtcggtagggtcgcacagatgctttttcgtccaggcatacgtctcttttgctttttcgaggtatttggcatccttcgtcagccggtacaacttgacaccgagcacagtagacggtgcattggaacaagtatgcttcgcttccttctgctgttcacaccaaaagatgccaccgcctatctcatcgctccatccactgtagatatattgatacaatgcaacggctttttccaaagatgcaggcttgtgagtcagttggtaataatcgcaatagtctagtgcaatccagatgttatcgtcataataacgtccgtgctgcccgtacttggtggggtatgactgataacaggccggcaagcgactgttatcccaatactgctccattcccggtagaattcttttctcgagaatctttttgtacttcttgtttccggtcgctttgtataaagccacacaacccgacatcatcccggaatacggccatagaaaagaagccttcagcgttccgttctgctgcgttccgcccgccagataagtaattttttggtcgggattgacaggatacgtttctgttagtagtccgtcattcgtctgatagagattcaatacattagatagaatcgagtcggcaatagaaagataacgggtatttcccggtgtctttcccactgcggaagtaaggcaaaataacatacaggctacaaaacatatatttctcataggaatatcgggttgtgtggtgaaactttcaggtagatacaaagattatttctgctgacgctggtcgaactccagttccacctttacggggaaatggtctgaaggagtgcgcgcctgataagtcttgatgtcgatttcttccgggcaatcgttcgcctgcttcttttctcccttgcctacgatgctgcggtaagtatcagtcagcacaccatatcttttcacttggaaagacggagaaacgaatatatggtcgatacggctttccgtaaagctgttcgggtcgaagtcgttgaacgtgccgttgatagcatagcggaagccggccttttcgtaagagtcacacaacacccctttgctcacaaaagcatcataagattggtgggtctggtcgacattgaagtctcccgtcaggatggccggaagctctttgcctttgccaagttctttcatcttgtcctgtacgaggaacgcactttccacgcgtgctttcttgccgatatggtccatgtgcaggttgaagaaaaggaattcgaagccggtatctttgcatttgaagtgtccccaactgcaaatacgcggcaacacggcatcccatcctttgctcggcacgtcgggagtttccgacaaccaaaaatcacctttctctatcacgtcaaacttgtctgtgcgatagaaaatagcagaatgttcacctttctctttgccgtcgtcgcgacctacaccgatataatcataaccgggtaatgcttctttcatatctttcagttgatgaataaagcactcctgcgtgccgaaaatatcgaaatcgtggtattgcactatttgggcaatgaccgggtaacgttgtccccaaccgtttccgttgattgaatcgccaccgttggcgtttctcaaattgtaggaggcaacggtgatagaagtaggctgatagttactttgacaaccgcaaaagacgatcgcaacaagggcaattagtaaaaggtttttcagtttcatgtttttatagtttgtttggtagataattcattgatctccaaaagtacaatattttattcaaacgaaagagagtaaggtacatctttttctgtggttccccgttgtttattgggtacggggctcatttgaaattgaatattagcacctttaatcagctggtcatgtgtaaggaaattacgggtttgtgatttcccgtttactttcatttccttgatgtagcggttgtcaagctggttgttatctgccttgattgtgatggtctttccgttctccagatgtaacttcgctgatttgaaaagcggggttcctatgatatattcatccgttcccgggcaaaccggatagaaaccgagtgcggagaatacataccaggcggaagtctgtccgttgtcttcgtcaccgcaataaccgtcgggaccggcggtatatagcttgttcataatctcacgtatccagtattgggctttccagggctcgctcgaatagttgtagagatataccatgtgctgaataggctggttgccgtgcgcatattgccccatgttcattacttgcatttcacgcatttcgtgaatcatgccgcggctttccattcccagtttacccgggatgacaaagacggaatccatcatcgcgttgaattctttcttgcctcccatcaggttgataagtccttgcgggtcgtggaatacgcagaagctccagtgccagctattcccttcgcaaaattcaccgctccagtccactgcatcgaaattcggattgaatacgcctttgttgtctttgccaaccatcagtttgcgttccgggtgatagacatttttgtagttcagcgcgtgtttcttataaatgtcgatttcgctctccggtttaccgagtttcttgcctaatgtataaattgcccagtcgttgtaagcatactccaatgtacgtgcaacgttttgtcctatgccgatattgttggcaacatatcccagttggttgtaagattcgtaaccgagacgacctgaagcagtcccgcgaagatgtgcatttgctccatgtttcaatgcttcccaaagagtttcgatatcatatcctcgcaatcctttgatgtaagcgtcggccactacggaagccgagttgttgcctaccatacaatcccgatgtcccgggctggcccattccggcaggaaaccgctttccttgtaagtatttactagtccctcctgcatcttttgattcattgacggatacatcaggttgaggaaagggaacaggcagcggaacgtgtcccagaatccggtgtcggtaaacatataaccgggacgcacttcgccgttgtaggggctgtaatgcatgacttgtcccttagcatctatctcgtagaaactgcgtggaaaaagcatggaacggtatagacaagaatagaaggtacgtaaattatcgatattatcgtcttctatctctattttactcatttcacggttccaaatctctcttccgttcgctaccagttggtcgaaactgtttttgccaagctctttgagattcaactccgcctgttcggggctgataaaggaggaagcaacacgtgcgtgtacgatttctccctttttcgtggcgaatccgatcacggcccctgtgtggtttccttttgcttctgtttcattcggaagaatgttgttttcgaaaactgtggaaacgaatgtgaacggtttgtcgaattgaatcacgaaatagtttttgaagttttccggcacaccgccgctattcttggttgaatagccgataatcttgttttctttcggaatcactttcacataagaacctttgtcaaaagcgtctacaatcacgtaggcattctttgtctccggatacgtgaaacggaacatgacggcgcgctccgtaggagcaagctcggttgttacgtcatggtcggcaaggtacaccttataataataaggtttggcaacttccgctttgtgagagaaccaactggcacgtcggtcttgatcgaataccagtccgccggtgataggcatgatggcaaactgcccgtagtcgttcatccagggactgggctgatgtgtttgtttgaatccccggattttgtcggcatcatacgtgtacgcccaaccgtctcccattttaccggtctgcggtgtccagaaattcattccccacggcaatgccgtagccggatacgtgtttccggtagacagttcaaacttggattgagtgcctaccagtgtgctgacatagtctaccggattcttaacggcagaagattgcaggctgtacaacacggcacctccaagaaatagcaagtgtttaaatgacaaatgtgttttcatgaacaaatgaatttatagatttgaaaataatttctacgacgaaaatagggagaaaaggaatgtgcttctagtaatagaggggctaaatcgtttcttgtcgctgaaattaactactctggcacggagctttacttatattccggccaaaaaaaagctcggaatgtttttttgtttacctttgtcatatagcaaatctaagaataatacactatgggaaaacagttggtttttattctattcttttttcttaatctgttgatacataacgcttatgcttataatttgaagcaagttgcagataaagagtatatgtctaatagttcgattacatctctgtgccaggatgagcgtggattgatgtggatcgggacctgcgacgggctgaatatttatgatggacaggagattgaggaatttaagactcgtgacaaggaggattacttatctggtaatctgattgacaatattgtgtatacgggcgaagatgtttactggattcaaacctactatgggctgaaccgtttgaaccggaaaaccaatacaatcactcactataatgaatttcagaaactcttctttatgaataaagatagtcatggtaatctgttcattatccaggatagtaactgcatttattattatcataaaaaagaaggagtcttcaagaaaatcaatatcacgggaatcccgatttccgatatcgtaaacttctttatcgacggtaacaaccggatgtgggtagtcatgaaaggatataaccgctgttatgatatacagcaggaagccgcatcgggagatatcaccctgttaccccagaaaacgaacctgatttatcagacttccttgatttattgtttcaatgacgagcaatctctttattacatagacaaggaatttaatttctatgctttccatattccgacccagaagaatgagtttattgccaatctaggtaaagaaatacaggaacgtggtaaaatttcttccatcgttcattatcataacagctattttgtgggctttttgatggatggtattctgctgttggagaaacagaaggagacgaatcattatcaaattcagtcgttacctatcaacagcggtgtattctgtctcaagaaagaccgttttcaggatgttgtttggattggtaccgacgggcagggtgtttatctttattcgaacccgctttattctatcaaatcaatggtgcttagcaattataccgagaaaatagaacgccccgtgcgtgccatctatcttgatgatgaacgtactttctgggtgggaaccaaaggaaacggaattcttaaaatctatgattacgaattcgataaaaacatctccgactgtcgggcggaggtgttgactacctctaatagtgctttgagtagtaatgccgtttattgttttgccaagagccaccggaatttgctttggataggagacgaagaaggattaacttattattcatatcgggaaaaacgtatcaagagtataccgatacggatcggtaacgaagattttaaatacatccatggcatttacgaaacagcagattccgaactgtggctggcgagtgtcggcatgggagtggtgaaagctcgtattgccggaacaccggacaatccggtgattgtggatgcgcaacgttacatcatcaatgacggcgaactgggatcgaactatttctttactatttatgcggagaatgaagccaacctgttgtttggcaataaaggatatggggtattccgctataacgaaacgacgaatggcctggaaccggtgtctactcacaaatacgaaaacatgaccctgaataatattctcgctatcagtaaagacagcagcaataactatcttttcggaacgagctacggattgataaagtacacatcggaaacctcttatcagctcttcaatgccaagaatggtttcctgaataataccattcatgcaattcttagaaactcgtccgacgacttctggttgagcaccaatcttggattaatcaatttcgatacgaaaaggaatgtctttcgttcatacggttttggagatggtttaaaggtggtagagtttagtgacggagccgcttttcgggattcccagactggtactctgttctttggcggaatcaatggagtcgtagctatccgggcggatggccgtccggagcagctttatatgcctcctgtttattttgataagctgtctatcttcggtgaacaatacaatctgggcgaatttctcacccggaaaaaagaaactgaagtcttgaatttgcagtatgaccagaatttcttttctgtttcatttgcctctgtggattatctgaatggtaataactgtacctatttctataaactaaaaggattgagtgaccaatgggtaaacaatggttcggaaagcggagtctcttttacgaatatggctcccggcgaatataccttactggtgaaatattacaatagtgtctttgataaagagagtgatgtctattctctggtgattcgtataggtgatccgtggtatgcttcctggtgggcttatttgatttatgccctgtgtctgcttttactggcagccttgctgatacgttcctttatcctgcgctccaaacgtaaaaagcaggaattgctgaacgagatagagaaacgccatcaaaagaatgtctttgagtccaaacttcgtttctttactaatatcgcacatgaattttgtactccgctgactttgatttatggtccttgcggacgaatcctttcatcgaagggacttagtaaatttgtcgtggactacgtacagatgattcagacgaatgcggagcgtctcaacaacctgattcatgagttgatcgaattccgtcggattgaaacgggaaacagggaagtgcgggttgagtcattgaatgtgtcttccattgtgaaaggaatagccaaaacgtttgttgaaatggctaaatccagaaacatcactttcttgagcaagatacccgagcaggtgatgtggaactcggacaaaggattcctgaatacaattattattaatctgatttctaatgcctttaaatatactcccgacggacagagtatcaagattgaagtggatacgagccgggaaaatatgctggctcttcgtgtagcaaatgaaggaagtaccatcaaggaaaaggattttcagtatatttttaatcggtatgccattttggataatttcgagaatcaggatgaaaagaacttttcacggaatggcctggggctggctatttcttataatatggctaagttgctgaatggtacattgaaagtggaaaacacttctgacggatgggtgatgtttacattaaccttgccggtcatggagctgactaccggagtgtcggaaaccaaacgactgatggcggaatatatccccaagatagatactcaaccgatattgaaacttccccagtatgagtttgataagatgcgtcctacgcttttggttgtcgatgatgaaatcgaaatgctatggtttattggagaaatcttctcggctgacttcaatgtggtaaccttgcaagatcccgaacggctggatcaggtgatgaatgaggtttatccgaatgtgattatctgtgatgtcatgatgccgggaatgggtggcattgaactgaccaggcggattaaatcggtgaaagagacggcgcatattcctattattgtggtttccggacgacacgagatggaacaacagatggaagccctttctgccggtgcggaaatgtatatcacaaaaccgtttagtgcggagtatcttcgtatctctgtctgtcaggtgatagaacggaaagaggtgttgaaaaattatttcagttcgccgatcagttcttttgaaaagtcggacgggaagttgacgcataaagagtcgaagaagttccttcagtcggttttgaagattatcaatgataatataacgaacaaagatttgactccgcgttatatcgccgatcgactggcaatcagtccccggagtctttatcggaagatggaagagataggagaggatagcccgaccgatctgattaaggaatgtcgtttgcacatagcgaaagatttattgctgaccactaaaaagacgattgatgaaattgtattcgattcgggattctcgaacaaagttactttctttaaggtgttccgtgaaaagtatgagtgcacgccaaaagagtttcggatgaaacatttggaagaggttcagcagtagcctgtggcgggaatttttaaagaaaaagaagaagtaaatatccgtgttaatatagtaaatatccgtgccaaaaggtaaaaaaggatagttaattttcttttggtagagtttagtgattttatctttgtctcatcgaagtttttaagtagataaacttgaaaagtattaatttattaatctttaatctaatgaaaaggaaacttagttttttatttctttcagcattgaccattccattttttatggtatcgtgcagtgatgataaagaagaacaggaagtgaaaccggcaacagatctggttgtcgataataattcggtgacactactacaaggagacgaaattacggtgagtatcacctccggtaatggcgattattatgtgaagccatttgatgaaaacgtggcgacggctacaatcaatggtaataaggtgactattaaagctaccgaaaatagccagttggaagaaaataaccgtacggaaactactatattaatagtagatggacgtaagaaagtggctagagtgctggttcgggtagcaaaactctgggatttgacggtagatgcaccggaagaaggttttgacctttttatcggtgaaaagagactggtgaagattttgaccggtaacggagattatcagatttccataccggaaggtgctgataagtttttggaagtgggtgaactatccggacaagttattccgttgactgccaagttcgagactggagccgatccggtaaatattacgataacagataagaaaggtaagacaatcactattcctgtggtagtgaacatcgtggatctgacactgaaaagtaatgaagccacttttgccgaaccggatgccgaatctcaatatatctctattgagagaggtaatggcggatatagtttcacttatcaggtgggagacggcgagcctattacggatgcaacgattgtggaagctactgaaaaagagaacctgattaccttgaaacccaaagctagaggtgatgtgaaagtgattgtgacagaccagaaaggttctgtggaggagattgcggtgaaagtgaatccatataaccttaaactggaaaatgatgccacttctttaattataggtggttatgaagcatctactgaaattgctatcgctagaggaaatggcgattataagttagcacagcttactg

SEQ ID NO: 8124 - DNA, 8154 bp, Unknown
  gut microbiota DNA sequence
aatgagttccgagcacttctatctgcgattggtgagaggtagaaacgacaaatttcttttccggattcttagccacttcaaaataggcttctccctgcaaacttacatttctcgtgtcgctatcgaagcgtgagggataactcaaagtagattcggaattcaggaaaaccaacgtgccatcgggcaatgtcagagaagtcatcattccgggatttgttttcacttccatcatttgtgccaattcctgttcgcttcctccccaatgttgtaccatcagagtaacgagaagtggaatgaacagcactgctgccgcacgttgcgcccattgccaccacatcgttcccttgtgtctgttacccgacattctacttttcaccttcaacaatgctttctccgtatcgactttcttcataacattaactgtatccgtggcaagataaagagcatgtatctgttttgccatccgtcgattttcgtccgattcgctcatccacatctcaacttgcagacgttcttcttccgttgccaccccttcacaataacgtggaagcagttcttctatcgtatttctatctgttttatccatatctttttttattgccttttactataagacaagggagaataggaagactcctaaactaaaaaccattttttttagaaaaatctttgtttctatctaaaaaagctatatttgcagttaaattatggagctaatacatgaaaggaacttatcaatcagacaatgattttctattatcagccgttcaacgcggagatcaaaaagcattcgatacactgtttcggagatattatccgatgctgtgcgcatatggtcaccggtttgtcgagttggaagatgcagaagagattgtagaggattctcttttatggatttgggaaaatcgggaaacactggttatcgagtcctctcttaattcttatctttttaagatggtgtatcgcagggctttgaacaagcttgcacatatcgatgccacccaacgggcggatacccgcttttatgaagaaatgcaggaaatgctgcaagatacggactattaccagattgaagaacttgtaaaacggattgaagatgctatcgcggcactgcccgaaagttatcgggaagcttttgtgatgcaccgattccgggatatgagttacaaggagattgcagaaacactgggggtatcgcccaaaacaatagattaccgtattcaacaagcgttaaagcaactgcgcgtggatttgaaggattatcttccgttactactacctctcttatttccctagagagacgaaacatataagtaaccaccaatattatttcatttggctattacctgtcagctaaagtattaatagataacttgcgttgtattaaagataaacttccgttcctctaaggcaaaagttccctttgacctgaaacaaactataaacgaaagttccaattatataaatgcaaccttcatttttataaatgcaagtttcatttataaaaacaaagcttccgtttatagatttctcttagacaaaaacaactttggcagtaaggaaaaggaagtttgcaataaggagacagtaacttatctattaactaacttcatctctttctataaggaagtgtaaaccagaaagtagatcctttaccttcttctgaatctactcctatttttcccccgagacgctcaacaatcgtacgacaaatggaaagtcctaagccggtaccttgaatgaatgggttatattttacgaatcgttcgaaaacatgttcacactgttcgtttgacataccacagccggtatctgatacataaaaataaatagtatcggtgtctgtcatacgataccccatacagatagtgcctgtttgagtaaatttgatagcgttattgacaaagttggcaagcaattgtatcagtcgattcttatcaatataaaaaagacaacccggcaagcgttcggtaaatgcaagggtaacatcactgtttttcaaacgtaaccgcatactttgttcaatttcctccattgtctgattaacatcgatcgaggaaggatagaaatcaaatgttccggcttcaatcttcgacaaatccagaatatcattaattaattggagcaacaagtcggtatttgtttcgatgatatctgcgtactcgcgcatttcgacaggatcttctgtatggggaagcatatttgaaaagcccacgattgcgttcaaaggagtacgtatttcatggctcatgttcgccagaaaggcagatttcaattgattagcctgctccgctttctccaccgcttcactcaaacggctatacgctttccgaagaatacgaatataatagacaatagcagctatcaaaagtaatagaaaaacagaactagcaataatcttaacatagtgttgctgaaaaaaagtttgaggtttatcaatatatactgcatcgtcgggataacgacttgacggaatattataagactttaatacaggataacaaagataggaatttccttcccctcccactccacccgagatattgcgggcttgttctccattcaatatgcgattcaggatttccagcaaagaatcgcaaaaagactccgtcgatacataatatcctcctgcgaaagtattgttcgataaattttcgggagatagcaaaaacagaggtgagggagtaaaattggttataatttcctgtatgtggtcgaaaaggtagttgttatcattttcattatgagactcaaaccaggaatagtaaataatccctgtattaggtttataactatgcagggtatccagcaacatttctgtcgataattgagtggtagaaagcagatccagacgtaaatccggaaaattctcttcgacggcttcctttacatctctacgggtttcttcactaatatatctgtcgtctgaaataaatgccagacgttgcatatccggtattagtttataaatcagttccactgtttccttcacataataatgctgctttaaaagtgtcagattgtagcctcttctccattcttcaccggggacactattggtttctgttagtggagcatgagacagcaaaacgtcgagagaagcaggcaggcggtcgcgggcatttgtcactattaccggaacatctttccatacgtcatcaaacagttcacggccaacaatccatcccggatctccaatcaagacgatggcagcgggagctaccgggtatttctcccgtaaatgggtgactacggcatctgcttccatcttattagccaaagctggtacggaaagagattccgctttggcagatatcccctgcttctgaagagcatcgtgtatacaccaatagaaatttttagcccaaggcagattaaaattaatggaattcaaaaccagtacttctttatttgttgtttcagttcgggctgacacagataataagaatccttctataaaaaggaataagcctaagaatgagatggttcggagtacttgtttcatttgtgatgttctataatagctacggcaaaggtagtatttatttccatttcgcaaaaaaaaggcatctcaaaattaattgagatgccttatattatataaaaccaggtatcaaagagttatttcttcaacaagatagtaaggctttctttcaaagaacgaatgatactttccgcatccgcctgtttcttgcgttcaagttctatgacggctgccggagcattgttcacgaatttctcgttgctcaatttcttcacgatgccttgcaggaagctttccttatgtttaagttcggccaacagacgagtgatttccgcatctatatcaatcatgtcaatcaatggtacggcaaattcggtcgttccaaccatgaaagaagcagcaccttctgcttttttgaatactacattaatagcagaaaggttacacatcttgataatcaccggattcattttttctaccggatgactatccacaacctgcaattcgagttgttccttcaaagcaatattcttctgcaaacgaatgctgcgaacattgctgataatttccttagccaattcaaattcttgcaggaatttctcgtttacctcaagaggctctttcatgagagtaaccatcaaacttgcacccggttcgcgctcacgcagttgttgccacagttcttctgtgataaacggcatgaaaggatgaagcaactcaagcaaacgttcgaaagaactaagcaccatactataaataaagccattaatgggctgtccataagcaggtttcacaatttccagcaaccaggaagagaactcatcccagaacagtttgtaaaccaacatcaatgcttcgctcaaacgatatttagagaacaaatcggcaacttcaaccgcagctgcatccagtctctggtcgaaccattgaacagccagatgagcctcgggtggaactggaatggaacctttaccattagtccatcctttaatcagacggaaagcattccatatcttgttgcagaagttacgtccctgttcgcaaagggcgtcgtcgaaaagaatgtcgtttccggcgggagctgaaagcatcatacccatacgtacaccgtcggcaccatacttttcaatcaattccaatggatcgggagagttaccgagcgatttagacatcttacgtccctgtttatcacgaacgattcctgtgaagtatacgttcttaaacggcatctgtccctcgtattcgtagcctgccataatcatacgggctacccagaagaagataatatccggtcctgtcacaaggtcgcttgtcggatagtagtatttgatttcttcgttgcccgggttgttgattccgtcgaacaaagagataggccacaaccaggaagagaaccaagtgtccaggcaatcttcatcctgacgaaggtcttccattgtcagggcggcattacccgtcttttcttttgcttttgccagagcttcctcgggagtagcggctactacataaccaccttccggcaggaagtatgcaggaatacgatgtccccaccacaactgacggctgatacaccagtctttgatgttttccatccagtgacggtaagtattcttgtatttggcagggtagaatttcagatcgtcgttcattaccggaggcaatgccatatctgcaaaatgttgcatcttgaggaaccattgcatagacaatttcggttcgatcacaacgttggtacgttccgaatatcctaccttatttgtataggcttctattttttcgagcaatccggcagcttcgaggtctttctctatttgtttacgaacatcgaaacggtccataccgatatacataccggcagcttcgctcaatgtaccgttgtcattgaaaatatcgatactaggcaagttgtatttttcacccagcatatagtcgtttacatcatgggccggggttactttcagacaacccgtaccgaattcgatgtctacataatcatcctcaatcacaggaatgacacggtttaccagcggaacgatcactttctttcctttcagccattcgttcttcgggtcgttcggattgatacacatagccgtatcacccataattgtttcaggacgggttgttgcaacaaccgcgtagcgaccttccggatcaccttctactttatagcgaaggtaatacagttttccgtgttcttccttgtagattacttcctcgtcagaaagggcagtcaaggctttcgggtcccagtttaccatgcggacgccccggtagatcaatcctttatcgaacagatcgacaaataccttgattacactttcgctacgtttctcatccatagtgaaagcagtacgatcccagtcgcaggatgcgccgagtttacggagttgtttcaggataataccaccgtgctcgtctgtccattcccaggcatgtttcaagaattcgtcacgagatagatcggttttcttgataccttgagaagcgagtttgtttacaactttagcttcggtagcaatagaagcgtggtcagttcccggcacccagcaagcattcttgccttccatacgggcacgacgaactaaaatatcctggatggtattattaagcatgtgtcccatgtgtaacacaccggtgacgttcgggggcgggatgacgatggtgtaaggttcacggccatcgggttttgaactgaataatttgtggtccagccaatactggtaccactttccctccacgtcagcgggattgtacttacttgctaattccatattgttttatgtatatgataatgtatattctaaaaataacgggtgcaaaattaataatttaaattcaaatcttaccaccctcggggtgtttctgtgcacggaaagagaatttatatccctcataaagagcgaatccgtagaacagggcagtcatcgacattacatttttcaacagaatagagaatatctctccatagtctacacctgccaggacttgaaaatagcccatttcataatcttgggagatatacccgataatagacaagaaatcacctaagatgcaactaaccagagataatgccgcaccggtaattccgaaaatgggacgtattcccttgccctgccgcatcgcaaaacctaccatgaatccgatagcaatgggcataaatcctatctgacgacctgtagaaacggagatcagcccccatgccaccgcaccaacgatgcatgcgacaactgcacacaatattcctttgggcagattctcttcggcaagcatttcctcttctgtcatgaataccggaaagtcttccggcttgggaggcgctaatctttccagttccttatcttgctcaaaactgtcacattcttcttcaaaagcgggaagttctccggtacgtttacaaacgagtccttttccgttcacaaaatcacgtgacacgcaattcctgcaatacttttctatttcttctgatgtagccatcttatccggtttatgttgaataactttctctgattacgcaggtacacaaagtcactgttaacagattttttgcaaatatagaggtattttttcgcgcgacgtttattaaatgcatatttttgttgactgattttatacaaatgatgaaaaataagccaaatgtaagatatgtagccttaggagcattattaatcctggtgtggctaacgcaatggattcctgctctggcaacgatctattctcaaacaatctatccccttatctcctacgtcctgtcgtttttttccggtttatttccttttgccataggggatttatttattttccttagcatcacaggcgtgattgtttatcccttttatgcccgtctccgcaagaagttgccttggaagaaaatcttattgcgcgacggggaatacttattatggatttatgtatggttctatctggcatggggactgaactactcgcagaaaaatttctatcaacgaacagaaatcccgtataccgcctatactcccgagattttccaagaattcgtagatgattatattactcaactgaaccgttcgtatactcctgtcaatagtatcaatcaagatttgatacgagaggaaactgtgcgaatctatcatcagttaagtgatagcctgggcgtaaatcgccctccacacgagcatccgagggtaaaaacaatgttattcactcccttcatttcgatggtaggggtaacgggtagcatggggcctttcttctgcgagtttacactcaacggagatttgcttcccgttaattatccggccacttatgctcacgaactagcccatttattaggtatcaccagcgaagcggaagctaatttctatgcttatcagatttgcacccgttcagaagcgatgggaatccgtttttccggatatttttctatattgggacatgtattgggaaatgcgcaaagattactcccggaagaaaaatacacccgactgtttaaacgcatccgaccggaaattatcgaattggctaagaataaccaggcgtattgggctgccaagtatagccctgtagttggtgctgtgcaggattggatatacgatctttatctgaaagggaataagatagaaagcggacggcagaactactcggaagtagtggggctgctgatttcctatcaggagtggaaaaagaaataa

SEQ ID NO: 8125 - DNA, 906 bp, Unknown
  gut microbiota DNA sequence
ggaaacacaattagcactgaacgggcaggtgaaatcaaccattctcaaaaataaactgaaagatattgcgcttagcgtgatcgtgaagaaggacgatcaattcataaccggaggaaccgtgaccgatgaaaacggccgtttcaccattccggtggaagattttgaaggaacgacggaggcagtgatccaaacccggaaagtcggtaaagaacgtaataaggatgcttctatcctgatcgaccgtaatttctcccccgctccgcgggcttacggctacaaggagcttcatccagaatggaaagacttggcctactggcaacagaaagccgagagttttgattctctatacatggattctatccgaaaggtagaaggactttatgtattggatgaggtggaaataaaaagtaaacgccggcaaggaagtaatatggctactaaaatcaatgagaaaagcatcgacgcttattacgacgtacgccgttctgtagatttattacgtgacaatgggaagattgtcacaactattccggaattaatggaaaagttgagtccgcaattcgattgggatcgtagcaatgacaagcttacttatcggcagaaaccgatctgctatattatggataatcacattttgtccgaaacagaaactcaaatgatgttgaccgaggtggatggattggcctctatcattattagcaaaggcactggaggtatcgatgacgacattatccaaaatacaaagatgtccgaggtgaccgatagcacgggagtcgatataagcaaactggataaatatagtgttttctacctgattcccctacccagacgcgatgtgttgaataaaagtcagagtgccgtacttggtacccgacaaaccgttatccagggatatacccgtccttt

SEQ ID NO: 8126 - DNA, 11294 bp, Unknown
  gut microbiota DNA sequence
aaagattgttttcaggataacggtgcaaatataggcggttttaccgatactatccaaattataaaacatgtcatataacatctttttgaaaattctttggatttattatcatttgaagcaaaatctcctgtaacttgtccgttataggtgacaaatataggataattttttaaggagccctaatttctgtttaaaaatccgcaaaaaattacttttccgggtagttttcgtccgtttttccacgatgttttaacactttggcgtcaatgaagaaaacaatctcctcggcaatattggtaatatggtctcccgaacgttccagtttacggaacacactgaccaaatctacgcaggtatgtacagcttccggatgttcgatgatatagtcagaaagaatacctgtcgcatccgcattgatttcatccagcaaattatccttggcaaacactcccgctgccaaatcattgctttcttcattcaaggcacgcttcgccagttccagcatcgacaacacttctgcctgcatctctgccagacgaagacggttcaataattccgcatccaacaccggctctttgcaacgaagtacaaagcgggcaataccttccgcaaagtcgcccaagcgttccagattcgtattgatcttcagcatagccaatacaaaacggaggtcaatcgccaccggattatataatgcgataatatcttccacatcgctatctatcttcaattcaaaagcattcacccgacgctcacgaaccatcacttgttgagccaactccttgtcgagggtcaacacagcctctccggcacggtcaagctggttgtataccaaggtccacatttcatcaatttccttcttcaataggataagttccgattctataaactttaccatagtctattatatataaatgattaatattttgctaatgacatttcagaaataaatttcaggcacggatttcacgaattacccgaagcgtcccgttatgtaattctgggtagcctctttctccggattggtgaatatccttttcgtctgatcgaattccaccatttcgcccatatagaaaaacgccgtcttatcactaacacgggctgcctgctgcatattatgcgtaacgattacaatcgtataatccttcttcaattcatggatcagctcctccaccttagccgtagaaatagggtcgagtgcagacgcaggctcatccatcagcaataccgaaggagagacagccatcgcacgggcgatacaaagccgctgttgctgtccgccggacaatgcataagccgactccttcaacttatctttcacctcatcccaaagagccgctcctttcaacgtttcctccacacgatggcgaatgaaagcattgtcttttattccattaacacgaagtccgtaagctacattctcaaatatacttttcggaaaaggattcggacgctggaacaccattcctacattcttgcggagttcgtccacttccacccctttcgcatatatattatgtccgtcgatacggatttctccctccagacgggtagcaggaatcaaatcattcatccggttgaaaagccggaggaaagtagacttaccgcaaccggacggtccgataaaagcgacaaccgacttttcctcaatctgcatactgatacccttcaatgcatgaaaatctccataccaaaagttcacatcacgcgcatctattttcactgtatccatatactaatctagtttgtttttactcttttctcaaaatactttctcaatgcattggccagcagattcacgaacaggataatcataatcaacaccaatgccgtaccataagccagcggcaattgtgcctccatatccgttccactcgtggaaatcacatacaaatggtaaggcaatgccatacactgatcgaaaatacccgttggcagttgtggcaggaagtatgcggcacaagtaaacagaatcggtgccgtctctcccgaaacacgtcccaaggcaagaatcaaccctgtgataatgttcggcatccccatcggcagaatgacatgccagatcgtctgcaactttgttgcccccaaggcccggctaccttcacgcatactgtcgggaatggctttcaaagcttcctccgttgtccgaatgaccaaaggtacgcaaagcaaacctaatgtcaaagaaccggccaaaatactatcaccaaatcccatataattgacaaacagcgccataccgaacaatccgaatacgatggaaggaatgccgctcaagttattggtcatcacccggataaagcgtaccaacttacctttcggcgcatactcattcatataaattccgctcatcacccctatcggaaaagcgaacagcgcactccccaccatcagatagaaagtaccgacaatggccggccatataccgccacctgtcatcccgtccgtaggagccgaagtgataaaatcccaactgatagcgccgattcctttatagacgataaatcccagaattgcaaacaatatcagtacaatgcaaaggctcaacagccggaaaatcccgaaagcaactttctgcgaacggtgtttagctttattattactccgtatttccatcttatttgctacgttttaatcctttagaggaaatatattccacactaaagttgataatcaatgtgatgaagaacagtacgacacccaacaggaacaacgcctgatagtgaggtcctcccgcaggagcttctcccaattcggctgcaatcgtagccggaatggtacgcaaaggctcaaggatcgttgtcggaatcacagccgcattacccgtcaccatcaatactgccatcgtctccccgatagcacgtccgataccgagtaccacaccggatgtaatccccgaaatagaataaggaatcactaccttatatatcgtctgccattgcgaagcgcccaatgccagactcgcctcccgcatcgcacgcggacagttgcgcatcgcgtcttccgtcaccgttataatagtaggcaatgccataatagccagtacgatacttcccgccaagccactctctcccaccggaagatcaaacaatttctgaatcaacggaacaatgacaatcaatccgaaaaagccataaacaacggaaggaataccgctcaacagttcgataatcggttttagccagttccgcactttcggatttgccacttcagacatataaatagaaaccgacagcccgaacggcaaagcaaaaaggatggcaaacaggctcacccacaacgtcccggtaatcaacggcagaaagccgaattgagcagccggagtagccgtaggaaaccattcagcacccgcaaatacatcctttacggaaatagtgttatcctctatgaaatgtaccgtgtccggatgaacaataaatttctgcggaacaaaagctacgatgccgggtgttttctccaccagctccgtaatcttatcgcctgcatattcataagcaggtcccaactcctcttccgtataatactgcgttatgtcctccaaacgaaaaacccggatagggagatcttccccaccgagttccttccagtttgtaatctcttcgtcaaaaacattttttatctgtgcggggctcaacacgctgaccttgttgctcttattcagcgccaacacatatccctcttcaatcactttactcttgaacagcccgaaagcttcagtgaaaaggaagagtacaatcagcagaatagtaatacttgtcacaaagccgctacaagtcaacattccttctataatcttttcaaatacctttttcatatacctgctatgatttctgatgcaaagaaagcgtctctttattaaggaggtgtgactaacgtttgaaggaaatgtttcaatcatgttacgtttgtgttacaagtaccatttccactccggatgaaatgaaaatgtaatatccgattgcttaatttgcaacgttaataaaacgaagaaatatgaaagtgagaagaaacttattaatcgccctttccttactctcgctcggtgccaacgcacaacgtattaaaggtagcgatacggtactgcctgtcgcacaacagacagcagagcggtttatgaaccagcacccggatgcccgtgtcacagtgaccggtggcggaaccggtgtaggtatctccgctttaatggatcatacaacggacatcgcaatggcttcccgcccgatcaagttcagcgaaaagatgaaaataaaaggagccggagaagaagtagacgaagtgattgtagcctacgatgcccttgccgtggtggtgcatccctccaatccggtaaagcagctgacccgccaacaactggaagacattttccgggggaagataaacaactggaaacaggtaggcggagacgatcgcaaaatagtggtttactcgcgcgaaacatcgtccggtacttacgaatttttcaaagagagcgtactgaaaaataaaaactacatggcaagcagcctttctatgccggcaacgggtgccatcatccagtctgtcagtcagaccaaaggagccatcggatatgtcggactggcatacgtatctccccgtgtcaaaacgctttccgtatcatacgacggcacccactatgccacgcctacggtagagaacgccaccaataagacctaccccatcgtgcgcccgctttattactactataatgtaaaaaataaggaacaagtctcacccctgattcagtttattctctcgtccgacggacaggacattataaaaaagagcggttatattccggttaaataaaaaaaatgtcctacttttgtagcctaaatacagataacattaaccgttatgacagatattaaaaacgaagaagcaggcgaaaagaaaagcttgaactttattgaacaggcagtagagaaagacttgaaagaaggtaaaaatggtggaaaagtgcagacacgcttcccgcccgaacctaacggttaccttcacatcggccatgccaaagctatttgccttgatttcggcatcgcagaaaaacacggcggtgtatgtaaccttcgtttcgacgacacaaacccgaccaaggaagatgtggaatatgtagaagctatcaaagaagatattcaatggttgggctaccagtggggaaacgaatactacgcttccgactacttccaacaattatgggacttcgctatccgcctgattcaggagggaaaagcatatattgacgaacaaagctccgaactgatcgcacagcaaaaaggtactcctacccaaccgggtgtggaaagcccttaccgcaaccgtcctatcgaagaaagcctcgaactttttaagaaaatgaatagcggcgagatcgaagaaggtgctatggtgctccgtgccaagattgacatggctaacccgaatatgcacttccgcgatccgattatttatcgtgtagtgaaacacccgcaccaccgtacaggtactacctggaaggcttatccgatgtatgacttcgctcacggacagagtgacttcttcgaaggagtaactcactcgctgtgtacactcgaatttgtggtacaccgtcctctttacgacctcttcatcgactggctgaaagaaggaaaagacctgaacgacaaccgtcctcgtcagactgaattcaacaaactgaacctaagctataccctgatgagcaaacgtaacctgctcacactggtaaaagaaggattggtgaacggatgggacgacccccgtatgccgactatctgcggtttccgccgtcgcggttattcaccggaatctattcataaatttattgataaaatcggatataccacatacgatgccctaaacgacatcgccctgttggaaagctccgttcgggacgacctgaacagccgtgccacccgtgtatcggcagtgatcaaccccgttaaactaatcatcaccaactatccggaaggacaggttgaagaactggaagcaatcaacaacccggaagacccggaagcaggaagccacctgatcgaattcagccgtgaactgtggatggaacgtgaagacttcatggaagacgctcccaagaaatatttccgcatgacaccgggacaggaagtacgcctcaaaaatgcctatatcgtaaaatgcaccggttgcaagaaagacgaaaacggcgtaataacagaggtatattgtgaatatgacgctaatacccgtagcggtatgccggacgcaaaccgtaaggtgaaaggcacgctccattgggtaagctgcaatcactgcctgcaagcagaagtacgtttgtacgaccgcctgtggaaagtggaaaacccacgcgacgaactggctgccatccgcgaagctaaaaattgcgaagcactggaagccatgaaagaaatcatcaatccggactcattgaaagttctgcccaactgctacatagagaagttcgcagctaccctgcctacactctcctacctgcagttccaacggatcggttactttaatatcgacaaagaatcaaccccggaaaaactgattttcaaccgcacagtagggttgaaagatacgtgggggaagattaataaataacctttcaccacagattacacggattaacacagattagagaaataaagaataaaaatctgtgttaatccgtgtaatctgtggtaaacaaaattaataaaaatgggtagaaagaactcaccatcagccaaaaagcaactagccacacttatcacaaactacgaaaaagcaaaagcagaaaaccgacaactttatctggatgctgaccaactggccgacatcgccgactggtatgcctccgaacggaaatttgaagaagcacaagaagtaatcacctacggacttaagatacatccgggaaatacagctttactcatcgaacaagcctatctctacctggacacccaaaaactgcaaaaagcaaagaaagtagcagattccatcaccgaagattttgactcggaagtgaaactgctgaaagccgaactattgctgaatggaggaaaactggaagaagcccaatggctattaagtacgatagcggatgccgacgaactggaaacaatcattgatgtcgtatttctctatctggacatgggatacccggatgcagccaaagaatggctcgaccgaggtaaatcgcgttatgccgaagatgaagaatatatggccctcacagccgattatctggcatcgacccaccaagtagaatcggctatcatctattacaacaaactcatcgacaaatctcctttcaacccttcctactggatgggactggtgaaatgttactttgttcaggaacaaatagacaaggccatcgaagcctgtgattttgcgttggcagccgacgatcagtgtggagaagcctacgcttataaagcgcattgttttttttatctgaacaattcggatgatgccatcgagaattaccaaaaagcgatcgaacttaaatccatcccccctgaactgggttatatgttcatgggaatatcctacggcaataaagaagaatggcagaaagccgatgactattacgacaaagtaatcgcacgttttgaagaagacggagacagacagtctgtcctattaatagacacatataccagcaaagccttcgccctgtctcatctggaaagatatgaagaagcacatcagctctgcgagaaagccaaagagataaacccgaatgaaggattgatttatctgacagagggaaaactatatctggcagaggagctggaagacgaagcagccttgtctttcgaaaaagcgatagagattaactctaacatagaaatgtggtatatgatcgcctctgcttattcggaaagtgactatctgatagaagccaaagaatactttgaaaaagcgtaccagatgaatccgaaatacgaagatgtgacggagaaattgagtgtgctttgcctcatgcacggtgaaatcgacaacttctttaaatacaacaaagaatgtgaacatccactggaagaagatatgattctggatctgttaaatagtcccgaacatagagaggaagatgaaagaactctcaaagaagtgtgggaacgcatgaaaaaagagaataagaaaaagaagaaaggaaaaaaataaatcagattaataaattctatcctcaaaaaacatggaatcagtagcagaacttcttaaatgggtattagaaaatttgaactattgggtagtcaccatttttatggctatcgaaagttcttttattcccttcccctcggaagccgtagtgccacctgccgcatggaaagctatggcagacgacagtatgaatatctttctcgtggtcctatttgccaccataggagcagatatcggtgcattagtaaattattacctggcgcgttggctgggtcgtcctattgtctataaattcgctaacagccgtttagggcacatgtgccttattgacgaagaaaaggtacaccatgcagaagaatatttcagaaagcacggtgcagcctccactttctttggccgtctcattccggctgtacgccaacttatcagtattcccgcaggattagccggcatgaaattaggacctttcctactttacaccactctcggcgctgcgatatggaacagtatattggctctactcggatacctgatctaccggtttacagacctcaaaaccactaatgacgtctatgtaatggcaaccacatacagccacgaaatcggctatgtcattatagcagtggtggtattggtcatcggattcctggcttataagggactgaagaagaagaaaaaataagtattaagcattaggtattaagtattaccatgactaatacttaatacctaatacttaaaaaccaatccttagaaattgaattgaactcccactcccaagatctctttaaattgtacacgagatcctttggtaccatccttttgtacaatcttcacatcatcgtcatacatcaggttagtagtgagcgtggttgaaaaccatttattgataatcatatttatttgcacctcccagttcacatctatgttcaatggcttgtgcagataatcggaatataaatccaaacgcgaatatactgtcatattcttcaaaaattcatatttggcttcccctttcaagttagcaccgaagctggataacaggtgtttgcccggatccactccataggctccttcgtccgagagacggtcattgagaacaaatgttccgcgccatgcagcaggagacaatacaacggtaaatatcttaccgggatcataagtaaagcccaaaccggtagtcaaataagcgggagccataaattcggagatagcaacatctttattgacagaatagtcatatccgggagagaactgcgtctggaaagtggcgaatgcgctggcataccaacttttggcaatagcatagccataattcgtattcaaataaatcttatcattagccttcctggttccgtcgtcaccggtcttattcaatccataagccagttcgatacgattattccacaaatgttttcctttcttataattaatttgataagtgccctgcaagtcaaaggcaacagagttatcacctccggcagcccagttagtcaggctcacctgtgtcagtttcagtccggcaaatccttcttttgtccagggagaagtttgtgtactatcggcagtttgagccgacagggttccagcacccatacatagcagggtgatgaatagagttttcatcttgttcatgatagttgaggtttagtgtagaaaaaaacacaacctaacaagaacggagccttggcagtttaccaagcctttttaccagttcccattaggtcaaaatctttaagataagagcagtattaagtattagccgtattcgtttattagctgcaactaatagttaatacctaatacttaatactccatattctatattactttacagcagctaaggctttgtcatagtcaggctcctgggtaatttcaggaacaagttccgtataagcaatcttgccatccttgccaatcacaactactgcacgggccaaaagtccagccaacggaccgtctgccatacgcactccgtaactttcgtcgaaatcagagaagcggaaatcagacaatggaattacattttcaataccttccgttgtacagaaacgaccgtgcgcaaaaggaaggtccttagagatagctaatactaccgtatctttcagtccggcagccatcttattaaacttacgtacagaggttgcacatacgctggtatccagactgggaaaaatatttaaaatcacatttttaccattcaaatctttcagagagaaagaagataaatctgtttttaccagctcgaagtcaggagctaccttacctacttgtataaattcaccgattagtttcaccggttgtcctttgaaatttgttgttgccataatgcatctatatttaaaatttactttatataggaaacaacgattcccccaaatatgttcacggaaaaccttttctaaattgaatttgttattccacaacgaaatcaccctagtattcaatttaaaatataaaatgtatggaaactgtattcaatgagattcaacattcagtaaaaaattggtggacttctcttcttttgggaatcgtgtatatcattgtagccctttggctcatgttctcacccgtgagcacctatgtagctttaagtatcattttcagcgtatcgatgttgataagcggtattttggaaattatcttcgcttttagcaaccggaaaggtgtcccgagctggggatggtatatcgtaggcggactgatcgaccttgttctaggtatctacctgattgcctacccaatggtcagcatggaagtcattccttttatcatagccttctggcttatgttccgcggcttctcctccaccggctattccatcgacttgaaacgttacggaacccgcgactggggctggtacatggctttcggtatccttgccattctgtgttcccttttaatattatggcaacccgccataggagcactctacgcagtctacatgatttcttttactttcctcatcatcggacttttccgtgtcatgctttcatttgaactaaaaaatctgcataaaagaaaataaaaatctttcggcacttactttggtattttgtttatctttgtaggcaatttacatgaatcaattaattaaaaaggaagaaaattatggcaatgcatacatggtttgagtgcaagatccgttatga

SEQ ID NO: 8127 - DNA, 19969 bp, Unknown
  gut microbiota DNA sequence
atttttgtgggcaaagatggattcgaaccaccgaagtcgaaagacagcagatttacagtctgccccatttggccactctggtatttgccctttttttgcttttgaggaggtttgtttctcaattgcggtgcaaagatacaactatttatttaaactccaaacaaaatcgatcatttttattgcagtaattgcacattcgtctcctttgttacccagtttgccaccggcacgatcctctgcttgctccattgtatttgtggtaattaatccgtaaataactggtatatcgccagttgcgtttaactcggtaattccctgggttgctcccatacaaacataatcaaaatgtggagtatctcctttaattacgcaaccaattgcaataattgcatcaagatcgcaattttccatcatttgattggcgccaaaagttagttcgaaacttcccggtacagtttttaccagaatattttcgtcttttgctccatgtttttttaatgtatcgactgcgcctttcagtaaagcaccggtaatattgaagttccattcggatacgacaatgccaaatttcattgcttctgcattcggaacggaattgaaatcatattcggataagttatggtaagctgttgccatagtaaattaaaagttgagaattataaaatgaagtttgaaagtatgggaaattaagaagaaaggcacggatttcacggattccacggttttaatagataatccgcttaatccggtgtaatccgtgcctcgatctccttatataataaggtattattttttcatcaatttagcctgttcgatatatttgtcgatgtccatagcttgataagactggaagtatttatccttgatcttagtgtaagcgtttactgcatcgtcatattttccttgttttaccaagatttctccggcttgtatcaggaaaatcgggcttaatgtgttattgtcagctttgtctgctgccgacagtaaagtagaggcagctttgtccagttgaccaagttgtgcatagcagttacctgcagcacccaagattgccggagcaaccatttggtcttttccattgaagctatccagcatcttcactgcttcttcatatttgccaagttgtgcgtagcaaataccagcataagcttttgccaaattagcagcttttgttccgctgtactcatcagctactttcaggaaacctgtgtaaccgatgctgtcaccgtttaaagcctgttcaaaagcatcctgttcaaagtattcctgtcctttgaaaagagctgcttgtgctttttcttcacgtggttcagcatagaggtttttgtacatgataaaacctgctacaataataatcacagcaacaacaccgccaataattgcgtttttgtacttgataagaaatgcttccgattgtgtcagtgcatcttctacgttcagatgttcgttctgattcttttgttctgccattttatatgattctttttgttattattcacagtttgatatttcgactcgcaaaagtagtttttttatatctacaaatgaaatttagaagcatctttttttgttttacacccgaaaaccacgaaaatcttgctacttttgtgaacaaattaacgtgtgcacaatgatactgaaacgaatatctatattaaattataagaatctggaagaggtggagctgggattctctgccaaactgaattgtttttttggactgaatgggatggggaagacgaatctgctggatgcagtgtatttcttatccttctgtaaaagttccggcaatccgattgattctcagaatattcgtcatgaacaagacttctttgtcatccagggtttctatgaagcggaggacggaactcctgaagagatttattgtggaatgaaacgccgttcgaagaaacaatttaaacggaataagaaagaatatagccgtttctcggatcacatcggcttccttcctttggtgatggtttcacctgccgattctgaattgatagccggagggagtgatgaacgtcgccggtttatggatgtagtgatttcgcagtatgataaagaatatcttgaagcactgatacggtataataaagcattggtgcagcgtaattcattgctgaagagtgagtttccggtggaggaggaattgtttcttgtatgggaggaaatgatgtctcaagccggtgaaatcgttttccggaagcgtgaagcgtttatccgggagtttattcctattttccaatctttctattcttttatttctcaggataaagaggctgtgggattatcttatgagtctcatgcacgggatgcttctttgttggaagtgttgaagcagagcagggagcgggataagataatggggttctctttgcgggggattcataaggatgagttaaatatgctgttgggcgaattcccgataaagaaagaaggctcgcagggacagaataagacatatctggtggcgttaaaactggcacagtttgatttcttgaaacgtacgggcagaactgttcctttattattattagatgatatttttgataaactggatgcttcccgcgtagagcaaatagtgaagttagtgggcggagacaatttcgggcagatatttataacggatacgaaccgggggcatctggaccgtattttacataaggtaggtagtgattataagatatttcgtgtagaagagggtacaattcaagaaatggaggctgacgatgaagcgcaatgatgccgaacaaataggaaaactgattcaacagtttcttcgtcaggagagtttggaatctccgctgaacgaacaaagactgttggatgcctggcctcaagtcttaggaccggcggcggcttataccagcaatctttatattcgtaatcagacattgtatgtgcatcttacttctgctgctctccggcaggagttgatgatggggcgtgaagtattggtgcgcacactcaatcagagagtcggtgctatggttattacaaacattatttttcgttgaggaaagggattctgtctataacctttatacccagcttgcgaagtgtttcggttgcacggctgtaataaaaaggagtttctagatattgattattgtgagcatctacaccgatgatagcggtgcaaccttcatgggcggctactttccagaaatccgggtaaggaatggtggtgattccatgaatgtcattatactcttcataaccaagattatattccaacggtaggtttaaccgtgctgctgtccggcagatatgtctgctgaccagtttgcaatgatgatcgaattccgggtaggaacgcatgaataaatccggatgggcaaggtaggcaaatagtccgctttccatcccttcaatagcactctcttcgtagagctcgagcatgtctaccgaatctgtattccggccgaaatagggaaacttctcatctgtatgaaaatggtgatttccgaagatgatgtaatccagcttatattctttgatgattccttttaaccagtgtatatattcaggaaagtattcacattccaatcctatttttatactgatttgattcttgtatttttcttgtagcgaacggaggctttccacatagcccggcaactcttcagggagcatgcggatgtcggagatataattggtgtggtatttccacggagtgtggtctgaaaagcctatttcttgatagccgcctttgatggcacttaaaacaaattcttcgtcactccctgtcgcatgatggcagcgggtggtatgggtgtgataattcgtcttcattgattgttataattatatccatgcggacgtcgaatgattccgcaggaacttcttctactagttgaaacgggaaacaaatcccagctttataggctgatggtatgcgtggcaagaggcggtcgtagtatccttttcctcgtcccaaacggttacctttagcatcaaaagctactccgggaacgacgatgaagtcgatggctgcatagtctgtgaatgcttccccggttggttcttctatgccatagacaccacagattgacatattttcaggcccggtatatatccgaagctccaaatcatcgcctaccactacggggagcaagattcgtttcttattgctccattttcggataaactcatgtgtgtctacttcatcatttagcgaatggtatagtagtacggtattggccgccctgaaagccgggtgggcttcaagggcggtcagtatgttagctgattgcagctttcgcatagtcgaatccgcgtgttgggtcttcagtaatgctatacgcttgcgcagttctttttttctttccatcttttttgtccttcgtcacttcttcctcttcaacggctaccggagcttttgggaaagcttctcctttttcgagtatctcaatgcctttaatgacggtagcatctgtcttgttaaaatattgaagataagcttccagtccaagcatattgtagatgatgttaccaaagaggttcttctccaaaagtttgtatgacttctgaatgaggatatttcttcttttcactcctttgctgtcggcaaaacggacaaactgttctaccaatccctgatgacgaagataattcagcaattcttcctctgtttcatattggctaagtttcttccggttattgtcggtgtactggaatgtgaattgaatagtcagtccccggttgataacagtagaaagataagaggtgactcccgttgtatcttgcggtacgaatatatccggcatgataccaccaccgccataaacagtacgtcccaggctggtgttatagcgttcgctctcattctgcttgatactgtcgcgtgagaaaaattccccatgttcgtaacgggtatataaatccagttcgtagttacgatctttaccgctttcgtatgggcgttggatacaacgtccggatggagtgtagtagcgggcgattgtcaggcggatagccgaaccatcactgaagtcgatcggttgttgcacaagccccttaccaaaggaacggcgtcctacaactgtaccccggtcgttatcctgaatagctccggtgaagatttcactggcagaagcagaaccttcgtcaatcaatacgacgagtggcattttctgacagctacctgtaccgttggcgaattcttctgcacgtggatatttacggccttgagtgtatacgattaatttgccttcgggcaggaactcattcaccatgcggatggcagcctccatatatcctccggtgttaccgcggaggtcaatgattagacctttgcattttttatggttgagttgtgccagtgcattcaacaattctacatgactggtacgaccgaatttgctgactttcacgtaacctatgtcatcgtttagcatataagctgcatcaacggtattttgaggaatgtctccacgggtaatgttgaaatgcaataagtctttttctcctgttcgtttgattcctaatttcacttgtgaacctttcggacctttcagagtgcgcatagcccgttcgttagttactttcttaccgacaaacaaactgtcgtccacggtaacaatacggtcgcccgccatcaatcctatcttttcagaagggccaccctgaacgactgcattcacatgaatggtgtcgttctgtatggtaaactggataccgattccgctaaagctaccttccagttccgagttgacttcttcgagattttgggcagggatataagttgaatgtggatctaattcggccagaatctgcggcatggctttttccactaaatcggccatgtttacggtgtcgacatattgatcgtctacaatgcgtaacaatgcgtttagcttattggaggaaccgttgataatacccaaacggttgccggcaaaatgcttggcataaaatgtaccgataagaatcccgactaccacgctgactgctatgatgacaggtgtaaaacgtgaagagttttttgtactcatgtctattccttttttaaaacgttcgtcttcttatttattcggagaggaatggttatctaattctgtgtagataacttcgattcccgcccgttttaataactcaattccatcttccaggcggtaatgttcggagtaaactacccgtttgatccctgcctgtatgattaacttcgcacattcgatgcaaggagaggcggtgacgtacatggtagcaccgtcgctactgttgtttgaacgtgctattttggtaatggcatttgcttccgcatgcagaacgtatggttttgtcagattgttttcatcttcgcatacattctcaaaaccggaaggagttccgttatatccatcggagataatcattttatctttaacaattaaagctcctactttgcggcgttggcaataggaattttcagcccatatactggccatgcgtatataacgtttgtcaagttctaattgtttcttttcagtgtccatgttgtttactatttattactaactacccggaaaaccatacggaaagtttgtttaccggatgccggtttgtataaaaggtataagttgttactgtctccttcgtaagatgtggctgcattaagtccctctataaaatttctggcgagttggtcgttaccataattacctgcagtggtaacagtagctttaaagctgttgtttttggcattggcgctccatttcccttcaaaagtactggttgcaatgacagttccttttatatttccgttcataacatctccatctactgtaccatcaaatacgatattgtatgtaccattcttattaagttctttgatacttgctttttcttgttcctcattttcccagaagggaaacatctcatgacctccatccacagtgatataatttagtttccacgtttttcctgtaaagatagcagctacatcgtccgaatcattacaccctgaaaataaaggaagcaatagtaataatcctactattttatagatattcttcttcatacggttatgtttaatacttaataccttatacttaatacttatttctttattccatttctgattaataaagcatcaatacttggttcctgtccgcggaaacgtttataaagtaccattggatgttccgttcctcctttcgacagaatattattgcggaacgagtctgcaactccctgattgaatattcctttttgcttgaacaatgagaaagcgtcagcatccagtacttccgcccatttatagctatagtatccggcagcatatccaccagcaaagatatgggagaactgcgtactcatgcaagcttccggcacaaccggcaatatttgtgcatccttccaggcttcctgttcataagctttcacgtctccttcaaaaggagtgtcgcgagtataccacgccatatcgagtaaaccgaaacttagttgtcgcagacaagcataggcaatattaaaattagaagcatctacaagacgttttattaattcatccggtaaaacttctcctgtctgataatgacgggcaaatgtattgaggaaatctttctctatggcgaagttctccataatctgcgaaggaagctccacaaagtcccaatatacattggttccgcttaaacttctgtaagtggaattggcaaacataccatgcaggctatgtccgaactcatgcaagaatgtttctacttcattgaatgttaataaagcaggcttattctcggttggcttggtaaagttcatcacaacggatacatgcggacggctgttttcgccagtctttttatctatccattggtctttgtaactcgtcatccaagctccggcgcgcttacctaaacgcgggtggaagtcagtatataagacggctaagaattttccgtctttatcaaacacttcaaaggcttccacttctttatggtaaaccggaatttctgtatttttccggaaagtaattccatataacttttcagctagtccaaacactcctttcttcacttgttccagttcgaagtaaggacggagcatttcttcattgatattgaattttttgtctttcagtttgtttgagtaataactccagtcccaaggcattacaacgaaatcatctccctgctcttcgcgggccagttcttggatttctttgtattcttgttgtgcggtaggagcgtatgcttccagcagttggttgagcagcttgtatacagactcactgttttcagccattcttttctttagcgtatattccgcataatctttgtatcccaatagctgggctattttcatacgtgtattggctatattttttacgatatcgatattattgaattcgttatcgtgcgtacattttgtattgtaagccatatacaatttctggcgtaaatcacgattgtcggaatacgtcataaaaggaacgtagcttggagcatgaagcgtgaacgcccatccttctttttcttcgctcttggctgtttcagcagcagcttctatgataattttgggtaatccggcgagactttccttttttgtcaacagcatctgataggcatttgtctctttcaggttgttttcactgaaagtaagcgtcagtttactcaactcgtttgtcaggcggcggtactcttcccgtgcttctccttccaaattggcaccatgacgaacaaaactgttgtatgcattttccagtaactgtttttgttcctgtgtcagttgcaaagtctctttctggttatacacttctttcacacgtgcgaataacttttcattcagtgtgatattattgctgtgttcactaagcaacggcataatcttttgagcgagttcttgcagatcgtcattcgtttctgcgctcaacatattaccgaagacggcaactactttatccagtaattcccctgattcttcgaaagcttctatcgtattgctaaaatcagccttttccggattctgtatgatagcctctatttcagcattttgcagcttgattccttcgaggatagcaggctcataatgttcagtttcaatccggtcgaacggcacggttccgtgcggcgtatggtattgcccgtagaaaggattctgggcgtttgttatattgctcatagtgcaaactagtatcaatgttattaataatctctccatagaagtacaaagctactaaaattgtcgcttattcaacggataacacgttgctttttaacaatatataaaatgaaatgtataaaaaaaccgctacggtttcccgcagcggttttctatatggttcaagcttctaattaagcgttaactgatgccatgtgagcgatcaagtcaagaactttgttagagtaaccgatttcgttgtcataccaagatacaactttaacgaaagtatcagtcaaagcgatacctgctttagcgtcgaagatagaagtacgagcgtcacctaagaagtcagaagaaactactgcatcttcagtgtaacccaggatacctttcaattcgccttcagaagcttctttcattgcagcgcagatttcagcgtaagtagccggtttagccaagttaactgtcaagtcaactacagatacgtccaaagtcggaacacgcatagacataccagtcaatttgccgttcaatgcagggattactttacctacagctttagcagcaccagtagaagaagggatgatgttgccagaagcagcacgaccacctctccagtctttcatagaaggaccgtcaactgttttctgagtagcagttgtagagtgaactgtagtcatcaaaccgtcaaggataccgaacttgtcgttcaatactttagcgataggagccaaacagttagtagtacaagaagcgttagatacaaattgagtaccttttacgtatgtcttttcgtttacaccgcaaacgaacatcggagtgtcatctttagaaggagctgacattacaacatattttgcaccagcttcgatgtgagcctgagctttgtctttgctcaagaacaaacctgtagattcaacaacgtattctgcacctacttcgttccatttcaagtcagccggatttctttcagctgtgatacggatagcttgaccgttaacgatcaatttgctgttttcaacatctgcttcgatagtaccgtcgaattgaccgtgcattgtatcatacttcagcatgtaagccaagtaatcaaccgggcaaaggtcattgatacctacgatttgaatatcgtttcttgtcattgcagcgcggaaaacgaaacgtccgatacgtccgaatccattaatacctactttaatcattttgtttaaacttttaagggttttataatatttgttcaaatatctctctacctccgcacttgttttattttcaaatgcggtgcaaaattacaaaaatgtttttatattcgcgcattaaattcacattaaatattgaaaaaagatgggaaagagtacatttttacaggactttaaggcgtttgccatgaaaggtaacgtcatagacatggctgtcggtgttgttattggtggtgcgtttggaaaaatcgtatcatcattggttgctaatgttattatgcctccgattggtttactggttggcggtgtgaactttacggatttgaaatgggtgatgaaagcggcagagatcggtgccgacggtaaggagatagctccggctgtgacattggattatggccagtttctgcaggctacctttgattttctgattatcgcttttgctatatttttatttatacgtttgattacgaaactgacaactaaaaaacaggcagaagtagcggctgctcctccaactcctcctgcgccaacgaaagaagaagttttgttgacggagatacgtgatttgctgaaagaaaagaatagttgattataattaaaataaaggagatttcgggtgtaaacttgtgaatctcctttatttttctcttcattattaatatagattgcgtacttttttctacttttgcaactcaatttattcaaaatccaaccattgatatgcaggaaaaaataataattcttgatttcggttcgcagacaacacagctcataggtcgccgtgtacgtgaattggatacgtattgtgaaatcgttccttataacaagtttcctaaagaagacccgactattaaaggagtcattctctccggaagccctttttcggtttacgataaagatgctttcaaagtagatttgagtgaaattcgtggtaaatatccgatattgggtatttgttatggtgcacagtatctgtcatacaccaatggcggaaaagtggaaccggccggaacgcgtgagtatggacgtgctcatttggcttctttctgcaaagataatgtactgtttaaaggagtgcgtgaggagtcgcaggtgtggatgagtcatggagatacgattactgctattcctgataatttcaagaaaatagcttcaacagataaagtagagattgctgcttatcagatagaaggagagcaggtatggggtgtccagttccatccggaagtattccatagtgaagacggaactcaaatcctgaagaactttgtggtagatgtttgcggctgcaagcaagattggtcgccggcttcttttattgagagcacggttgccgaactgaaagaacagttgggtgatgataaggttgttctcggtttgagtggtggagtcgattcatcggttgcggcagtgctgctgaataaagctattggcaagaacttgacttgtatctttgtagatcatggtatgctgcgtaagaatgagttcaagaatgtgatgaaagactacgaatgtctcggtctgaatgtgattggcgttgatgccagcgaaaagttctttacggaactggctggtgtggccgaaccggaagctaaacgtaagattataggtaagggtttcatcgatgtgttcgatgtagaagctcataagatcaaagacgtgaaatggctggcccaaggtacaatctatccggattgcatcgagtcattgtctatcacgggtacagtgattaagagccatcataatgtaggtggacttcctgaaaagatgaatctgaaattgtgtgagccacttcgtttgttgtttaaggatgaagttcgtcgggtaggtcgtgagttgggtatgccggaacatctgattacccgccatccgttcccgggaccggggctggcagtgcgtattctgggtgatattactcctgaaaaagtacgtatcctgcaggatgctgacgatatttttattcagggattgcgtgactggggattgtatgataaagtatggcaggcaggagttatcttgttgccagtacagtctgtaggcgtgatgggagatgaacgtacgtacgaaagagcagttgctttacgtgctgtgacatctacagatgccatgacagccgactgggcgcatctgccttatgaatttatgggtaaggtatcgaatgatattattaataaggtgaagggagtgaaccgtgtaacctatgatatcagttctaaaccaccagcaaccattgagtgggaataataacactttataatctaaaaatagcctcaataggaattcctgttgaggctattttatgatgaataggtctttttataatgagccagtccgtatctattcgcttaccagcttctgtgcatccggaataagaatctctttccggcgtaattctaataatcctttgtcttgtagctcattgagtgcttttgaagtattcagccgggtgtcatctaagtagcgggcaagatcgtccatcttcattttgaatatcttttctccctgaatcttttcacaatgcaacagaaaaaagcgaatgattttctctgttaaatcctgtgtcggctcttcccataagcgggagtaaagattttgtgcccggttacttacgatattcatatagttgagccggaatatttcatatttgaacagatcgctaagtacaaatgctttgctgatactgacagtatgcgcttctgtatgtgccacataagcagaagtgtaatgagtgttcataccaaacagcgactgtggttccagcaggtaaggtgcttccatctgttcaatgacggtgtatatattttctttggaatttgtgacaatagaaacctcgccttttaacaggaagcagagttgtttacacggactaccactctcaatgatagtttctcctactttatgcttgataaagtgtagcttgaccttatccagaatacttgtgaaatcttcatgacaaagaccttgaaataaaggcaattggagcaaagtgtcgaacattgtttccatatgttgtaatctcttgttaatcgtacaaatttactcataatacaacacggctgtcaatatctgacccttctttttgttttttttattgtttgaatgtataaaaatagagtatatttgcagaaaaaaaggaggaaattatgtttgcaggcttcaattggcaacagatggttagtgcgtttatcgtactttttgccgtgatagacattatcggctctatacctattataattaacctgaaagaaaaagggaaagatgtgaatgcaatgaaagctaccgtcatctcttttgctttgctgatcggatttttctatgcgggagatatgatgctgaaactcttccatgtagatatcgaatcgtttgcagttgccggtgcgtttgttatcttcctcatgtctttggagatgattttggatattgagattttcaaaaatcagggtcctatcaaagaagctactttggtgccgcttgtctttcctttgttggcaggtgccggagctttcactactttgctttctcttcgggcggaatatgccagtatcaatatcattatagctttagtattgaacatgatctgggtttactttgtagtgagtatgactggtcgtgtagaacgtttcttgggaaaaggtggtatctatattattcgtaagttttttggtatcatcttattggctatttctgtaaggttgtttacggccaatataaccttattgattgaagcgttgcatcggtcttgattaggcttaatccttcttgttaaattgaaaactattgtatcggttgtgccatcgtgttggcacaactgtgacatgcctctgtcacaagcgtgccacttcgatgtcacaagtgtgccaatatgggtgacatgagttggcatttatagcgtttctttttcttcttcttctgctgctgttgcagttgttacttcttcttctgtattttcttcctcttccgtttcatctgcaaaaggttccggccgttgcggtccgtgatttacgaaaacgaaagcgcagagcgttcccataattcctccgctaagatgtccttcccacgacatattggtaggggagaaataaggaaacatatgccatataattcctccatataaaaaggtgacaagtaaagagatggcaatgagtggaacatatttgcggagaataccactgaaaaagaggaagaaggcaaagccatagatcagtccgctggcaccgatgtgccatcccggttttccgatcaggaaagtaagtagtccgcttccgagccaaatgagaataaaaattttaccggctattccccggtaaaagtaaaaaagacaccatgacaagaagaataaagggattgtatttgctaatagatgactgaacccgctgtgtatcagcggatgggttaaaatgccggtcagtccccgtttctccataggatatacccccaagcgagagaagtcccagtccatcccgacttccataatcttgagtatatagagaataaaaataaggaacaaaggctttgctgcagccagcatgatacgctgaatatcttgcttcatgacattcttttctttagatattttacgcaatactacgaatatttgcacaaaatctgaaaataaaaagcctttttatttttgtttttatctataatttgtacatttgggcgttatacctattgtatatgctgctacagccaatatatacggtatgtaacaataaatagatatacgatataatgaccaataattaacctttaataatgcacaactatgagttatttacgatttgacaagaccctcatgacgaatctggaagaatctcttcagagagaaatcctccggacgaacaaagcaggagcttatcattgtacgacgattgttgattgtaacacacgcaaatatcacggcctgttggtaattccagttcccaatctcgacgatgaaaatcatgtgctgctatcttctcttgatgaaacggtaattcaacacggtgcggagtttaacttggggttgcacaaatatcagggaaacaactttagtcctaacggacacaagtatatccgtgagtttgactgtgagcatatcccggcaacaacttaccgtgtcggaggtgtaatcctccgcaaagaaaaaatctttgtacatcatgaaaatagaatcctgattcgttatactttacttgatgcgcactcggctacaaccctgcgcttccggccgttccttgctttcagaagtgtacgtgagtacactcacgaaaacccacaggcaagtcgcgagtatcaactggtggaaaatggtattaaaacctgtatgtatcccggttatccggaactttatatgcagttgaataaaaagtgtgaatttcatttcatgcccgactggtatcgggggattgaatacccgaaagaacaggaacgtgggtatgacttcaatgaagacctttatgttcccggctatttcgaagtggatataaagaaaggagagagtattgtattctctgccggaacttcagaagtaactcctcgtagactgaaacaaacatttgaggctgaagtagctgatcgtaccccacgtgatagcttttaccactgtctgaaaaattccgctcatcagttccataaccaacaggaagatgaacattatattcttgccggttatccgtggtttaaatgccgtgctcgtgatatgtttatcgccttgcctggactgacgcttgcgcttgatgagatcgaccagtttgaggatgtgatgaaaacggcggaaaaggcgattcgtaattttattaatgaagaacctgttggatacaagatttatgaaatggagcatcctgacgttttgctttgggctgtctgggctatgcagcaatatgccaaagagacttcccgcgaacaatgccgtcagaaatatggagagcttctgaaagatattatggagtttatccgtcagcgaagacatgagaatcttttcttgcatgataatggattactttttgccaatggtacggacaaagcgattacatggatgaattctactgtgaacggccatccggtgattcctcgtactggatatattgttgaatttaatgccttatggtataatgcgttgcgtttcatcgctgatctggtgcgtgaaggtggtgatgtgtacttggcagatgaacttgatgcacaggcagaagtgacaggaaaatcttttgtcgaggtattccgtaatgaatatggttatttgcttgattacgtagatggtaatatgatggactggagtgtacgtcctaatatgatatttaccgtagcgtttgattattctcctttggatcgtgcgcaaaagaaacaggtgctcgatattgtgaccaaagagctgctcactccgaaaggaattcgttcgttgagtccgaagagcggtggatataatccgaactatgtaggtccgcagatacaacgggattatgcttatcatcagggtactgcttggccttggttgatgggattctatctggaagcttatcttcgaatttataagatgagcgggttgtcattcgttgaacgtcagctgattagttatgatgatgagatgacaagccactgtgttggttccattcccgaattgtttgatgggaacccgcctttcaaaggacgtggcgcagtatcgtttgcgatgaatgtagcagaaatactgcgtgtcttaaagctactgtctaagtattattaaaaaaggaggaacgaagatgaaagttttaatgtttggatgggaattccctcccaaaatatatggtggtcttgcggttgcttcttatggaataactaaaggattgagtctgcaaggtgatatggagacgattttctgtatgcctaaacctagcggcgaagaagagaagttcttgaaaataatcggtatgaatcaagtacccatcgtgtggcgtgatgtccactatgactacttgaaatcacgtttgttggaaatgacaccggaagaatattactccttccgcgatcatatctatgctgatttttcttatatgcatgtgaatgatttgggatgtatggaatttgcaggtggttatcccgggaacttgcacgaagaaattaataatttctcgatcattgccggagtcgtagcccgtcagcaggagtttgatatcattcatgcgcatgactggctgacttaccctgccggagtacatgccaaaatggttagcggaaagccgctttgcatccatgtgcatgctacggattttgaccgttctcgtggcaaagtcaatcctactgtttattcgattgagaagaatggtatggatcatgccgattgtatcatgtgcgtatccgagcttactcgtcgcactgttattaacgagtatcatcaggaccccagaaaggtatttgcaatgcataatgctgtttatccattgtcgcaggaactgctggatattccgcgtcccgatcactcaaaagaaaaggtggtcactttcctcggacgtattacgatgcagaaaggaccggaatattttgtagaagctgctgcgcttgtattgcagcgtactcgtaatattcgttttgtaatggcggggtcgggcgatatgttgaatgccatgattaacctggtggccgaacgtggtattgccgatcgattccacttcccgggcttcatgaaaggtagacaggtatatgaggtttataagaacagtgatgtatttgtcatgccgtctgtctctgaacctttcggtatcgctccgctggaagctatgcagtgtggaacaccttccatcatttctaagcaatctggatgtggcgagattcttgataaggtgataaaaactgactattgggatattcatgcgatggctgacgctatccattctctgtgtaccaatccgtctcttttcgaatatctcaaagaagagggaaagaaggaagtagatgggattacgtgggaaaaagtcggcttgagaatccgtgctctctacgagtctgtgttaagaaactatggtaaataacaaaacaataaataaaaatgagaactatctgtctttattttgaaatacatcaaattatccatttgaaacgttatcgtttcttcgatattggtaatgaccattattattatgatgattatgccaacgaaacgggtatgaatgaggtcgctgaacgttcgtatattcctgctctcaatacattgattgagatggcgaaaaattcggggggagcttttaaagtagcgctttctatctcgggagtagccttggagcaattggaaattcatgctccggcagtcattgatttattgcaccagttgaatgaaactgggtgttgcgagttcttatgtgagccttattctcatggcttgtcttcactggccaatgaggattgcttccgtgaagaagtacttcgtcaacgtgataagatgaaacagatgtttggtaaagaaccgaaagtgttccgcaattctagtctgatttattctgatgaaattggtggattggtagcttctatgggcttcaaagggatgttgacggaaggtgctaaacatgtgttgggatggaagagcccgcattatgtttatcactgtaatcaggctccaagtcttaagctcttgttgcgggatttcaaactctctgacgacatcagtttgcgtttctctaattcagattgggcggaatatcctttgtttgccgataagtatattaattggatcgatgcattgccacaagaagaacaagtcatcaatatctttatggaattgagtgcacttggtatggctcaaccgttatcttccaatattcttgaattcatgaaggcactgcctgaatgtgcaaaagctaagggaatcacgttctctacaccgacggaaatcgtaacgaagctgaaatcagtgtcgcagcttgatgttgcatatccgatgtcatgggtggatgaagaaagagatactagttgttggctgggtaatgttatgcaacgtgaggctttcaataaactgtatagtgtagccgaacgtgttcatttatgtgatgaccgccgtattaagcaggattgggattacttacaggctagcaataacttccgttttatgacaacgaagaacaatgggatgtggttgaaccgtggtatctatgattctccttatgatgctttcaccaactatatgaatattttgggtgactttatcaaacgggtagatgcactgtatcctgttgatgtagacagtgaagaactaaattctttgttgactaccattaagaatcagggggatgagattactgaattggaaaaggtattggctaaattacaggcaaaagtagaagcggcaaagaaaacggcggtcaaaaaggctactaatgctaaagagccggtagtgaaagaggcccctgctactaaatcaaaacctgctgcaaagaaagctgaagtaaagaaagcaacagccgagccgaagaaggctacggggaaagctaagaaggttacagctaaataaaaagtataaggtttattatatggaaccgtgagtgagataaaatcaaactcgcggtttttttatagtaggaattgaggattgtaatgaatgtctttacaatataaagagtgaaattatctttggaggcttcctctgaagaatctataaaaagaatggcacagattacattagtagagtaatctgtgccattctttttatagattcttttatttatcttctattt

SEQ ID NO: 8128 - DNA, 23147 bp, Unknown
  gut microbiota DNA sequence
cactaataggcccggcatttactgattttggtttcgttaaaatcatatttttttaccccatgttattccgttacttcttaggtaacggataacacacatataggatacacatagcagtgaaaaaaggaaaaaaatcgattatgagggaatataaaagcgggtacctaacattcaatataagacttttttgaatttaggtaataaaaatcccttgagcatgaagacgttatctttcatgttcagatagattcatgttgcatatttgagagaaaaaggaaaaaaagaagttttttgcttgtttgctattaatatttttacctatctttgtagcgaatatatttccgttacctaagaagtaacaccagcattaagtccctaatccataatgctttaataatattaatcagaacattttaaaactacatacgtaagaataattcaatttattaacctttgttctttcttccaattcgaaaccctttaaatatatctgtgttgttttaatagatttgtgccctaatgattcgctaatcatctcgataggaacacctctgtacttggcagtcgtagcccaagaatgacgaagcgtgtaagacgtgacggatgaagatatccttaattttctagacaggcttttcaaatcattattgaaacgtctcaaggctgactgatattcacgatatgcttcctcttcatctctcttatatgctccgcttaatatccgaaaaagataatcaggataatcaggacttcgcgcatcggttttattgtataatcccccgattgcattgtgcgctgactccagcacttctatactcataggagtaccggtcttgagacggttgtactttaaaagaccttgtttcaaattggatttttccaaatgggccaaatcagaaaaaggcattccacaaaactgaaataacagattggcaatggcctgtgtccggcgaagcttttccgattgaggatctttgtttagtaatatgtgaagttcaccgatcgggatggctttcttctgacgtgtgtccaccccagtaaatacatcccggaacaagccatgtacataaggagcctgatgcgcatcgactccgcgattgtagatactacgaagcatacgcatatacgtagaaatcgtattaggcttcaaacgggaagccaacagatagttgctatacctctttagagtttcgcggtttatcctactaaaggtaatggattgggtcccacaaaactgcgaaaaagaacgaatagcgtgtttatacacgtgggccgtagaataacgcccctcttgtcgcaaacaatcgatgtaattgtttgcacaaatagtaaatcgatttttttccataaattataacttatctcataagtgttattaaaaaacgtgcggaatatagtaagattatagataaaatgaatcacaattttaaatttagtcactgttttagatggaaaatcgaataatttctaaaaaaaataagtgaagccatgcagtattttcaataagcgtgcatttaacttataaaagaggggaaaaagggaaatcaaaccatatatcattaaaacctacaacctgagcttaacaagtgaagtggggaaaaataaaaaaaagagagagagttttttatacaacgtccccaaaaacgaggaatccctgccaattttcgagttggcagggattcatttttacttatgttgtttttcgaagaggcaatctcttacttgcagtatttggtaatcaactcatctacattcggatcacccagttctttcgctttcttaaagttaccgcaagcttcatctgtcttcttcaactgtatctgacaaagccccagtaagcggtaagcctcggcatatttaggatcagccttcagtatattattcaaaatctgaatagcttcttcataacgtcctacacgcaggtttacaacggcatgttccgcctgataggtcaggtctgtcggattcatttcgattgctttaactatatcatccaaggcgcgttggaattggcgtgctttcaaagcggcctgttcgcgatagtaatagaatacgtcgttcacttctcctttgactgctgtatgataagcatcataatcgagcatcgcattccgtggctggtcggcattcatgttcatctgtgcacgttccaacaaatatggagcaaaatctgctgtgatcggttgcgggcaacgggcaatacagctatccattaaagctacgacttctttcgggtcacctttcgccagttccttcgtcttggcagcactaaagaaagtggccggagaagcaatgttgctggcatttaccttttcataagctgccaaagcaccggcataatcttgctgggcaaacagtatatcgccttccatttgaatataaataggcagcggatcaatggcgattgcctgacgaacattctgcaaagcagtgtcatacgtccagtctttatacgttttttccggcttcgacaattgataagcatacatcagcttacctatattataatatacatcatcttttttctgggctactttcaaagcctgattaaagtcggcaactgctttatcataccaagtctggtcgtccttacctttagctgcataataattggcacgacgaagatagccatccgcattggcagggaactgacggatgaaatcatccaacagcttttcgtaatcgtcgcctgacaggctcgaagatgccataaacaagtacactaatgcttggtcttccgtttcgggcaggcctttccggatgccaatctttttcaaagcagcgtctcccaaagaaagagcactgattttctgtgacatggcaaaagctgctcctgccgcgtagcaagtggtcaccgtatcgatgccggatgatttctgcgcaataccaaatacctgaccttcagcgttcatcaccggacagctcaccatcttatctttcatctgcatacccaatgtatagtaatgatattctccggctactttggaaacttctttcactttaccagtaacgcaagcgatacttttctgtgtagaataaggaagcatccacgcatcggctcccactgccggagctattttagccacaatgagcgcaggcactttcttctcggtgatagccacacggaacttaatgacatcatacatatcattcgctccaagtatcaggctaaccggcatctgcttgccttcggaagtgataaccactgcacgttcggctcctttaaaaagagtataatctgataaagccaatccatcttcggatacaaaaaatccgtttccggtattcagcattttatcattcttgtcataagtcaccacagagaagactgcacgttttgccttctctacccatttgggagtttgcgccatgcttccctgcatcaggaagaaaagcagtaaaggtagaattaaaatcttcttcatatcagtcattatttctttgtttcacagcttcgtaaaccaagataccggcagccacggaaacattcagagattcgatggtgcccagcatcggaattttcacccattcgtcgcagagcgcaaggttttcataagaaactcccgtatcctccgctcccataatgatgcacagcggtcctgtataatcggcttttgtatagtcgtaatctcccttctcggtagcagctacaatgcggaaaccactatctttcagatattgcagcgttgaacggaggttctgctcacgacacacaggcagcgtgtgcagcgctcctgccgatgttttcacggcatcagcattgacagacgcactcccgcggacaggaataatcactgcatcgacagctgcacattcgcaggtacgggcaatggctccgaaattacgtacatcggtcactccgtccagcataacaaaaaacggattcttcccttgttcaaacaagaaaggaacaagatcttccgttttctgataagtcacagaagaaatgaaagcaatcactccctgatgatttttccgggtaatgcggttaatacgttctaccggaacacgctgaaccggtatcatcagccctttcaaagcagcaaacaattctttggaaagatcactctgaatgtctttctttaccagaattttatcaatctctttacctgcctgaatggcttctatcacggcacgaacaccgaaaatcatttcacttttatccaacatctatttgatttactattttactatttacaatttactacttatcagttagcgcttaacaattcactacctcaactactttgaatgaatcaatttagccattaatcacttagcatcaagcagggatttggcattgctaagggcggcctcggtcagagtggcgccactaagcatgtgagctatttcctctactcgttcttcatcggtgagacggcggatatgactgtttgtttccgtatcgctgtctttcttatatactttataatgtgcacgtccgcgggcagcaatctgcggcaagtgggtgatgctgattacctgacggttccggtcgcccatttcctgcatcatgtccgccatgcggtcggctatttcaccggagacaccggtatctatttcatcaaatacgatagtcggcagtttcacggctccggcaatcaatgctttgatagaaagcataacacgggcaatttcacctcccgaagctacggaagagatattttgcaaagtaccgttcttattagcagaaaacaggaagttgactgtatcttctccttgcaatcccggctctttcttcagtcccatttcgatctggaaacgaacattcggcattcccaacggaatcaagcgggcggccaattgcttttccacttcacgcgcagctttcgtacgggctttggtgagcagttctgcttgttgtttcacttgcttatattgttcctctttacgagcggtcagctcggcaatacgctcatcgtatgaagtaatgtcggacaatttgctacgatattcatccgtcaacgctatcaactcgtcaagagtctgtacccggtgtttctgttgcagggaataaatcagattcagccgttcgttcacttcttccaggcggaccggattaaattcaacggaatcactttgcgaagagacttcgtgcgaaatatctttcaattcgatataggcgctctccatacgttcggtaagttccttagcgggctgatagactctttgcaggctattcagcgtattcagactatctttcaggtaagaaagcaatccgccttcatccgagacaaatgactgttctacccggtaaagtccggctttaatttcctccgcatgacttagtgtttcggcttcctgctccaattcctcttgctctccttctacaagatgggcctcttcgagctgttcaagttggaaacggatataatcttcatcagaacggcttttctctgccagtgacattaattcagccagttcgcgttctgtctgcttccattcgccataacgcagatggtatttctccaatgctgcatcattatgtgccagaatatcaagcacgttcaactggaatccttctttattaagtaacagattctgatgttgagaatgtacatctatcaactgttcgcccagctctttcatttgtgccagtgaagcgggagtatcattgatgaatgccctgcttttgccggaagcctgtacctcacgacgcaaaatacactcttcatcatattccaattcgttttcttcaaaaaacggacgcataccgtaggcagcaatatcgaaccgtgcctctataatacatttggaagctccgcgacgaatcgctttcacatcggcacgttgccccagcaggagcccgatcgctcccagaataattgatttcccggctcccgtttcacctgttataacggaaaagcctgtttcaaaactgatatccagtttttctatcaatgcgtaattctgaatgtatagtgaacgtaacaaactaattaaaaattaaaatttgaaaattaaaaattgggagacagggtggctaccagacgatcaatgatgtcttgagctacttccgttttcgacttcaaaggatagtctgtacgacctttcctgtcgattatacttatcttattggtatcatggcggaaaccggctcctgcatcattcaacgagttgagcacgataaaatcgaagttcttgcgttcgagctttccttcggcattctgctgctcattattggtttcgagcgcaaagccaaccaggcattgttgttttctttttatggctcctaaagaggcagcaatatcttgcgttgcccgaagatgcagggtcagttcttcttctttttcccgcttaatcttcttatcggctaccgttgccggacgatagtcggctactgccgcacaaagaataccagcatcagcatccgggaaatgagcctgcgctgctttgtacatttcttcagcagattcgacatcgacacggattatgccagaatgttgcgttttgagttgcacaggacctgttatcaaggtcacttgtgctccgcgacgggcacattcttctgccaacgcgaatcccatctttccggacgaataattgccgatgaaacgcaccgggtctatcttttcgtaagtcggtccggcagtaatcatcactttctttccggacagttcgtcactcgaagcaaagaattcatccaatacccggatgatattctccggctcttccattcgccccttccctaccagatggctggctagttctcctgtccccggctcgataatatgattaccataggaacgcagaatatccagatttttctgggtggcaggatgggcaaacatatcgaggtccattgccggagcaacaaacacgggagcttttgccgaaagataagtggttatcagcatattgtcggctattccgttggccattttaccgatggtagaggcagtggccggcgcaatcaatacggcatccgcccataaaccgagatcaacgtggctgttccacgttccgtcacgttgggcaaaaaactcactgatgaccggtttgctggtcaaagccgaaagagtgatcggagtaataaattcttttcccgccggagtaattacgacctgcacttccgctccttgttttatcagtccgcgaatgatatagcacgccttatacgcggcaatactgccggtaattccaagaattattttctttccttttagcattattttgtaatcaaattactcatttcacgcaagcggatttttgtcaatgccgccttggtgttcagcgtgaaatcactattcaaaatccaactgtaatatccgggatctttcttcaaaacctcggctacagacattcccttatattttccgaagttgaacacttctaccccattatcatcgtacaccatgcgtccggcaaaatcgacattcttgctgaaacttgaataatcagccaggaacgcaatatcattctgaagatcggagtaacggtcgagctgcgctttcaacacttcgtaagtagcccgtgtatctgcttcggcagtgtgcgcatcttccaaattcttgtcgcaatagaacttgtaggcagcagacagggtgcgttgttccattttgtggaagatgacctgtacgtctacaaatttacgttttgtcatatcaatatctactccggcacgaagaaattcttcggcaagaacaggaatatcaaaacgattggaattaaatcctgccaaatcgcaaccttcaatgtccctggctatgtttttcgctacttctttaaaagtaggacaatctgctacgtcggcatcataaataccatgtatagcagaggatgcttccggaatatgcatttcgggattgatacgtaatgtctttgcttcttcatttccattcggatatactttcagatagcaaatttcaacaattcggtctgtgttgatattggttcctgttgtttctaaatcaaagaaaacaatgggatttttcaggtttaatttcatttctgtttattttattgagtcaccacagaggacgcagaggacacagagggttacttaataaatattcaaatttatcctctgtgtcctctgcgtcctctgtggtgaatttacattaatcatttagcatcatcggcatcagcagcatcagcaagtcttcgttttcttcctgctctaccgggatgattactccggcacgtgaaggatctgcaagttcgatgactacttcatctgccgaaatattgttcagtatgtcgataaggaacgtcgatttaaaaccgatactcattgcagcacctgcatactggcaaacttgtgtttcttcggcagaagtagagaaatcaatatcttgtgcggaaatcacaatctggttttcctgcatacgaagtttaatcaaactgctggcttgtgacgagaagatagacacacggcgcaaagctcctaccaactgttggcggtctacggtcactttgtgcggattgttttgcggaattaccgaattgtagttcgggtaacgtccttcaatcaggcggcaaaccatccggtagctttcaagcatgaatacagcgttgcgttcgtcaaattcgatggtcaccgcgccttgttctttcggcaaaagattctttagcaatgtagccggtttctttggaaggatgaaggctgcacgctcgttgcctttggctgccaacgttttacaacgcaccagtttatgaccgtccgaagcaaccattgtaatatcttctgttgtaatatcgaaataaataccgttcatcaccggacgaagttcatcatcggcagtagcaaacaccgaacggttgatacctcccagaagtacgcttgcttccatttctacgcggacagcattatcccccagtgtagccgattgcgggaattcatccgcattctgccccatcaggctgtattttccgttctggtactgcaccgttatttcataattatccggattgatatcgaatgtgagtggttgttccggaatttctttcagtgcgtcaagcaatgttttcgctactacggcaaaacgcccgttcgtatcgctttcattcacttctacggtagtcaccatcgttgtttcactgtcggatacagtcacagacaaagttccgtcttccagttcgaagaggaaacaatcgagaattggcagcgcattttttgaattaataacacggctgatggcctgtaaatggctggaaagagcagtacttgaaacgataaatttcatatattttcgtgtatttaagttttaaatgttctatcgcacaaagttacgaaaaaagatttgggctgcccaataaaaacaaaagaaaaaaacaggtattgtgcgagggatattactaaaaaattgtaacttcgccgcagaatttaaaattatcgcaatggaatttacaggaaaaatcatcgctatcctccccccgagaggcggagtttcaaaaactagcggcaacgagtggaaatcacaagagtacgttatcgaaaaccacgaccaatatccacgtaaaatgtgcttcgacgtatttggcgcagacaaaatcgagcagttcaacattcaaatgggcgaagaattgactgtatcattcgacgttgacgcccgtcagtggaatgatcgctggttcaatagtatccgcgcatggaaagtagagcgtgttagcacaggtgctccaatggcttccggttctcccgttcctcctccagctccatcggctatgccggaatttactccgggcgatgccaaagacgatctgccattctaaaccgaaagtcattcgttcgatgaataagcataaaaaactcccgataggattaaactccatcgggagtttttttatctccttttctcccgaaaaaaaacaaatctttttcttcttctttttcatcttcagaagaagaagtttttttatttatttctttgtttataatgggggatgaatttttctgtatattttacgtattttctgtgaatttttctgtatattttacagattcaaatgttaaaatcactcataataagctgaccataggactattataagcacacatataaaaacggcaaaaatgcaaaaagaaaaaaaacaaaaaggcgtttctccaaaagcagaacgcacacaaaaaagtatgggtcaatggagcaaaaaaaagataaacagcatcttgaaaatgtatggaggaagcaggcaaagtttatggataatccagccaaaagctatggaggttttcagaaaaatgatcgcagacaaacgatgattttttattctgatttatatttcaaaacaatattaggatataccattccgtctgcacaggcaaactgaacaaagagggtgaaatgacggaagaagtcggcgttgcgcagaaagaaatccggtacaaaacgaacgtgattttctgattgttggaatatgtggtcgaaatccgccatcagcataaaatggtaggaatcagacaaatgatccatgcctgtctgataggccatcgctccattgagcacctcacctttatccagttggcgaatataatgcgcgagagcatccgcatcaggagcgagcaacaagcgcccgccatagaaggctgcatatacatccaaggttggttccgcaaaactggttagttgttcaaacaatgttgtttgaggcaaccgatagataggatatgctttatttacagtataacaaaaagttatacgcggattttttcttccttcgtccgccgaagcggcattaacaagagcacgaagcattcgctcggcttccgttacatctgccaccgacaggctcaagactgccgctgccccctgcaaagtatcttcacgctgaaagagacaggcaaccaaatcctgcccggcattttccatcagatagcgtgaaaactctttatccctattttgcacttcattcgtgcgggcaggcacgcgctgtccttgggcatttccataagaaagcagagacacccagtccgtaatcccttgcctgctaaaatagaaagcagtagacggcaacacttctcccggaaatcccttgacggattgttgctggcgaagctggtttataaacgcaaagcaagtgtctgcatcgtgagtgatgccggagaaatagatgaaatcatctttcattttcatgtcaaattccgtccatcccatcatcccttgcatacgggtatagatggtagcggccgccgcactttttttcggagcacgtattcctgtaaaggtagaatcatcagccaacgattttccacttttatacgcatcaataacgttctcaatcagttttttctgaaagctcaatgccataaaatcggatgtcagatagcaagcaagaaaatcaccgtccgccatgggataaataattatctcttctcctttgtaaataaatgttttcggcggataaagtgaggatatatatttgcgtacaaatctgtttaccaactccttatccccatttcccaatctgcaatagagtacttgattacgttcgttatccggctcgtggaaactaatcaacatttgattcatttgccggcttaaaccgtggggagtatcttctgaaagggcgtaaaggctctgtttcagataagaaaagagtttggatacataaagatattgctgatttttactgcaagtcagctcatcgacttctgctacaaattcgagcacgtcatcagtaacgaatacggctgaagttgtggatggcaccagttcataaagattaaagtctttctgcccttcagctgctgacagtctaaaaaaagagtacaatgcgaaacctgagcacaaaagtacaacagaagatgtgatcgctattttcactatcgtacgaagtttcataatattcgctgtttatcggctaggtgcaaaaataataatttctacaaagaaaacaaaacttttgctaaaaatttcaccgataatcaaacatagatatccaatccgtcgaacgccaggtgaatattttccggaaggttcttttcaacctccgcatgcaagcccatatcatgactcatgtgtataaagtatgtcttctttgcctgaatacgccgggccaccgccaatgcttcttccaaattttggtgagtaggatgcgaggcgatccgaagcgcattcattaccaaaacatctatccctgccaattgttcataggattcttcgggcatggtcaacatatcagtgatataccccaactgcccgatacgataccccagaatcggcagtcggccatgcatcacacgcagaggaagcacttccgtgtggtttacagcaaaggattgccccaccgaaatttcttgtaaaggaatatcaggaacacccggataacgatggtcgacaaagcaatagggcatacgcaaacgcaatccctgcgctacataatcttccgcataaataggcacggaaccgaaccggcaaaacggacgtaaatcgtccagtccgcctacatggtcataatgttcgtgcgtaatgagcacaccatctatcctctcaaaagggagatgtaatacctgtgtccggaaatcgggaccacaatctatcagaatccgcgcgtcatctgtctccacaatagcagaggcacgcaatcgattatctttcggatcggaagaagtacaaaccggacatgtacagccgatttgaggtactcccgtcgatgttccacttcctataattcttactttcacttgttaattctcaatttataaagttgacttccggatggatatcaataccgaacttctcacgaacagaagctcggaccgcatctgaaagtgcaataatatcactaccttttgctccgccacgattcaccagcaccagtgcttgtttatcatgcacagcagccggtcccaaggcttttcctttccaaccacattggtcaatcatccaccctgccggaatttttacgcggccgtcggccagctcatagtagggtatgcggggatattcctgttgcaaggcttccagtttttctttcggcacaatggggttcataaagaaactgccggcattacccatcactttcggatcgggcagcttgctctcgcgaatagcaataatcactttccggacaacagaaagtgtcaacgacggatatttttcaagctcctgacgaatggtgccatagtctaatgtataatgttcttctttacttagccggaaacggacataagtaacaaaagccgatttgttttccgaacgcttaaaaatactgttgcgataggtatatccacattcaccaactgaataaacgcgttcttcagcttgaatgttcactgtttccacagccgttatcagatcttttacctcaacgccataggctccgatattctgtactgcacttgcccccacctcaccgggaatcagcgacaggttctccgctccataccatccatgctctacacaataagctacaaagtcatcccataccacccctgctcccactcgcactgatacagagtgagcatcttcttccgtcacttcgattccttcaatgcgggaatgcaatatcaacccgtcgtaatctttggtaaacaacaggttactgccaccaccaatatgcaaaaaaggtgtcgtaacggcaccttgcacaatcagcttcttcagttcttcaaccgaagtgtactctaaaaaacgagcggcactgacatcaataccgaatgtattgtagggtaaaagagaatacatatatttttaattataagttatatcattattcgttataagccggcaaatactgttatatcattaacagcaaggctatttcttgtagcgtattactacctgcatcaaatgcttgtatcttcaaacttatacaattcccattccccggctttgcgacggaaatagaggatattggaaaaaccattaccgatacctttcaacgccagaattttcgttggcgaatcatcgtcattccgctgcccgtaattgatattagaaagacgatcggcaggaagtcccggtttaaaagcgaaccactgattaagatcgagggtggtctccagaatagagaaatcatcgtccggatcggtggttacaaaagccagaggctcacacacacgcttactctgaaaaagactatctgcggcaaagtgtccgaaaaactccacgaaattttcattatcattttgcttaatgggacgcagattaattgcctctagcatccatgcacctttgatacgctcaaaatagtatttctttaccattcgtgttttcacaaacacccattctacctgtacggaagtgagggaggtatctcctactaaatccatatcttcttctctatcaaacagaagcgtataataatgctgtttggtaaacaagtcatcatgcttccagttatgctcctcgatattcgtttttttatctccattgtagtaaggcaacggaaatttcacacgctgacgctgcaacacgtcatcggaagcaaaattgtagataaaatcatcgaaagattcatctgcctgtataggttgcggatcttccggcgattcatcacagtgaatagaatcggctacccgccggatagaatccacttcttttgtgatagatgcgaaggggtcaatgtttgttttcttgtttccacaagcacccagtataccgagcaacatgacccctacaattagttttttcattattttagtttctctcttaacttttcaagcatatctaccgtcatgctttccaaatcgtaggccggcttccagccccactcttcacgagcgcaggtgtcatccagactatcgggccagctatcggcaatgcgctgtttcaaaggatctatatcatagatcatctcaaactgcggcacatgcttcctgatagcctgataaatcgtctccgggtcgaaactcattgaggcgatattgaaagcatttcggtgtatcaattttgtcggatcagcttccatcagcgtaattgctgcgttcagcgcatccggcatgtacatcatatccatcaaagtgccttgcttaatggggcacacaaatttttctcctttcaccgccgagtaataaatatcgacagcataatcggtcgtacctcctcccggaggggtcacattcgaaataatgcccggaaaacggacagcacgtgtatcgacaccatatttattaaaatagtagtcacttagcagctcggtcgttaccttggtgactccatacatggtgcgcggacgctgaatagtgtcctgcggtgttttcgtatgaggcgtactagcgccaaacgaaccgatagaactcggagtaaacactgcacatccttgttcgcgtgccacttccaatacattccataatccatcgatacctattttccaggccagcttgggcttcgactcggcaactacggacagcagagcagccaaattatagattgtatcgatgtgatactcttttaccacagatgcgatcgcctctccatccgttacatcagcaattgccgacggtccggactcctttaattcccctttaggttctgcacccggaatataacctgctactacatttgcatttccgtaacgtttacgtagctccatcgttagctccgaccctatctgtccggtagctccaataatcaaaatgtgttccattttttcttctgacttagaatatcaagcttaaatagtgcgcaaagtaagcacttttttttcagattttaatcaaaaagacattgttattccaagaaaaattgtgtcctttgcaatataacttaatcacccaaacactatgtacggtaaaatgcaagaatatctccgccaaacattggctgaaatcaaggaagccggactttataaagaagaacgactgattgaaagtgcgcagcaagctgccatcactgtaaaaggtaaggaagtgctgaacttctgtgcaaataattacttaggattatccaatcacccgcgattgattaaggcttcgcaggaaatgatgaataaccgtggttacggaatgtcgtccgtccgcttcatttgtggaacgcaagatatacacaaagaactggaagctgccatctcggagtatttccaaacggaagacacgatcttgtacgccgcttgcttcgatgctaacggcggtgtattcgaaccgcttttctctgaagaggatgccatcatctcggattctctgaaccatgcttctatcattgacggagtacgtctttgcaaggcaaagcgctaccgttatgccaacgctgacatgaaggacttggaaagatgtctgcaagaagcgcaggcacaacgtttccgtattgttgtgacggacggtgtgttctctatggacggcaatgtagctccgatggatcagatttgcgatcttgccgagaaatacgatgcactggtaatggtggacgagtcacactctgccggtgtggtaggtgccacagggcatggagtaagcgagttgtataagactcatggacgggtagatatttataccggaacattaggtaaggcttttggcggtgcactgggaggtttcaccaccggtcgtaaagagattatcgatttgcttcgtcaacgcagccgcccgtatctgttctcgaattctttggctccgggcatcattggtgccagccttgaagttttcaagatgctgaaagagagcaatgcattacatgataaacttgttgagaatgtaaactacttccgcgataaaatgacggctgccggatttgatatcaaaccgacacaaagcgctatctgtgccgttatgttatatgacgcgaagttgtcccagatttacgctgcacgtatgcaggaggaaggcatctatgtgacaggtttctattatccggtagtgccgaaagatcaggcacgcatccgtgtgcaaatctctgcaggacacgagaaagcacatcttgacaagtgcatcgctgcctttatcaaggtaggcaaagagcttaatgtgctgaaaacggaataactccggagcaaggtttacttgcagcatccatttttaggcacggattacacagattacgctgctgctttatgcaagcatatttctaaaaccgtgaaaaccgtgaaatccgtgtaacccgtgccaaaaaattctcttttataaaatgaattttgaaccgctacttgactataaaaaaaagattatggaagaattgactctcactactcctgccctacttttctcggcagtttcattgatattgctggcttataccaaccgtttcttatcgtatgcccaacttgtgcgtcaactgcgtgaccgctacatggaaaacccttcggatatcactgaagcgcaaatcgagaatctacggaaacggttgaacctgacccgtaggatgcaaggactaggtattgcaagcctttttttctgtgtagtcagcatgttccttatttatatcgggcttcaattattctctgcttatgtattcggattggcattgattctgctgatagcttctttaggcgtatctttccgcgaaatacagatttccacccgttcactggagatttacctgggaacgatggagaaagggaaacacaagaaataagattgttcgtattcccgttaaagtctatcattatcaagataccacccgacaaggaagaataaccgtaaaacggcttcccttgcctacttcggacttgagttcgatctttccacccagcttctctataatcacctgacaaatagaaagccccaatcctgctccctgcgaaaattcgttttgtttgtagaaacggctgaaaatcatccgttgttcttctcgtggaatccctcttccggtatcttctacataaatctgcactttgccttcatccggcagatagctatatcctaatttgatatatccggtttccgtaaacttaccagcattattcagaaagtttgtcaggacttgtatcaagcgctctctgtccacattgatttccaaaggtgtattatccacttctttcaggaattccaaatgtggagcaatcagaacctgatgtgtcatatagatatcgtcaatcaactctctcaccttgcatctcttgaatgagaaagacatatatcctgattcgatacgggaaagttccaagatatcattaatcagtttgagtaataactcgctgttcttgttaatagtactgatatactcttcgcgttctacggaactcaatccatcttccaatgccagtatattggcaaagccaacgattgaattaagcggagtacgtatctcatggctcatatttgcgaggaatgattgtttcaattccgccttttcagccaataagcgtgctgcttccaattcttcttcacgatcttttatatcctgtatattaagcaacaaacctgcagttttatattcgcctccaggtagctgtttggtggtataacggaactcccaccactgatagcctttgccgtcgaagttacaaagctcctgcacaatctttttatgagcacttttcagatttcgccagttgaacttcactccttcccaatggtcgggatggataaagctcatgaattccttaaacgaaagttgtctgggatttaacccttgcgacgcccagaatgcatcttcaaaaacaaaacaaccgttatccaatctccaggcatacgtcattccaccctcaatggctaatgacaatgtttctttctcatcagccaatgctataagagcctgctttttcctcatctgttcccgaaggtatagccaccaaagagaagcgaaaagaataattagtataagaatgaacgatgcgactgaaattccccacaacaaagggtatttatcactaaacggaatattgataatacgatatttagcaggaatactttccttactcaaacctatttgcgtcattgtattccaatcaacaacatactctttccgactttcaacaataggcatgtccgccggactcgcaccgtgtaatatacgaacggctgctttcacctcttcttccacctgaataggcaacgaagtgatgtatccacccagcaacttctcaccaaacccgaaggcttcattgatggctgtcagactgggactgccacagatgcttccaatattaatggtagtataatcacgtttcagctgaatataacattgatcgcgatagcttctgttcaacacccacataaaggtagcatccgaatgatttctggcattacgtaaaggaatagccatgaaacgagtataaccttcctcctgcgtcaaacgtatctgttcttcaagagaaagttcggggttatcgatgaatccggtcactttatgacctttaaactgttcctttgcatctcttctgatttgtttatcgatataagtggtatcgagcatggtaaacaaccggacgcgttcaccgaaaagttcttttgccacactgatattttcattaaaggcgatcttatcatgaaaacccgtcacattaggatggcgtttcagcaatccccaattcgggtaattgacaccaccaaaaaccacaggtacttctttacccaactgaaccccacatttcatcaatgaataagtagcctggtcttcattcaccagaatcacttccggccgccagtctttcgaaacagaatcaaccagaaaacgcattcgttccaactccggttcttcccagtaggactcgcaatctaaataaacggtacggatatcagcatctattttctctttctcaaattgctccgctatcatccggttaaattccggataagccgcgtaagtctcctcataagagtggataactaaaatacgccgttcctctttttgagaacaactgctcacccccaaaaagagcaataaaaatatagggagcaatctaaaaattcctctgttcacaccattcatttataataatcgggattaatttctctctgactcttaatacaaaggtagtttatttccagatacgagccaaataagtgaaaaaaaagaagctacttgaagaaatttcgagtagcttctttctatataaagaactattttttcagagtagcatcattaacgctgtcccaattgtgaatctacaaagaaaattccggtatcaccggctttcttgattttatcaacaatgccttgcgctgtagcttcttcttctacctgttcacgaacaaatccccacaagaaatcctgtgttgctttatccttttcagcagctgctacgtctaccagcttgtctaccaattgagaaacatgacattcatgtttgtaaacgtgttcgaatacttcaagaggtgtaccccatccgttaggaacaacatctattttatccactttagcagttcctccacgtttgatgatataatctgccattgcataagcatgtcccatttcttcctgggattgctttttcatccaatgagcaaaaccactgaaaccttctttctcaaaatagaaagacattgctaaatacaggttagcagaccacatttcagcagtaatctgttcgttaattgcattctgtaatttttctgaaatcataatcgtatttttttattaagttgttaatgtagtttctttttgaactcattacaaaaataacacgctttcagttaaaattgttccatgcaccctatatttttaaactacattcacattttgattatagcggttcattttttacttacaccatttcgtcggaagtatatcctttcggcagttcacgacagttatatccggaagccattatttcaccgtacgcaccggcagaacgaagggcgatcaagtcaccacgcttcactttgttcaagtcaatcgcttttccgaaaacgtctgacgattcacagatcggtcctactacatcgtaggcttccaatggttcttcagaagttatattttccattttatggaatgcctgatacaaagccggacggatcaggtcggtcatacctgcatcaaggatggcaaatttcttccgcgttccttgttttacgtagaggactttggatatcaaagaaccacactgacctacaacagcacgtcccagttcaaaatgcaatgtctgataaggacgcaatttcaattgtccggcataggtagcaaagtaatccttgaaattcgggacagcctgacggttggggtgtccgtaatcaatacccaaaccaccacctacattgatatgttctaccaaaattcttcgtgcttccagtttgtcctgcaactcattgacacgattgcagagggctacaaaatcacccatatccagaatctgcgagccaatgtggaagtgaagaccgataaactttacgtttttcatctcttgtgctacgtctatcaccttgtccatgtcctgcatactgataccgaatttgttttctgccaaaccggtagttatattggcatgtgtatgtgcgccgacatcgggattgatacggaaagcaacattagcaatcttattttgagcggcagccaattcattgattacttccagttcggggatagactcgacattgaaacagaagatgccatactccagtccgagattgatttcccaatctgctttgccgactcctgcgaaaacaactttatcggcagggaatccggcacggatagcggcacggatttctccgccgctcacacaatcggctcccattccgctctcacggataatggtaagtactttcgggttggcattggctttaacagcgtaatgcactgaataattaggatatttggcaacctcctggttaatagccgacaatgtatcacgcagcactttggtatcgtaataatagaaaggtgtctgcaaagtgcggaatttatcgattggaaatattcccttcataattcgaaaaacttgtttagttgtttaaaaaagagcgcttttatcagttcggtaaaagcgctcgtgttatttgtggatttatttgtcgttgaaaagcatatcactcaacgactgtaaagctactttcttatcgcactcccgaatgaggaaggagatattgtagttacttcctccgaacgagatcattcgcaccggtatattccgcatcgcatcaagagctttcgcttcaaaaccgacattttcccattcaaggtcacctacaacgcagatgatacacatctctttatcaacggttactgttccgtatttcttcaagtcgtccagaatctcgttcagatgcttcgtgttatcgattgttacagatacacctacctctgaagtacagatcatgtcgatagacgtctgatagctttcgaagatttcgaataccttacgcaggaaaccgtgagccaataacatacggctggatttaatcttgatcgcagtaatgttttcttttgcggctactgccttgattttacctttttccgtgtcgttggaaatcagtgtgcccggagcttccggatccattgtgttcaacagacgaacagggatattggcatatttagcaggctggatgcaggtagggtgcaggatttttgcaccgaagtaagccaactcggctgcttcttcgaagtgaagttgacgaaccggagcggtcttgtcaacaatacgcgggtcgttattatgcataccgtcgatatctgtccaaatctggatttcagaagcgtttactgcggctccgatcagagaagcagtgtagtcactaccaccacgttgcagattgtctatctcaccgtaagcattgcggcagataaaaccttgtgtaatgtagatttctgtatccggatagagatcgagctgtgcgcgcaatttatccttaatatatacaggatccggttctgcgttcttgtcagtacgcatgaattccaaagccggaagcaacacggacttcacgccacattcctgcaggtagaagtttaccattgccgtagaaataagctctccctgtgctaaaaccactttctcttcgaacaaagtgaaaaggtctttagtataggagcggatgtagtcgaagtgggatttgacaacttcaagacctttctgtttatattcctgggttgcaaaaagttcatcaatgtgctgtttatattttgcttccagcttattgataatctcgttggcaccctccggattcttcttatacagatagtccgaaatttccaccaatgtgtttgttgttcctgacatagcagaaagaacaacaatcttctgttcaccatcggtaatcaatttggctacttccttcatgcgctgagcagaacctacggaagttcctccaaactttaaaactttcattttcgttactgttttagttatctatatttaaatctatttctattgttctctgtctgggcatgtat

SEQ ID NO: 8129 - DNA, 17445 bp, Unknown
  gut microbiota DNA sequence
cctccccggtttgtcaggttcgtatgttttcccgtttggatattatataaccagatatctctcgtaatggaagaagtatgatgctttctccattcatcctcaaaacctttacgatcctgataaagaaagttcttccctgttttatcaaaacagaccagttctgcaggagtgcccagcacttgctcggtacgtccgccagcaacaggaactttatataattccgtcattgctcctgtaggaaacagggcactgcttgccggatcctgtatagaggcagagaaaaagatatactttccatccggagtaaaagccgacggtatttcagatgcagaatgataggtcagtcgccgagcggcacctccgtcagcaggcataatgaacaaatcaaaatttccattccggtcactggcaaacgcaatttgcttgccatcgggcgaccaaaccggattggcttcataagaggtttgtgtggtgagttgaacagctgttcctccttgtgcagggactttataaatgtcacccttgtaacaaaaaacaatttctgatccatccggtgaaatacgtgcatcacgcatccacaaaggagtaattgcatagctggataatgctgataataccagcgctaaagaagttattagtttcttcatatcaaattattataaatttattccgataaatcaatcggtttgaattagttttcccgtgtaattataaaatgtgctgtcaccaaaatctttataaaagaaggcatatttatccactcccgtacaatgacaaacgccaatctgtcggggaagatattcctgtaaataatctgcaatgacctgatatttttgtttttccgcattatggatatgaaaacctcctagaagtaacttacaaggagattcgggaaaggcagcctgaaccatacgcaaaatattggttattccccgatgagaacaggcacttaatacggaaaatccttccggttccaccaataccatcgccaattcatcctgaaaagtatccggcattttgcatccatcttcttgctgaacccaaaaacgttcaaaatgggtatcttcctgatttataatatcaatagacggaaaaaggaaaactccgggaagcagttcggtccgctctgtaataaagcggaaacgggaacgatcgaggttttgtgtatgcatcatcccgttctcacgttcatccttgaatttaggagaaaagatctcactcttacagacaacggttgcctgcgtattcaatttcaaaaaataacgtagtccgcccgtatgatcgctgtgaccatgagataatatcaaataatctactttttgcaagtcaatatgcaacaagcgggcgttacggataaacaagtcggatgctcccgtatcgaaaagtaatctatgttcttgagtctcgatatatagagaaagaccatgttctgcctgcaatttacgtccatagacacaattctccacaagagtcgttattttatagcccatgatacttagttagttatcaaacgaattatacaaaataaaaagttctgccacaaaattataataattctgtggcagaacaagcaatccagtcaattaagtaatcgtaaaaaggggaaaatctggaaaacataaccgtcttttccagatttcccgtcaggttttaaaagttaagttcgaaacgatatctcaaatattcgaacaaatccatttatcatattctttatgaatatctttaatatggaaaacaaacagttacaccatctttcccatattatatgcttcctgcatgtagggagtatctttaatctctcctactttccatgcaccgattccatagaccgtccctttttcctgtggtccttccaagcaatcgaggaagccacggaagccgtcgatagtacgctccatcattgctttatcgttttctgctgccgcaataatgaaataaaattccttattagttatttccgtataacgtgcgcaacaacggtcaatcataatcttcatctgcccggacatggtatagaaataaacaggagttgccattacaattacatcggcagcaatcatcttctccacgatttccgctgcatcatccttctgtggacagggtttaccgtacatactgcaaacactacatcccgtacaaggatgaaccgttttgtctttcagaaaaatcttctctacttcattgcccgcctcgatagcacctttcataaattcatcacaaagcaaatccgaattaccacctttacgtggactggacgaaattatcaaaacttttttagccataactttcttttattactttttattttcagaattctttttatcaatgattcatgttgcaaaaatagacaaataaaggtatcctgcatgtagataaattacagagaaagataccataattacagattctatattttacattcgttttaacaactttcttgtatatagttattctacaaatagttctgaaagtttctttcactaatatataatttatatctttgcccgtgatacagacaacatgatacaatgaaaaaaatacaactgaccgactcacataaagaaaagctgtttcaaatccccttattcagggctttacctttaaacatcaaagaatccttattggaaaagctggattttgtaatctatgcggctaataaaaaagagatagtcgttacacaaggaacaccctgcaacaagttatttgtacttttggaaggaaaactacgtacagatattattgacggattaggtaatgaggtgatgattgaatacattatcgctccacgtaccttcgccactcctcatctttttaattcgaacaatactttgccggctactttcactgctcttgaggacagtgtgatacttatggcaaccaaagattcaaccttcaaagtaattagtcaggacccacaagttcttcataattttctttgcatcgcaggtaattgtaacatctgtactgtatcccgcctgaaacctctttcacgcaaaaccgtacgggaaaggttcattgtttatctatacgaacataagaaaaaagactcgttagtagtagatatcatgcacacccaatcccagctcgccgaatatttaaatgtgtcacgccctgctctatctaaagaaatcaataagatgatgaaagaaggactcgtcatcatggaaggaaaacgaatcgagattttagataaaacaactttggagaagtatctgtaacgacgtatttagaaaaatatccgtaacaataagagtgtagctatcaagaagtggttaaaacaaaaaatcatcctcacttcagatatactgtagtaaggatgattttataaattcaaaacctttcaaaaactctctctttatttaaattctatctgttcccttgaatttaccacttcacaaacaatatcttcggattgatattcaacgatagccacccccagtcctgccagcttttatgattgccggttttcacagcgtccatcgtcttcgtaccacgcataaaagaatatccggcagagagtttcacatctttcatgatcgaccagtttatctgataatcgacttccgatcctaaatatttcttcaagtcctgaacctttacggctgtactaaagtagtgataattaagttccatatccactttggaagaagcacggaaacgacctccgatacgggcatccatcaatcccggcgcataaccgttcgcaaaggtagaagcataaaaataatccattgctccatagaatttatgatgagttccataaagaggatcgaaagctttgtacttaccaccatttcctttatcaccactcagataatcaaagctagccacagctccccatgtctgattgaacgtataggcagcctgtatgcttcccatcaaagctgaaactttctctgctgctttattcttacccatctgatagtagaaagcaccatccagattccagttactgttcttataagtgaggtaggttcccattgtttgtaagtaacgggtgtgagaatcatccgtagctttatcgcccgtttccaatcccaagttcataaacaataaagaagccccgaacggaacattgtccgccttatagtgataccaaacggtttgcatattcttataaggctgtcccgtagaagaatcatagtaagtgcctccgcttgttctattgtcattattctgattaaaagcaagaatcaaatgcacttcattatttttgttggcataccccagcttcaacgcatcgtggtaacgacccgctacattccagtccaatcctcccaaaatacgttcatcatcataaatcaacgactgacgtcccagttgggcaaagaatccttcgccaaagttcatctttgcccaagcctcattcagcataaaacgcccgttcttttcaatctgcgggtcctgtccccagacacctacatgctgtgccgacatcttcagttccagatccgaacgtttataatccatcgacaaacgcgcgcggttattgatgaaggacgtaggagccaccccttcatcccgtggagtcaaggcaccgttccgatactctgcacgaggtctgatttgcatagacatcgtaaattcattctctttctccgtgttttgtgtgtatgccatgcttggcaatagcataagcaagaatgaccaataaaatgttttcattgatagtgcagtttaaatgatttgatatttcaatttaaattatacgtatgtacactgactccttgtgcggacggaagataattgattccataccaacacatttgtaataagacaaaagagaccaataaaataaccaatgccggacgtgcctttaatggctttcccaatctgaaatgaatatatgccagataagcaaaccaagtcgctgccgcccatgtttctttcgggtcccaagcccagtagtgtccccaagcttctttcgcccagatagctcctgtaagcatacctaatgtcataaatgccagacctacataagtgaggttatcgcacaaatccatttctttccgttcaatctttttcttcttgaaccaaagcagataaacagccatcaccgtcgccgctcccaacatagcgtaagcaaacatatacacaatgacatgaggagcaaaccacggactttgcaaagcaggcatcaatgttttattgtgaatctccggtttgaagatattgatacagataaagacgaacgaaaggatgcaactgaaactaagaatccatttatacttccaacgtacgtaggttatcaatcccgccaacggaaggaagaaagaataccacagccgggtctctcccatagttcgcatcggaggacgttccaatgaaatccacattccgataatgaagctgaaaaaaatagccaaccctaagaaagtaaatccataagcccatcccggttttgttcctttccaggcagcaaaagctcctaaagcccaacaaaccagtgcagctattgcaaataatataaagtactcccaattcatgctttgtcctcctcttttctcttttgtgcactgacgaacaagcagacagctcctgccatcatcattataattcctgcgtaaacgaacggtagccacggatcgcgaaccagttcgaagacactgacatcactccatcgtccttttgtctcatcgtagctaagttgatagattttccatccttctatctccatcggacggttcacttcaatggtgccttccgttatcgttccttcttgtgtatagattttcacttccgatgcaaaccgctgcggttcccgttccggcatcacaagactggttaaagaatccagccggattgccttataaggaaagaggaaactgccacagcttacccaaccttctttggttgtttgattctcctgattgaaagctttcaggtaaacagcataagttgctcccatcgaatgaaattctataaacttcacagtatcttcagtagctacagaagctgccatcgggatagattgttcaattgtcaattgccagtcttgtaatgttccctttatcactccctcttccagcaatacatgttcaggagatttttcgggaagcgtacgcccggtttcgttgtcaatcagcatcagttttggaggatattcgtcgatagtaaaatccttgagttcgatagccaatggaagttcaatcagttgacctttatcgtcagtagcccgccattcggcattgcccatgcgggttgtcattttcaaccgttgcatatcggcgtttcctaaagtggccgctatcaacgcgacgaataatccgatatgattgagaaggaacgaaagtcgtctccacttaaaaggaaagctggcacgaagtatcgtcagtcccaatgcagtgaccatccaaaagtaaagcagaacgaaaggccaggatgcaatcatctgtgagaatcccagcaaatccgttgaagcatttggagcatgaccggaaggagcttgccggataagtcccataactaccgtcatgccgaccacccacaacaaagcggagacggcagcggaataatggcttaaccagctgaataaatacacacgtttacgaagaaggtgcatgactatcaaggcaatgatataaaccaccagcacaatcacgttgaccggacaggcaaacaaatcccagttgatagcacccactgtcatttgcagcaatatgcctattatcagtaatcctgtgccaatcgtcagcccttctttataactccacggtttgctccacatatatatctatgcttatatttgttttatatctgcgccaaacgtccattttctttcgctttctccaaccaggcgggaacggttattttcaggaatttctctttcgctgctctttcagcgtccatatccaagccgatgtattcctgtgcttttgctttcgtcgagatgtccggcatcggaacatcaccagtgtatccgttcttcgccaatactttggatacggcaagacgggcttgcatagcacggtcgagtccgtgagaaaggattctctgaatttcctgcggtgcatggaaagagccgccgtgtgaagccactccgaaatcccaacgccattgtgcctgacgaatcaatgcgagaacatctttcatttgagcttctgtcgctccattatcccaagcaaatttagcttcgatatgcgctttcgccaattcctgttccaagcggttacgaatttcgttcgctttgcgttggcgttcgtaaacgttattgcgcaaagtctcttcgctctcgcgatggcaaacctgacaggtacgatcaatcatagccaatgggctctgaatatggtgatcgctgaatttcacaccaccttcactcttatacggcatgtgacaatcggcacaagaaacacctctttgcccatgaatacccatttgagcaatctcataatcaggatgctgtgctttcagaatcggagtacgactcaatttatggatataatcatagaacccggcctcatcataataagcctccatatcttctaccgtgaaacctttatcccaagggaaagtcaggtatttgccatcacctttgaagaaatattcaacgtgacattgcgcacagaccaatgaacgcatttcttgcggagtagctttggtgatgtctttaccttggcgttggaaagcttcaatcaaagccggacggctgatatgaagattcattgtttccgggtcgtggcaatcagagcagccaatcggatttacgatttcggcccccatagctccccatttattattatagaaagaatcgacacccaatgcttccatcatacggggaacatccggacttttacaagtccagcaagtagacggttgcggaccatccgtcgggttcacaggtgcaccggtacgtaacgatgccgtaatatcctcaatagcatgcatgtgcccccgtggagtagaataatctttagagaaagcgtatcccgcccatagaatcaccatttcaggacgtttttccaaggcatccacagctatattcccattaaattcgctttcaaagtcagtctttgcagtttccgtccaagtttgatattcacgggggaaatcatccttgaatagttcatttcgcgcttcaatccccttgatgacgtttttacggttgttgaaaatgctggcaacttccgccctccgttccatcaacgcagaaacgcataatcccaaaacaaatacaacgaccattgaacctccgaacaacagccatccttgccatgattttaatttcttttccattgtatatcggttttattattttattacgtatttcatttcctatttatctttctgattcaccatcttccggagccattcgggaacgggcgattccggaagaggaacaatagctcccggagtgccggacagagagttttttccaccatgaggaacatcacgatggcaatcccagcaagccttcccctctcctacttgtgacatcatataatcaatcttccccgtcttcacaaattccgtattgagttgtgtatgacagcgaatacaattattcattatcacttcggaactggcttcatgagcctgaatcacctgcggctcgcttttggtaagaaatgcagctacgtgtttcattccgtccatccctttaaaggtccattttttcacagcattttcatgcggcacatgacaatcattgcaggtggcattccgggcatgtgagctatgaaaccaagttgcatagtaaggagtcataatatgacagttcacacaggcagccgggtcatctccaagataggtatgcgcccggagcatgtacataaacaatgcccctccacccacaataacaccgccaatgatgacagccgctactttccatttaaaagaaggaaagaatcgatttattattggaaacttcatcatatgaaaaagtatttttcacaaaagtaaaggattggaaacaaaaaaggtgtaatagatattacacctttcgaaagaaaaaatactctttatacaaaaaacagcctatctatcgtcctgtagccaacagatattccaattcctttatatagttgtctattcatcatgatggtggtcttcatcttccacctcattgctcaatttaatattgcgtgcgatataagattcgttacctgcgacatctgtgcaataaaccatcaaatgataatcccctgcagtcgcattggctggtattacaatatcatgatgatgaatatgtgctgttttctgtcctgacacatcatacgatctgttaaaactaaaatctactgtttccagcacagtcctgctattaccgccatgtgaatgatgatcgaaattactatgaatttcgatcttataggatttcagcatgacatcatccgacaaatccatttcaaaatgaactccatgttcgtttccaatctccaatgcctgaccttcttccggttcgtgaagttcaatcagaggtttggtcgtatcgctggaatcatcattatcacatgaggaaaacataaaagtaacagttgccaaaaggccgatcattgggagataaaatttatttttcatttcagtaattttttaaatggaactttgattaatagctggaagttacgtcccggttcgggaatctcaactttcctgtaaaaactaagatgattgtaatatcgggtattgaatatattccgggcggtcagggtaatttcaatttcattatttccacctatcggaatgtttaaagatccgcccaaatggaagagatttgctccggctgtacggtcttcgttacggtccactctattttgccgagcaatgctctgccattctgcatacaacatataccggttcttttgccaggttaatgtattgcgcataacaggtggcggcgagaaactcaatggaatatgttcatcacaattataggtgtaaacgtattcaacggaaatccgataattgaagttacgcagaaaatcaacatctacggtagcttcagttcctgcgaacagtgcttccgctccggtatagcgatagatttgtccggcatgaggcaatacagaccactctccggtaggacgcagaaagatgtaattgctgaaccaactgacaaatggagagacggagaaagaaattctccggtacttcagatgataagaagcgtccagttgccagccctgttccgattttaaattggcatctccctgttcatggcggaaagtgccgtgatgtactccgttggcagccaactcattcgcaccgggcaggcggaaactacgcccgatattcacctttaccagatgcttgtcggagggagtccataccaatcccagagaaagagaataatcaccatagtgttttttcacctggtgactgttccacttataaaggtctatctgttcctgggtatatccctgtttttgaagataatcggcaaggtaaacatcttcatgcgaagaaatatttatgtatccgtagtcataccgagctcctccgctgacggagagcacattgttaggtctgtacgttgtaagccagagcattccggtggtggaacggtgatattcgggcaataaaaacgaatagccggcaatgtcattccgttgatactgtccatcccaccccaatgtatgttcccatgaagaagatccgataaaacgagctttcactgaagcactgaaggtgttcagattaaatgcgagttctttgtcggggtctttctctggtgcgggttgcgagccatagtgagtatggaaagcactccattcttcacggtgattgttctggaaacccaaatcacctgacaagatcagtttctcccacgcatattgctgatggatggtcaccttcaggtgattcactttgctataaggcaattcgatattacggctgtctccatcatcttccacacgggatgcatcgggtatgccatgcgctccggggaagaaacctgtcttttgatagacattactcacggagaaattcgctctatatgcccttcgctgatattgggtaaagagtccgatattgtgttcaatgcctgctgtattcttcagtttacgcccatagatggggattttctgtgttaggtagacaatagaatccgtaggaatatgatagtcgccgaagtgctgttccgaataacggatgtaagagtaccaggcattttttttgattcccagcatcaatgatcctccgatggttccattgactgatttaccaagcagtgtgacatctccaaacacccgattatccacaggcacggccgatggaacaacatctatcactcctcccatcgcatcactgccataaagcaatgaggaggggcctttcaatacattgaccgctccgatgttgaaagcatccagctctaaaccgtgatcggctccccattgttgtccttcctgcttgattccgttttccaatacggcaatccggttgaatcccattccgcgaatcatcggtttggagaatcccgaaccgatatccattgcttgcactccgggaatgttctccatcgcttgcatgaagtttcctgtaaaatgtttgcgcagaaaatcctgatctgctatatcaaccgtaagggcagactttttcacttgacgctgctggtacgtttcggtcaccacaacatcaggcaaaagcatactcttgattgaatcggatttctgtgcatggacggataaggttataaatacccctattacgcccgaaataattccgatacgcatcaattacaatcttttatataatgtgcaaaatgaataggaggacagattgaaggtcaatctatctcctttgaaaatatgattatgtaatcaagcaacgggaggtccgcgtaaatgatgcgaataagttcgtttgcaaacaaccttatcctgataaataaccggctcgtatgggacgagcgtcaatgtacaatgaaattctaccggttgaggttccgtaaaaagagaaagggagtatttacatatcgcacaatcatcagaaggattatgggaatgttttgcatgggaacatgatgtctcatcttcacttccatgatagtgaaaggttttcaccacaaagaaaggaatgaatgtcatcaacaacacccacgctatatatacctttatgtttctcttttgatacattctccctctattgataatatagaatagcgaggacaaatatagatgtatgaaagagaaggtgcaaattatcaggcttaatatgtgttatcgtgaacgatcaaaaagaatcaataacacaccctattcgattttaatctctttcaatgccaaaatggagatatacacaactatgccaatagaatattacgcattattttatcaggaaaagccatataatatttatcttttaaagttatcactccataaaagaataaaataatagaataaaatcttatatcaaaaacgttctgtttatcaagtttctttgaaaggtcggctacattataaggcaactcatcatcaataatcagtgcatccaacatcgctttcgcgttatccagtgaaagggtaagccgacgaatccaattaatatcggtacgtagattttcatctaccagttcgtcgggaatactaccagcattggccgcaaacttcttgaagaaataagtcaggatagtagcattgaacaaccgatcaccattgggacggaaacgataaccatcgtagttgctcacaattagctgccagatttcatcgaaacgttcctgtcctgtggagtatttgtcaagtacataacgcaagtatgtctctgtctcttcgtatgtaaacccgagcatattcagaaaattaggttcaagagtcaatatctctgctatattatatccactggtcaaatcatccatcgtaacaggtaatacacctgtacagaaacaggtacggatactcccctcacctattccggcttttatcactttaaagaaagtacgcaaaaaactgtcattcgtcgtcacttcctcataaagcggatcgttgtatgctgtaagcaactgattagtgaagttatcatattcatcaatcaatagataaacttttggaaattcatgagaacgggcataattaagaacttcttccaacattttggaagcgtctccccgagtagtaaactgaaaatcaccgaacaaatctctgttatgctctaccatcacatctaccgggccacagttcaaatcattaaagttttgagccaatccttcaatagtatccgccattaccattttcgaaaaatcgtagcgaataatcatataactgttatgctcttttgtcggatggttacctatccaggttcccccaaacagttcttcaaaccgatgcgcttttgtacggtcataatagcaagctaatgtagaaaccaacaaactttttccaaaacgacggggacggagaaatacaggagcattataatcctctaatttaggaatataatcagtcttatcaacataataaaaaccacgttcacgcaaatctatgaaatccgctactgcataaggaatagttattcttgccataatcttactattctctctatatacaaacaaaggtacaaaattgttagcaaaaagaaggacaattacttattataatattattcttcctgtttccatacataaaacacattccttcccgcccctctcttacgcagttttccctcctgaataaaagtattcaaatcatcaacagctttcagccgggctactcctgtcagtctgctgtattctatgcgggtgattcctccattcttcttcagaaactcctgtaacatttgaagacgttgctcgataggtatctccgttttactgacagtccgtcccgatttgggaacacgttcaagtctcatttcccgtcttaccttcaatttaaaatttttggaggtacgcaggtgtacattgtcaaaacagatagattcggaacggatttcttttttagtcattaccttttgggtgcatttcaaagagacactaagatgtcccagctctccaagctccacaatatagccacgcgccaagagactaccaagttcatctattacagcccccaacaccccgtcaaccatattctggggaaaatgttgataacgtgacacacgttctataaactctttttgggaataagtcccgcttggaactatccgcgcatgaaggggttgcttctcgccggtattctgaacgtccggtgtctcatacaaatcataatacgcactcataagcagctatattttattgattatcatttatcattttcttgcctgatatttaatctctcttataccaatcattagttcttgactagcatatatttattcgtctgactatagtataatttgcatctgactatagttattctttcgtctgactatagttagacgaaaaagcaactatagtcagacgattagtttattgcatacaaagatatactttatcgcaatacaacttataaatattaggaagaaaagatttagttaaccgctagaaattaatcacccaacagtaacttagtcacagcagccgtattcaatgcccactcacgggtatatacttcatcggcttccggtgtatcagccaacttcaaaccctgtgcttgtgctttgattgccaacagttcgcccacagtggttttggcttccagtttatccagatacttttcaatagtctgtgtatccaaagaaagaaccgtctgtccgccgaaaggaatttccaaccataccacttcccgttccttcactttcaggactccgaaaacaagtcctttctgcaaactttgagaaactcgcacctgatgctgaacacaagaagggtcataagccactccgtttctctccgatattttcattgggtaagcggagttcatccaacctaccaccagattaggagagatagccccattgctatacgcattgcaggtgaaagcaacatattgcgcacctacacggtccaactcattcaaatccaattcgatatactcggcagtacctttcttgtcggggatgcttcggatatctccgctatgtttagcaccaatagctttcagattgaagtaggaacacacttctgtcgttgaaggcaaagtgatatgacaactcaagtccatatccaaatgctgtgccggaagtccctttccccattgcataaacaatcgaaccttatctccttccaccgggaaacgtgtaccctgcaaggcacaggaagtatcctgaaccgcttcgctacgatcaccgatagacaatggaatatgaaacaacataggatcaatatacatacttgcgcttccacttccggcacccgcattggcaaagcgggtagcaacaacctctttacacaaatcctgtacctctttcaccatttctttaagctggtcttccatataaagactcaccaaatagtgaggctctatcaaaagcgcattaccacctaaaggtttcaccattctcttatgtccttgctcaaagtaactctccgcatacatacccaaagtgaccaccaaacgagccggcaacaaatgaacgacttctttaaatgccgccaacgtctcttccggaccgaaccaaagcatattggcaaacaaggaacgtgcaaacatacccggacgttgcttcaacaaagcgaatgtctgtgccgcatctgctttcaaacggctacgttccacttctccctgccaaactgtatatgcctgacagtagaatacgtccatcaactctttcaaattttcgaatcccggtttacgagcatattccgccaaacgcaatgcacgtatcatacgtacccacatttcccttttcgaatgcatcatttcacaagacttctccggtgtcatcgccaaattgttcaaccaaagagccaccattttacactcgcgacgggtatatttcagttttaattcttcccgctttgtctgggcagccgaacggcttttatccaaagcattgcacagatgtgcattgtttctacccgctttacgaatgagggtctttggctctatgatttgcaagaatccggttttcttataccacaaataacgcaatatatcattcggagcagagaaataaatctgcgcttcctgtgccctatcctgctctaccagtgtgtcgatcaccagcatcagagtttctttcatcttgattccgactgccggcaacggaagttcagccaacaagattttcaagctgtccgcttgtgttgcatcaagggccgtacgtgattccagcaagtcaccaaagaaaacattcagctctttttcctgccaaagttccaacattttcagtttactggcttgtccgaaatattctgtagatgccgtttcaaacggagttccgcagaacggacaaccgttgtatcgttccaaggggaatgtattatccggaatcacgtgtccgcaagatagtttcacacctttcttactattgaacatattagcaagccatgtaatccaatgatccaaacgtgtttctccggtaggtgtatcccagcctttcaccaatggagcccagttgagtgacacacccaatacttctttcatcacctggagaatctccacctgttgtgccggatacaactgattgacagcatgcagcaactcttcggataagctatatcccacttttcgaagttgagcaaccaatgttacagtagtcgaagtcaatgcttcgcgcttttcagttccttctatcgctggcaaataaattgcatgttgcctgatagatactttcaacaaatcttttttcatacgttgtgttttttaagtaaggtaatcggaagagtgtgaataaatggtgcattcctgcggttttgaagtaagtcttccttgaccttagtttataaaaaagaggtagaacaggccggagtcgaaccgacgaccgtaactacccactgagctactgcccctttgcgaaactggaaaaacggataatcgtactggtatgttctacctaaaaaagtgtgttgaagtaacccgtacttgacctgttttcttgtttcttcgacaaagatagatgcagtgatgcgcaatctttttgcgtaactcaaactttttttttcggaaaaggggacactctctatatgatttaaaatataaagtatcttgttttatatttcttgttaataaacgctggccgattgaataacaatcttttccagcaacttctgcatctttccaatcaccgattctttatcaagcccatattctgtcgccatcacatcttgagcattcttgccgtggtcgaatttcgcaaatactgggattcccatatttttcaatgtttgttcgatacgcgccattgtctctactacaccgaactggctttcataagtgtaaagcaagttattggctgccaaaggatgaaattgtataggataaaggaaaaaactaacagattcctttgtgaataattagacaaaaccgtatctttagaggcataattatatacagcaaaacaatatgaatataatttactgataaacaaaacattaaaagtcagaataagaaattatagcatatagtg

SEQ ID NO: 8130 - DNA, 18679 bp, Unknown
  gut microbiota DNA sequence
aaaaaataatatttatgaaaacagcttttttattgggcagcataggatcaggactaattctattatgccacctttattcgtttgtccaaatgatcataatgaatcgccccgattatttgtatccgacatattacatccaatccattatcatcttcatagcatggactttgattttcatttgctttatgatcgcttaccaaaaacaaaataataaatcatggaaggattaatacaatttacaggtatagtgatgattgcatttggaatactgcaaatcatccttttctttaaaatttggggaatgactaataacgtcaaacgcatttggaagaaaatagataataaggactttctttccgatgcttgtgtttcttatataaaaggcaacttggaagaaactgaaaggttggcaaatgaagcttttctgcaggaagtagctttgctttctaaatcatctgaatcttatgaagattggattgataattatataaaaataaaagaaaaatacacccgtatcttcaagaaaatagataagccagctcctgactttaataaatacgaagaaccgaagatgtatctactttaaacaatagagaaaaaaataaggctgacataacgagtatcagccttattttttttacatatatccatatcacatattcaaataatactccctcgtcaacgctatatactcctcactatactgatgacgcgccaattccgtcaacaactcttctatcacacactcccgattggaaaaagaaaaagcaatcagcgtacgttttggaataccgccgggcttagtaattacattgagctgacgaatcgcatacaacttattcatagaagctatcgcctttacccgatcaaccacatccgtcggaatcacgaccgtaaaaagtccgtctgctgccaataacctatttaccccttccagcaattcttcgtaggttagagaatcattgtgacgggcagcagccctctgccgatccggacactccagcgaatcgacaaaataagggggatttgaaacaatcacatcaaatttatccgaagaccggtatttcttaaagtcagcctgcaccacttctatccgctcctgccaaggagaacgagccacattttccctggcctgtccggccgccgcctcgtctatctccaatgccacaatctttgcgtctggcaaactgcgttgagccaacattaaagccaccaagcccgtccccgtaccaatatccaatatccggcgcgcgcgctcaaccgaagcccaagctcccaaaagcaccccatccgtaccaactttcatagcacattggtcgtgccacactgtaaattgcttaaattgaaaataaggattcgacattttatccgtttgtcttaaagctgttttattctactattttattgcaaatcgccaaaaataaataataattatggaatactccctctacaagccgatattttggcattgtttttgtgtttttattctgcgcagtgctttattattagagagaatcaattaactttgcaaacgatttatgcatatcagtatgacataaactaaattaaaacgaaaagatgaaagaaagatatttattggaagatggaagcgataacggcttctcgctaatcactgactatgatgggaacgatgaacaggcatttgatgtaaatgtgaaatctggtgaaattcttccggtactccctctacgtaacatggtgttgtttcctggagtattcctgccgatcacagtgggccgtaagtcttctctgaaactcatacgagacgctgacaagaagcataaagatattgccgtagtatgtcagagatcggcacatacagaggatccgaagttggaagatttacacaatatcggtaccgtaggacggattgtgcggatattggaaatgcccgatcagacaacgactgtcatccttcaaggaatgaaacgtctgaacctgataaacattatcgaaacccatccgtatctgaaaggtgaaatagaacttttggaagaagacattccaagcaaagacgataaagagtttcaagccttggtggaaacctgcaaggacttgacaatgagatatatcaaatcgtcagatgtgatgcatcaggattcggcatttgctattaagaatatcaacagcccgatgttcctagtcaatttcatctgctcgaacctgccgttcaagaaagacgagaagatggacttgttaagcatccactcattacgtgaacgcacatatcacttactggaaatcctgaaccgcgaagtgcaactggcagaaatcaaggcatccatccaaatgcgtgcccgtgaagatatcgaccagcagcaacgcgaatacttcctgcaacagcaaatcaagactatccaagatgaactaggtggcggcggccaggagcaagaaatagaagaaatgcgccaaaaggcagaaagaatgcgttggaacgcagaagtcagggaaacatttatgaaagaactggctaaactggaacgcacccatccacaatctccggattacagcgtacagcttaactatctgcaaaccatgctcaatcttccgtggggtacgtatacaactgacaatctgaaccttaaaaacgcagaaaagacgttgaacaaagaccattacggactggaaaaagtgaaagaacgcattttggagcatttggctgtattaaagctgaaaggtgatatgaaatcaccgattatctgcttatatggccctccgggagtaggtaaaacatctcttggaaaatccattgcatctgcgctcaaacggaagtatgtacgtatgtctttgggcggcgtgcatgacgaagctgaaatccgcggacatcggaaaacttatatcggtgccatgcccggacgaatcatcaagagcttgattaaagccggtgcatccaatcctgtttttatcctggatgaaatagacaaggtcagcgccgaccgtcaaggagacccctcttccgcattactggaagtgcttgatccggaacaaaatactgctttccacgataacttcctggatgtagactacgacctctcaaaggtattgtttatcgcaacagccaacaacctgaacacaatccccggcccattgctcgaccgtatggaattgattgaggttagcggatatatcacggaagagaaagtagagatagcccgcaagcatctggttcccaaagagctggaagccaacggacttaaaaagacagatatcaagcttcccaaagatacgttggaagctatcatcgagtcatacacccgtgagagcggcgttcgtgagctggaaaagaagattggtaaaatccttcgtaaatcagcccgtcaatatgctacggacggttatttcgccaagacagaaatcaaaccgtcggatttgtatgacttcctaggagcaccggaatatacacgtgacaagtatcaaggaaatgattacgcaggcgtagtcaccggattggcatggacagccgtcggaggcgaaatcttatttgtagaaacgagcttgagccgtggcaaaggcggacgtctcacactgaccggtaacctgggagatgtgatgaaagaatctgccatgctggcacttgaatatatcaaggcacacgcttctatcctgaatctggacgaagagatctttgacaactggaatattcatatccacgttcccgaaggcgcaattccgaaagacggtccgtcggcaggtattacgatggccacctccctggcttctgccctgacgcaaagaaaagtgaaagccaacattgccatgacgggcgaaattacccttcgcggcaaagtgcttcccgtgggtggcatcaaagagaagatattggcagccaagcgtgccggaatcaaggaaatcatcatgagtgccgagaacaaaaagaacatagatgagattcaggagatttatctgaaaggactgactttccactatgtaaacgatataaaagaggtatttgccattgcgctgaccaatgagaaagtgtcggatgctattgatttatccgttaagaaacccagccaggaatgacatttgagttacaatatacagatactaaaagtaatgcccgtgcgggtctgattaccacagaccacgggcagatacaaacaccgatctttatgccggtgggcacactgggcacggttaagggagtacatctgaccgaattgaaagaggatattcaggcgcagattattctgggtaatacctatcacctctatttgcgtccgggactggacgtgatcgagaaagcaggcggactgcaccgttttaacggtttcgaccgcccgatgctaactgacagcggtggtttccaggtattctctttggccggaatcagaaagctgcgggaagaaggagccgaatttcgttcgcatatcgacggaagcaagcacgtcttcactccggaaaaggtgatggacatagaacgcaccatcggcgcagacattatgatggcttttgacgaatgtcctcccggtgactcggattatgagtatgccaaaaagtcattaggtttgacgcacagatggctcgaccgttgtatacaacgttttaatgagacggaacctaaatatggttacaatcaggctctctttcctatcgtgcaaggttgtgtctatcccgacctgcgcaaacaatcagcagagtttatcgcgtccaaaggggccgacgggaacgctattggcggtttggcagtaggcgaaccggtagacaagatgtatgaaatgatcgagattgttaatgaaatacttcccaaagacaaacctcgttacctgatgggcgtcggaactcctgtcaatattcttgaaggaatagagcgtggcgtggatatgtttgactgcgttatgcctacacgaaacggacgaaatggcatgttgttcaccaaagatggcattatcaatatgcgaaacaagaaatgggaaaccgacttctctcccatcgaagccgacggagcttccagcgtagatacattgtacagcaaggcttatttgcgccatcttttccatgcgcaagagctactggccatgcaaattgcctcgatacacaacctggcattctatctgtggctggcaggagaagcaagaaaacatattattgccggagatttctcgacctggaagccgatgatggtcaaaagagtatcaactagattataagaaatgaaaagcaatcgatttataaaacggctggactggtatatcatcaagaagttcttggggacatacgtatttgctattgcattgatcatttctattgcagtggtattcgatttcaacgaaaagatggacaaattgatggagcatgaagctccctgggataagatcatctttgaatactacatgaactttatcccctatttctccaatctgttcagtccgctgttcgtattcattgctgttattttctttacctccaagttggcagagaactctgaaatcatcgctatgttctccaccggcatgagctttaagagaatgatgcgtccttatatgatttcggccgctatcattgcgctgaccaccttcacgctaagttcgtacgtgattcctaaaggaagcgtgacgcgtctgaactttgaagaccggtatatcaaacccaagaaacaaaattcggtaagcaatgtacagttagaggtagacagcggggttatagcctacattgacaactataacaacgccatgaaaaccggtaaccgtttttcattggataaattcgttgacaagaagctggtttcgcatttaactgcacgccgtatcacttatgacactgcaactgttcataaatggacaattcacgactatatggtacgcgaattagatggtttaaaagaaaaaatcactaagggagatcgaatcgactctattatcaatatggaaccttctgactttctcatcatgaaaaatcagcaggagatgttgaccagccccgaactaagtgactatatagaaaaacaaaagcgaagaggatttgccaacatcaaggagtttgagattgaatatcacaaacgcattgccatgtcgttcgcttctttcatccttaccatcatcggtgtatcgctttcatcccggaaaacaaaaggtggtatggggctccacttgggtatcggattagggttaagtttttcttatatcctgttccaaacgattacctccacctttgccgtgaacggaaatgtgcctcctgccattgcagtctggattcccaatatcctttatgcaggtatcgcattcttcctgtatcagaaagcacccaaataaccagaaagcaacaaataaaaggattgcaagccttccgcagtcttcaggaactcgatccgcagactgtcccaaggtttcggatataccgcagaaagaaagatataaaaataagaagttccgcctattcctgctaatgcaagtgtaggcggaacttttttgttgtatccatttcctcttttgtctattctccattgttttcacctgacggtgatccggaaaatccctctttctccttacattcctaaaatcgttaaccgatttcttttacataagcagaaagatctgcagcagagatgtttttggctataattacaccatttccatccaataaatagttagtgaatccccgatttaaacggtatttcttaaataatccggaatcctcgccttctgtttccacgaaacaagtgggcgtaactatttgatccttacgaacggtttccttaaatattgactgatattcgtcaaatgaaacagaaaccatttccacattatgagaagaacgaagcgcattgcttaaacttacgttttgcatccgggactgcgcgtcataacttgcccagaaacttagcaacacatatttgcctttcaaatttcccaacttaaaggcgggttgctcatttgacgtagattcgatcttaaaatcaggggctacgtcgccctcactcaaacctccggtaggtttgtctttctcaacgaaagcggtcaaggaacaaattagtaatacaacaaaaatccattttacatgcttcatgtaattcggttttagttaatactatccgggactgtccttaaacagtggtttcttcccgaaacgttgtcttttcaggcatcaggcgaagaggaatccgctgattatcagagcctttatttttgaaaccgggtgcaaaggtaagtaaatattaaattaacttccaagcaaataagcaaaaatctcactttttgggtataactttttatgttatttagcataaaaacgaacttttttctctacttttgcagagttaaagtctattttttatgcaaccatcaaatactgaattgattctgattcgagttaccggcgaagatcgtccgggactgactgcttctgtgactgaaatccttgccaaatatgatgctacgatccttgacatcggccaggcagatattcataatacattatcgctgggaattctgttcaagagtgaagaaagacactccggattcattatgaaggaactcctgttcaaagcttcttcattgggagtgaccatccggtttgaacctatcaccaccgaacaatatgacaactgggtaggcatgcaagggaaaaaccgctatatcctgacggtattgggacgcaaactttccgcccgccagatttctgccgctacaagcatattagccgaacagggcatgaatatagacgctatcaagcgtctgacaggtcgcatcccgttggacgaatgtcagactgatacacgcacccgggcttgcatcgaattttcagtaagaggtactccgaaagaccgcattgccatgcaggagaagctgatgaagctggccagcgaactggaaatggacttttctttccaacaggataatatgtaccgccgtatgcgccgcctgatttgttttgatatggactctaccttaatcgagacagaagtgattgacgaactggccatccgtgccggtgtaggcgacgaagtgaaagccatcacggaaagcgccatgcgtggagaaatagactttacagagagctttacccgtcgcgtagccttattgaaggggttggacgaatcggtaatgcaggaaatagccgagaacttgcctatcacagagggtgtagagcgactgatgtatgtattgaagaagtacggttacaagatcgccatcctttcgggaggattcacttatttcggccagtacctgcaaaagaaatacggtatagattatgtctatgccaacgaactggaaatcatcgacggcaaactaactggacgttatctgggggatgtagtagacggaaaacggaaagccgaactgctccgcctcattgcacaagtggaaaaggtggatattgcacagaccatcgccgtaggagacggagccaacgatctccctatgctgggggttgccggactaggaatcgccttccacgccaagcccaaagtagtggccaatgccaagcaatcaatcaacactatcggactggatggagtgctctatttcctcgggttcaaagattcttacttgaatatgtaattagaccaaaaaatagattatctttgctgacaaataaaataaaagaatgaagttttccgaactacaattaaatgcaaatgtgcttgaggcgcttgatgccatgcgatttgacgaatgtacgcctatacaagaacaagcaattccaatcatacttgagggtaaagatttgatcgcagtagcacagacagggacaggtaaaacagcagcgtttctgcttcctgtattgaacaaattatctgaaggtaaacatccggaggatgcgattaattgtgtcatcatgtctcctacccgggaattggctcaacagattgaccagcaaatggaaggattttcctatttcatgccggtatcgagcgttgctgtatatggcggaaatgacggaatattgttcgaacaacagaaaaagggactcacattgggagctgatgttgtcattgctactcccggacgtctgatcgcccatttgagccttggatatgtcgatctttccaaggtttcttattttattctggatgaagcagaccggatgctcgacatgggattctacgaagatatcatgcaaatagctaaatatctgccgaaggaacgacagactatcatgttttcagccacaatgccggcaaagatacagcaattggcaaatacgatcttaaacgatccgtcagaaataaagctcgctgtttccaaacctgcggaaaagattattcaggcggcatacgtctgctatgaaaatcaaaagttgggcatcatacgcagtctttttatggatgaggttccggaacgtgtgattgtctttgcttcttccaaaatcaaggttaaagaagttgccaaggcgttgaaatcaatgaagctgaacgtaggtgaaatgcattcggacttggaacaggctcaacgggaaacggtcatgcacgagtttaaagccggacgaatcaatatattggtagctacggacatcgttgcacgtggtatcgacatcgatgatatccgcctggttatcaacttcgacgtgcctcacgacagcgaggactacgtgcaccgcatcggccgtacggcacgtgccaacaatgacggggtggcacttacgtttatcaacgaaaaggaacagagtaacttcaaaagcattgagaattttctggagaaagagatttataagattcctatccctgaaggattgggagaggctccggaatacaaaccgcgttcgttcaacaaaaacaggaacgggaatttctctaaaagaaaagatttccggggaaaaagaaacaacggagggaagaaaagcaactaccctgcgcccagacagaaataaaatctgtatttccttgtttggatagaatctgtatttcttattttgagaaacctgattcctatttggatagaatgtagagaccttatttggatgaggtaatctccaaatcgcctttaaagctcacttccatatttacaatgctatatatggaagtttccggaatggctaatacagcttgataatgaaaaccattccggtttactttcacaaactttgtatctgacaaaattgattgcgccaggaaatccgcaggaaccactttgtcgaacatctgtttggttatatcgctggcaaacaggctctttttaccttcgtacacacaaatgtgcatcacattatcatagtacacattatccatactaatcccgtcttcggaataagtcgtcttgatgactctcattttagatggattgatatatacgtatgcacgatagcgagtgccgttgtaagtcactacactatcgcgtttggttacttccgtataagtcggaaccacaagttcctgacggacaaaatagatagaatcattgaggtcttcggatttatgcagttttattacattatccgtaatggaatgaaaccaaaatatatgttctccctgcttatcaatcttgtaataagtggtatcatttccataagtgtaaagaatgtcccgcattattttaaatgcaatgggagtactttgtgcgtctgcatagtagatggtatctccttccacacgcatcaacgggctctccgtttcatcgtccagccaaattccctgcagtaactcttttgcgctaagatcctctttctcctgttgaagagaatgaggactcttattgccgctacatgccgcgaaaaggattgctattaacgatacagccacatttttcatcatctatcttagttttgtataaagatactcctatttttttatttaccaatacaatggtaaacaaatccgagctcttccatctcttttttatcatatatattacgtccgtccaacacaatctgctgggccatcgtcttcttgataacggcccatgagggcagacggaattctttccattcggtaaccagcatcaatacatcagcatccagcactgcatcgtacatatcacaagcataatagattttttctccaattctacgcttgcactcttgcacggcagccggatcgtatgcacgcacccgacaaccagcttccagcaatttatcgatcaggactaatgccggagcctcacgcatgtcatccgtttccggtttaaatgccagcccccacaaagcaacagtcttaccttgcaaatcaccattaaactgtttctttagcttctcaaacaggacgcttttctgttgttcgttcacttcttccacagcactaagcacccgcatactataaccgttctgttccgcagtcttaatcaatgctttcacgtctttaggaaaacaggaaccaccatatccgatgcccggatacaggaacttacgtccaatacgggtgtccgaacctattccgctacgtaccatgttcacatccgcgccaacgatttcgcataagtttgcgatatcattcataaaactgatacgggttgccaacatcgagtttgccgcatatttagtcatttctgcagatggaatatccatgaaaatcacacggaaattattcaataagaatggcttatatagtttggacatcaatttctccgcacgtgccgactccactcccaccaccacacgatccggactcataaagtcactgatcgcatttccttctttcaggaattccggattagaagccacgtcaaaatcaactttcacgcctctcttatccaattcttcctgaataaccgcgcgaaccttactggcagtacccaccggaacggtacttttggtaactaccagtttatattgtttcatattgcgaccaatggtacgggccacctccaacacgtatttcaaatcagcgcttccgtcttcatccggaggggtgccaaccgcactgaatataacttccacgtcgtccagacagctttctaatgaggttgtaaacttcaatcgctttgctttcatattacggagcaccatctcttccaatccattctcataaatcggaatattccccttttgcaaagattcgattttctctttattcgtgtctacgcacgttacattcacgccaatttcggcaaagcatgtacctgataccagacccacataccctgttcccacgattgcaattttcatacttaatctattgtttgtttagaaattcattcaaaataagcggcatctttaaaggcagttccctctctgtctttcgccgataataccatttgcgaatctgccaacggccagtctatccccaacgtttcatcattatacaaaatagaagcttccgcctgcggagcatacttgttatctaccttatacgtaaaaacggcttcttcgctcaagactgcaaagccatgagcaaaaccacggggaatgaaaaattgtctcttgttttcctcactaagcaacacgcagacgtgctttccaaacgtaggcgatgatttacgcaaatcaacggcaacgtccagcacttttcctttaagaacacgaaccagtttcgcctgactgtattctcctttctgatagtgcaatccgcgtaacacgccaaaagatgatttcgactcgttgtcctgtataaaatctacgggaccaatattggcatcaaactcttctttcttataggcttccataaaatagccccgttcatcggagaaaactttaggctctatcagccatactccgtctatttccgtctgtatatagttcattattgatagtgataaataaaacgatgcaaaagtagtgaatttttcgaagttttctgggatatattcaatttatctcgtaattttgcagacatgattgaattggcacaacatatagagactttactactggaaaacgattgcgtcattgttccggggtttggcggttttgtagcgcattactcgcctgcaacccgcgtaaaagaagaaaatatatttttacctcctacccgcacaatcggctttaatcctcaattaaaactgaatgacggcgtattggtgcaatcttatatgtcagcgtatgacacgagttttgctgacgccagccgcatagtagaaaaggaagtaaacgaattcatcggtctccttcatgaagaaggaaaagcccatttggataatataggcgagattcactataacatttatggtaactatgagtttgttccttatgactataagataacgactccttcattatacggtctcgactcttttgaaatgcatgagctttccgttctgcaacagaaagaaaaagtatggataccggctcatccggagaaggaaaagaagacttttgaaattagtatcaatcgtgcatatcttcgcaatgctgcagcaatgattgctgccatcgtattgttctttgccttttcaactccggtagagaatacagacgttcaaaaaaacaattatgcacaattattacccagtgagctttttgagcaaatagaaaagcaatcggttgtagtaactcctgtgtatgttaagagtgatgcaatgcaacaggctaagaagctttccgctactgcttcaacttcttcttcaacgaagacttcatccactaaaaagaatacagcggataagacttccaagccaatcgcagttagagaagtgaaagtagccaaacaggaaacggcagctactacttccgctactgcccctgctgcggttaaatctccagaaagtgccaatcatcctttccatatcatagtggcaggaggaatcagcctgaaagatgcagaagccatagcaacccaattaaaatcaaaagggtttgctaatgcaaaagcgctgaacatggatggaaaagtacgtgtcagcatcaattcattcgacaaccgcgatgaagcgaccaagcaattacttgagctaagaaaaaacgaaacttataagaatgcctggttactggctaaataaaaatccctttttaaaagcatgaaacgagttctttgtcctaaatgtgagaattaccttttttttgatgaaaccaagtatagcgaaggccaatcactggtatttgaatgtgagcattgcggcaagcaattcagcatccggcttggaaagagcaaagtaaaggctcttagaaaggaagaaaacctggaagaagaagctgaatcccataaagaagaattcggatatatcactgttatcgaaaatgtattcggttataaacagatattgcccttacaagaaggtgacaatgtcataggccgccgttgtgtgggaacttctatcaatacgcccattgaaagtggcgatatgagcatggatcgacgccattgtatcatcaatatcaaacgcaataagcaaggaaaacttgtttatacattacgggatgctcccagcctgacaggtactttcctcatgaatgaaatcctaggggataaagatcgtgtacgcattgaggatggcgctattgtgactatcggagctactacatttatcttgcatgcggctgaacaagaataatcacctgacaatataaaaaatgccactgttctctgaacaagtggcgtttttttatatccggtcttctaattacagaatacctttcacagtttcaagcattcccttttcctggatagaatccaagtttgcttttacagcttctgccaatcccgggatcttattcaaatcttctccccagataaagtcagcagccagaacaccttcggttactttctttgtacaacctgttgcccaaagttctttcagcaggttcatgatttcaggagcatcattcggtacaatttcagcgccgtcagcacgtacaccacctttataataagtaatgatagcggccaaaccaagtaccaggcctttaggaagttcgcccttacgttcgagataagtcttcaatcccggtaaatcacgagtttcatattttgggaaagaattcagcataatgcttgtcactgcatgatctacgaatggattgttgaaacgttccaatacatcattggcaaatttctccaactcatctttcggtaaattcaatgtttccatcaattcatcaaacattactttgtggatatatttaccaataacctcatgttcacaagcttcacgcacaatattcacaccagaaagataagcaaccggagaaagaactgtgtgcggaccattcaacagagttaccttacgttcgtggtaaggagcttccgaaggaacaaacaacacattcagtcctgccttatcagccgggaactctttggcaacttcctgcggagcttcaatcacccacagatggaagatttcagcctgaacaaccaagttatcatcgtattgcagtttttctttgatagcagcaatatctttgcgcgggaatcccggaacgatacggtctaccaatgttgcatatacgccacaagcttcttcaaaccaagtcttgaactcattacccaggttccacaattcaatatattgataaatagtttctttcaacttatgtccattcaggaaaataagttcgcaagggaaaataatcaaaccctttgttttatcaccattgaatgttttgaaacgatgatacagcaattgagtcagtttacctggataagatgaagcaggagcatcttcaagtttgcaagacggatcaaaagcgataccagcctctgtagtatttgaaataacaaaacgcatttcaggttgctctgccaatttcatgaactcgtcattttgagaatatggattcagtgcacgactgattacatcgatcattgtcaagctgttaacaacttcgcctttatccaatccttgaagattaacatgataaagatcgtcttgtgcattcagcatatcgaccatacctttatcaatgggctgaaccactactacactgctattgaagtcggttttctggttcatgttgtaaataatccaatcaacaaatgcacgcaagaagttaccttcgccaaattggataatacgctccggacgttgtgttttaggagcagtttctttgtttaatgctttcatgttagttgtaatttataaagttgatattatacaaattcaaaataaaaatcaatattctccttaatcaggatgtcaataggcatatactttacaggttcaacagacttcttaaacacaacatggtcgcacagagccttcaccccgcaatacccttgcaatcctggacgttgcccgattaaataatgcacatcacctgattttagcaactctacatttgctttcagaaggtcatatcctatcagccctttcatgctacgtcccgcatgacggagatactctcctaactgatacaccctggaattaaatacaactcccagcgcagccttcggatgtgcccggaaaaactcatctaatgtctgttgattactttcctgatcggatttattgagtataacctcatggattaccaggttgttatattcctcggctatgtaactcataaaaccgtccaaacgacgttgcatctgtatttcagccggattatctttattattacttaaaaacaagactaactcctgaccttctcccgccgaatagttgcgcatcaatatttttgctgcaatatatccgctcttataggaatcctgcccaatatacgtcaaggctctcgcttcttccatattgaaatcaacaaaagcataagctatcttattttcctgcagataagctgtcagcgccagcgtctcttcccggaaattcggagaaatcaacactgcgtctacattcttttcttttatagcaaggcaggcttcctgataacttttctcatctccatgatggtaacacagataatctatacccacattaaaaggacgcaactcttgccgggcacgctcaatccccccgactaccgaatgccaatagtcatgttctatataataaggtatcaggcagaggaaagaatatttctttttagcagccaaaccgatagcaaacacattgggttgataatgaatctcatccagtaccttttgtactttagctttgcttttgggagacacgtcgccacgattgtgcaacaccctatccaccgttccggcggaaacaccggccatacgggctatgtctttaatggtatagttctggtcctccatagtgctaaaacttaaatattataaataatcgctgcaaatatacgaattattttgttactccaagtaaattttctatttttgtgttcgataacggttaataaaactaaaacgagatttacgcctattagctttaaaatcaatacgatataggtataaatacagaaagtaataattttatatacttaaaacacagtaataatgaagaacttcatggacgaaaacttcttgctgcaaacagaaaccgcgcaaaagttgtatcacgagcatgcggctaaaatgccgatcatcgactatcattgtcatctcatcccccaaatggtagctgacgactacaagtttaaatcactgactgaaatctggttgggcggtgaccactacaaatggcgtgcaatgcgtacaaacggcgtagatgaacgtttctgcacaggaaaagataccacagactgggaaaaattcgaaaaatgggcggaaacagttccttatactttccgtaatccactgtaccactggactcacctcgaattgaaaactgcatttggtatcaataaaatattgaatccgcaaacagcacgcgaaatttacgatgaatgtaacgaaaagctgtctcaacctgaatattcagctcgtggaatgatgcgtcgctatcacgtagaggtagtttgtactacggatgatcctatcgattcactggaatatcacatcaaaacacgtgaaagcggatttgaaatcaagatgttgccaacttggcgtcctgataaggctatggctgtagaagtccctgctgatttccgtagttatgtagaaaagctggcagaagttagcggtgttactatctccaattttgatgatatgatcgctgctttacgcaaacgtcacgacttcttcgcagaacaaggttgccgtttgtctgaccatggtattgaagaattctacgcagaagattacactgatgctgaaatcaaggctatatttaataaggtatatggcggcactgaattgaccaaagaagaaattctgaaattcaaatcggccatgcttgttatcttcggtgaaatggactgggaaaaaggatggactcaacagttccactacggtgctatccgcaataacaacaccaagatgttcaaattactgggcgctgacaccggtttcgactctatcggtgaattcaccacagccaaagcaatggctaaattccttgaccgcctgaataccaatggcaaattgactaaaacaatcctttataacctgaacccatgcgcaaatgaagtgattgcaactatgttgggcaacttccaagatggttctatcccgggaaaaattcagtttggttcgggatggtggttcctcgatcaaaaggatggtatggaaaaacaaatgaacgccttgtctgtgcttggtctcctaagccgctttgtaggtatgttgacagactctcgttctttcctgtcctacccgcgtcatgaatatttccgccgtacattatgtaacttggtaggacgcgacgtagagaacggagaaatccctgcatctgaaatggaacgcgtaaaccaaatgattgaagatatcagctacaacaatgctaagaacttcttcaagttctaacggattgtagttacactataaaaaagccgctaccaaatcgaatatgctttgagtagcggtatttttatgttctattattaccattcatcc

SEQ ID NO: 8131 - DNA, 9796 bp, Unknown
  gut microbiota DNA sequence
tgtgtatttttgcataaaactcaagtaaaatgaaaacgactactgtttcggtatacgccgctttcttttttattttagtcttatcggtttcttgtcatagagattcggaggcccctgatgcggcattccagaagatcgagatgtgcatggaatctctccctgatacggctctgtatctgttaaagtcaatcccttatcctgaaaaattgcgtggaaaatcgcaggcggattatgcgcttttattaacgcaggcgatggatcagaactatgtgaagtttacttctgattcgttgattgcattggcactgaattactatactgtagagcgtggtgacactgccatgcgtgctaaagtacagtattattatggtagagtgctgcgtgaattgggcaaagatgaagaggctttgtcgttcctgtcttcagcaaaggaaatgttcgggaagattcaatgttgcaagatgtttgccatggctactgatgaaatagggatggtgaaccggaaaaagaaattgtatcaggagtcattaaagaattttcaggagtcatacgctatctatgaagagttaaaagattctatgggtattgtcagagccgagcagaatataggacgggcttatttgtttcagaataaatgggatagctgttatttctattataataatgctttagaattagccaggaaaaaacagtatccgtctgaagtttccattttacatgagttgggtatcctgtatcgttctatgggtgagctgaaaaagtcagagcactatttccttgctgcttatgaaaaagaaacggatgaagaaaggaaatacgtagagtgtatgtctttgggatatttgtatatacaaatgggggatgtggagaatgccagaaaatactttaagatgagtgtaaattcttctaaagagtatacccgtattgacgcatacaacaatttatactttttggaaaaggatattgataattttgaagaagcaattacttatcatgaaaaagcggattccattgtcaatgtattggatgaggtcgattctttggagttgataacagaactgcaaaagcagtatgagaacgaaaaactccggagcgataatttacaaatgaaaatgcaccgtacagtttttctgttttgcggtacgattgtttttctgattgtagccttctatatgtgttattactattacaaaagtaagaaccataaaaagaagattgccgagattgaatcccagattagagataatgaagaggagataaagcgatatcagcaggagatggaagaaatccaggagttgaaagaccaagtgctggaagagaaccgcatactcgaagaaaatcgaatgaaggtaggcgagttgaatggaaagattgtgcttttgagtatgcagaacaaaaccttatcggggttgttgaaagaactaggaggagaattaactgtcggaccgtcttctgaacaatacatatctgcctttcgattactgcttgctataaaagagggaacattaagaggtaagttgtctgatggagaacgctataaattgtttagtctgtttgatttactctatgctgattacgttacccgattgcttgacaaagctcctttattgacgaaacgtgatcttgaaatctgttgcttccttaaatttgggctgactaatgaagagttggctcgtattttccagacctcttccgactcggtaactaaggcgaaggggagactaaaaggccggttgggcatttcttcacaagaagatttaaatgcatttttaagggaattttgataaataaaaaatgaattgtccgggtcaataacagaatcaaaacatgtattttgttggattttagatgtttacgatgaatcagacacactgattttgtccgggtgactttttttgtgttttcagatgcatgccgtacttttgacctaacaaaaaccaaatagctatatgaaaaatcctaatgaattatctgctacctcttcatggagaggtaacgaattacagttgatagaacagaaagccaacattgttgtcggagtagctaattctcgtacgcggttaaggataggagttctattaagtaaatattcagagtatcaggtggattatatatcctccgagagtgaaacaggtaaactgattgaagaagccgatctaataattggagcggggattactgcctatgaaggggtgttacgccggaaaccggtgattgtagtgggggattatggctttggaggcttggttactccggatacattccgcaagcattataacaatcggtttagaggaaagattaatggtgcaagaggtgaatctttctcattggagaatttagaaaaagaaattcataaaggttttaatttgacttttcaagaattgcaaatgatgtcaaaccaaaccataactttgcaaaacatctaaatatctgaattccttaatttcttaatttaatagtttgatgcataaaactggttaggagtgtgggggtgcgtgagcatccccatattcatttttaggtataatacacaaattaccggtcttgatcttcgtttttcaccattcccttatgttgctccgggagggcactttcaacagcagcgtatgcctctgccatggttgccttgatattttccatgccttttcctttgggaggaatagggtcgtgaatagtcagaatcatgcgatggcgatgtatccatttgcctgtgcgtggaaggatttcaaatgagccatcgatagtgacaggtaccactgccaactgtaaatcatccgccaattggaaagccccttttttaaaatatcccatgtgtccggtaaaagtgcgtgcaccttcgggaaagaccacaagagaaactccgtctttcaacgagtcttttgcctgccggatggtttccaaaaccttcttcgggccggaacggtctacaaagatatgtcctgcgctttcacaggcttttccgacgaatggcaatttacgcagactttttttcatcatccatttaaagtttcttccaatgaagccgtagatgaggaaaatatcaaatgaaccctgatggttaggtacaaaaatataggaagttttgtcatgcagcttttcgcgcccctcaatcttcacgggaatcaacaggaacagacaaattaattgtgaccatatctttcccggataatatccccagaagtgggctcctcccaagagggaacctacaatagtgacgattgccgtaaggatggtcagcactaataaaataggcaaagcgatgcaaatctgataaatataatacagtatcttcatagggttggatttttatcctgcaaatatacatgattattggtaaaaaagagaggcagatgcgagataatctttccgattgtgttatttttgcctcttgttagtagagatagttataaaattatgatacgtatattacatactgccgactggcatttgggacaaaccttttttggatatgatcgcacgggagaacatgaggtattcctgaattggctggcagaagaaattcgtcagaaagagattgatgcattgattatagccggagatgtttttgatgtttccaacccttccgctgcatcccaaagcatgtattatcagtttatttatcgggtgacagtggagaatccgaatctgcaaattgtcattgtggccggcaatcatgattcggcagcacgtctggaagctcctttgcctctgttgcaggctatgcggacagaagtcagaggggtggtgcgcaaacttgaaggtggagaaattgattatgaccatttgatcgtggaactgaagaaccggaaaggggaagtggaactgctttgcatggctgtcccttttttgcgccaggaggattatccggtcgtgcagacggaaggcaacctgtacgcggagggagttcgcgaactatattcgcagcttctgcaaaggctatggaagcaaaggacagcgaatcagtcgattcttgccatcggtcatttgcaggctacaggatcggagattgcagaaaaagattatagtgaacgtactgtgattggtggtctggaatgtgtatcgccggaagctttttccgaacagatagcgtatacggcattggggcatatacataaagcgcagcgagtgtcgggaagggagaatgtgagatatgcaggaagtcctattccgatgtcttttgcagagaaacattatcatcatggagtcgtgatggtgacttttgacggaggttgtgcagtggatattgaacggttggaatgcccgaaattaatccctttggtaagtgtgccgaatggagaacctgccttgccggaagtggtgttggaagctttgaaagaattgccggagacaaaggatgtagctccttatttagaagtgaaggtactgctggaggagccggaacccatgcttcggcaggagattgaggaggcattggcagataaaaattatcgattggcacgcattgtgtctacctatcgcaccgatgtagaaaataaggagaaagaaaacgagaactggaagagaggattgcaggagatgtctcccttacagattgcgcagtctgcctttgaaaagatttatcaggtggaaatgcctgccgaactgacaggcttgtttcaggaagcctattgggctgctactcataaagaagaggaggaagaagaatgaaaatactggctatacgattgaagaatctgacttcgatagaagggacagtagaagtcgattttacagcagaaccattacattctgcaggtatatttgctatttcgggacctacgggtgccggtaagtctactttactagatgctttatgtctggcactgtatgataaagctccccgtttcgcaacttcggtggaaagtgtgaatctggcagatgtaggagacaatcagataaatcagtccgatgtaagaaatttattgcgtcggggaacaagcgacggttatgcggaagtcgatttcttaggcattgacggacggcgttaccgttctcgctggtcggtaagacggacaagaaataagataagcggttctttgcagccacaaacgctggaggtgaaagaactggatacggagaaagaattccagggtaccaaaaaagagttgttgattcagttggtggagctggtggggttgacgtatgagcagtttacccgtaccgtattattggcgcagaatgattttgcaacattcctgaaatcgaaaggagcggccaaagcggagttgcttgagaagttgacgggaaccggtgtatattcccggatttctcaagaagtctatgcacggaataaggcggcacaggaagaagtcactttgattcagaatcgaatgaatgtgatcgaattgatgccggaagaagaattacttgctttacaaaaagagaaagagctgttggccgaaaagcgtgtgacaggaatcaaactgctggcagagcaaaatgaacaactgaatgtggttcgttcattaaaaatgcaggaagatctttggaagaagaagcaacaggaagaacaggaggagcaagcaagattgaaaatgttacagggcgcattggcttcacaagaagaaggattggtacatttcaaggcacaatgggaggccatacaaccggacttgaagaaagcccgtcagttggatgtacagatacagtcacagcaggacagttacacacaatcgaaacagatattacagtccgctaataaacaggtgtcggagcaggaacaaaaaatgcggatggctacggagcagttgcaggtttcttattcttctctgaaccgtttgctgaatcatgtaggaatagaagaagcgttgcagctagaacaggtggaagaaattctacggcaggaagaaaataaactgacagccgggataaacacgaatgaagaacggttgttgcgattaaactctttcggatatccgttattgaccgaagaacagatgaagttgcaaaaagagctgacacgccaacagaatatccggcaattgacggaaacgcagacgaaaaccaaggcggaagtagaacggttggagaaagaaacaactgattgcctgaaacaattaacggaacaagaaaccgcattgaaagtgactcaacgcctttacgaaaatgcacgtatggcagtgggaaaagacgtgaaagcattgcgtcagcaattgcaggagggggaagcttgtccggtttgcggtagtacggtgcatccttaccatcaggaacaggaggtagtagatactcttttccggagtatagaacaggagtataatgcagcagtagcaaactgtcaacagatcaataaccggagcattgttttgcaacgtgattggacgcatcagaagatggtggacggacagattggagaacagttggcggcattgtataaagctgggatcgatgctggtaacgaagagcagatacaacatcgtttgacggaactggcagaacgtattttagaatatcgtaatctttatgcagaatggcaacgcagcgatgaagaaattaaaaagatgcgtgcgcattgtgaagctcttcgtgagaatgtatctctttgtcgcctggcgatgcagaaagtatcgtctgctaaagaacagttggtgttattgcagaatgctgcttcagccgaacaaaagagatttgaagttatagagaaagcgttgaatgtgctctgtcaggaacgttcgcaactgttgaaaggaaaaagtgcggatgaagcggaagcagccgtggcaaaaagagaaaaagagctgaatttggctttggagaaagcacgcaaagaggtagaggctgtgcacaatcgcctttctggtctgcaaggagagatgaagcaaattacgctggctatcggagaattgcaggaacagtataaaaagattgagtctcccgaacaacttcccgaaataataaagaaacaacaggaagaaaacctgaatatcgaacgtaccttttctactatggaagcccgtcttttgcaacaggcaaagaataagctaactgtggaacagattgcgaaggaactggcagagaaacagacgattgccgaacgttgggcgaaacttaataaactgataggcagtgcggacggagcgaaatttaaagtgatagctcaaagttacactttgaatttgctgttgcttcatgccaataaacatttatcctacctttctaaacgctataagttgcaacaggttcccgacacgttggcgcttcaagtgatagattgtgatatgtgtgatgaaatacggactgtgtactctctttccggtggtgaatcattcctgatatctttggcgttggctttgggcttgtcttccttatcaagcaataacctgaaagtagaatctctatttattgatgaaggattcggctctttggatgcggaaagcctgcgtacggcaatggaagcattggaacaattacagatgcagggacggaaaatcggagttatttctcacgtacaggagatgagtgaacgaatttctgttcaggtgcaagtgcataagaaagtgaatggaaagagtgtgcttaccgttgtagggtaagcacatccattatctccttttacattaattcgttcaattcgcttaaattcttctttatttcgtggatgcgatttaagaacttcttgcggtaaatccataaaatcaatcctagtcctccgccccataacaggataaagaaggctatcatgcctattccatattgccacacttgccagtagataaatgagagtacagccagtaccaggaggaaagcaatagcaatcagtcgttctctgatggtccatcggtgtatacggttcacgcggctgattacctctaccagaggcatctcgtctatttgagtccgttggaggtagcgggtggtgacgatgtcccagcaaagtgcgggaatccatgcgaaaatgataatgatgtagatcgggttcaatctgttgtgcaacaacacctccgctaaaaacaagatcaatatcggcaaagaaatcagaataagcttgatgttcaggctggcaatggcatggatacctttgtctgcatgccttatcagcttttcaagctcttcttctttgatgaactctttatctttcaagtgttcatccagggcattccaagattttttcagttcttccagttccatatatcttattcctcctttttcattcttttaagtttgtctttgatgcggcttagtttagtcgctacattggtaaccgtcagcccggtaatttctgctatttcttcataacttttgtcttcgagatagagcaggataattgatttgtcgagttgtcccagctggttaatcatttgataaagctgtttcagcatttcgttgatcgggtcgtgtgcttctatggtccagtcagtatctttggtgagactgactatttccggcacattcttttctttacgataaaaactgatacaagtgttgagggcaatacgataaatccatgtagatactttacattcttttctgaatttaggataagctttccaaagattcagtaccacatcctgataaaggtcattgagcggagcattggggttggcgtacagatagcacactttgtagatcacccgctcatattcgcggattaccgacaagaactcttgctcaataggaggattggcttctgttgttcgttctctcatggaatctatgcttgcttttctggttagttagtcgtgagaaaaggagaaaaatcacaggagaatgatgattattgaagattcgctgccagaaacttgcgcatttcttcgatgctttttccccggcggcgggtataatcttcgagttggtcttctccaatctttcctacagagaaatattcggaagccggatgtgaaaacataagtccgcaaacagaagcgtgcggatacatggccccgttttcagtcaatgaaatgcctatctgtttcatgtccagcagttcatccaacaggaagttgacagactgatccggtaaagacgggtagccgacggcagggcgaataccttgatacttctcgaccagtaaatccgctatgcccagattttcttctttggcatatccccatgcttcttttcgtacatactcatgcatcttttctgttgcagcttctgccagtcggtcggagagggtttggacaagtaagtgtttatatgggtcctgttcgtacagtccttccatgtccgcatcaatagaagaagcaaaagcaccgatggtgtcggggatgccggaagaaagaggacggataaagtcgcttagacaaaggaaaggacttccatctcttttgggcgtctgctgacgtagcaaaggaaaggtgatgaattggtctttttctttctcaataatcaaattatctccgtcagcgtttgctttacagagcttgaatagggtctttacctcataatcccggtcgagtagatcaagcatccggttggcttctttaaataactgtatggcttcggaagccttgctacgttcttcttccggaaaagtcgtcagccacgaagcacggcaggcatcacatccgtgaatgttggcgatgcctgcaaaacgtggctggaaaccccatgcgtggaaaaagtaaatccagttgatgtagggagtaactgtgtgtattttataagatagaatcataatttatacaattaaatgggaatttatcggttaaatgagaatttatcggttaaatgggaatttatcggttaaatgagaatttatcagttaggctgaaagccttacaattatatatttattggggtgccctgaaagggcttaattatatagcgtagggcaacgccctacgaaaaagacaca

SEQ ID NO: 8132 - DNA, 20240 bp, Unknown
  gut microbiota DNA sequence
cagcatgatatttttcagtatttcaaatagatcatgctcttcttctgtgatttgtagcagtgaaacggggttaggagcagaactgtgaaatatctcctgattaatattaattccgatgcctgcaatgctctgactgatattccgccccatcagatcgttttctatcaacatcccacatatttttttttctttccaataaatatcattcggccatttgatagaaatgtcggtggtataggtatccaattcttctttaatagctaaagatataatctgtgaaataagaaactgacgtcgtgcttccaaaaacccggggaagataacggtgctgaaaagaagattcttgccaggagctgattcccacgaatttccacgctgtccccgaccggaagtctgaaaatcggcgacaacgacagttagttcctccactttctgttcagaacagagagattgcagataattgttggtagagttcgtctcgttgatatgaatcaatggaaccgggaatgtatcaggggagggcatcatattctgcgcgtaactttttagtaaatttcttgattacctcatcataagagtggtcaataagctctttcatcaatttatcgtctacgtcactgtcaaagcggacactattccagtactttttattaaaatgataagccccttcaattcccgaataatgttcacgcaattcgattgctttttccggatcacattttagtgcgatgtgattagcttcttccaggtcaatgagagcaaacatcttgttcataacctttacaactagtgatacatcatcgaaaggaaaagattcggtgactcctttcttgttcaagcagtattctctgacagtttctacattcataataaattaataattatagtatgttttcataattagtttatatcataaatttaagcgcagattgcacgaatttcacggcttttataatgatgaatatgtaaagccacagcattctttaatataaaggaggataaaacgcttcctctatgtgttcaaccttgaagttcccgtcgttgcctactacagtgatgatatcgaagcgtacaggagtgtcaatctgaaacaatctgatataggcatctgctgcacgtactgtacgttttattttgggtaaatctacagcatcttccggggccgcaaacagagtgtcactgcgcgtcttcacttctactacaatcagttcattgtcttttgcggctacaatgtccagttcgaaatgtccttttctccaattccggtcacgaataagataacctttctgctcaagataagctacggcggcattttctccggattttcctaaatcattatgttcagccatctttttttgcaaatttactgcttttattctttgtttttacagaagtaaaagtaattttgcagaagatatgagaaaaaggagtaagaagtgcctgaaaatgcatgtcgagtgtaccaaaagggaacgacggatgagcattttattgagcgacgaagaacagctgattgtagatcgttatcttgagaaatataagataacgaacaagtcacgttggcttcgtgaaacaattctcatgtttattcataagaatatggaagaagattatcccaccctttttggtgaacatgatatgaggcgatagttgaaaattaaaaattaaagaggggaatgctagacgatatttacttcatgaaacaggctttgatagaggcaggtaaggctgccgagcggggagaagttcccgttggagctgttgtggtttgtaaagagcggattattgcgcgtgcccataatctcacagaaacattgaatgatgtaacggctcacgccgagatgcaggctattacagctgctgccaacgtgcttggtggtaagtatttgaacgaatgtaccctgtatgtcaccgttgagccttgcgtgatgtgcgcaggggctattgcttgggcacaaacaggcaagcttgtgtttggtgccgaagatgaaaaacgcggctatcagaaatatgccggttcggctctacatcctaaaacagtggttgtaaaagggataatggctgacgaatgcgctgcactaatgaaagagttttttgcagcgaaacggaaatgaaagcagtgtaatggctatttgatttcctcaaaatctacatattcgccatcatcctgggtgaatatttttttatgtcttttctccggaacattctcggaatatatttcttcttcatcatcatttgaacggcgattcgtttggttatagctttgttggcttgtacgtcctgattccgtttgtttcgggcgggatgaagaagaactacgtcctaatccgaaaatcgttcttagtatgaagccgacaatagaaaggccaaatacgaaaatggcaatgataaaaatgagtatgaataaaagtatatgcatcggactatgatttttatgttgttactttgataaaactcatagtacaacaaacgtgccaagagattgtttatttactttttcttgtaaaaagtgaaagtaaaatataccatacaataatggcggcaaaactgctaattccaagaaatagaagaagaggaatgcagataatcaggaatataaaactgattttgttgtcattccatgacaggtttttaaatttcaaagaaaacatcggtatttctgataccagtagtccggaaaacagacagacaagtataagaaggtagacaggatggcagttgtctgatatcaggaagtcatgtgcccctgccactaatgagccccaaaacagagcattggctggtactgggagtccgacaaaagagctggtctgccgtgtgtcattgttgaatttagctaggcgcaaggccgaaaaaacagaaatcaagaatgccaaatagggtagataaggagcgatgaactccatatttgccggatagtacatttctttgaacaaggagaatacgatcagtgagggagcaactccgaagctgacatcatctgccaatgaatccaggtcttttccgataatggaatgtgcattgagtgcacgagccaacaatccgtcaaagaaatcaaaaatagaacttaaagcgatgaaaagtagagccagttcatattttgcttcaaaagccatgacgcaagcaatacaaccggagaaaaggttcaggcaggttacggtattcggaatactatttttaataacgtttgtcattgtgacagaattatttaagtttggcgataaccgtttggttaccggtcgttaattgtcccattttgacacaaatctccgtgccaatgggtaaatacacatccacgcgggaaccgaatttgataaatcccatgtgttcgtcaatataacattcttctcctacttcagcgtaggtgacaatacggcgtgccactgctccggcgatttgccgggtgagtatttccactccttccggagtttcgatcactaccgtagaacgttcgttttctgtgctggctttcggcagccatgctttcataaaattgccattatgatgcgctacctttttaatagtaccatctaccggataccagttggcatgtacattcacgatgctcatgaaaatagataccattaagcggcggtcatggaaatattcgttttcatccacttcttcgatgacgacgatttttccatcggcgggtgctacgacaatcttttcagtgtcctgcccgaagagacggatcggacatcgaaagaaattcaccatcagcagatagactgctatactcgctactgctaccacataaaaaggtattttgcaatcgattccccaataaagagccgcattaatcaatagcaatagcaaaaagcttgcccataatatatgtgttccttcgcggtgaatacgtattttcttcaatttctttagtcggcccatgaatgctgtttaatgatattgtctgcaaaaatatacttaatttaaaaaatcagcaagtaaatgagcatagaaatgcgaatgttgataactttttgaggattatttttgtttataacccaagaggtagtaattttatgccttcaaattaactacttatcattatgcaggatttcgttcatttacatgtccatactcaatattctctgttggatggtcaggctagtgtagctcgtctggtcgataaagccatgcaaaatgggatgaagggtattgccgtgaccgatcatggaaatatgttcggtattaaggaatttacgaactacgttaataaaaagaacagcggtccgaaaggtgaagtcaaagacctgaagaagcgaattgcaggaattgaggccggcacaatagagtgcgcggataaagaagcggagattgctgcctgcaaagctaagatagtggaagcggaaaacaagcttttcaaacctgtcatcggttgtgaaatgtatgttgcgcgccgcactatggacttaaaagaaggtaagcccgaccaaagtggttatcacttgattgtattggctaagaatgaaaaaggttatcataatcttattaaattagtatcgcacgcatggacacgcggatattatatgcgcccgcgtactgatcgtagcgaactggaaaaatatcacgaaggacttattgtttgttcggcctgtctcggtggtgaagtgccgaagcggattactgccgggcaatttgcagaagccgaagaagccatacaatggtataagaacctgtttggggatgattattatctggagatgcagcgtcataaagcgactgttccccgtgctaatcacgaatgttatccgttgcaggtaaatgtgaacaaatatctgattgaatatgctaagaagttcaatgtcaaactaatttgtacgaatgatgttcactttgtagatgaagagaatgcggaagcgcacgaccgtttgatctgtttgagtaccggtaaggatttggatgatcctagccgtatgctttataccaaacaggaatggatgaaaacacgcgaagagatgaacgaactctttgccgacgttcccgaagcgttgagcaatacgctggagattcttgacaaggtagaatattactccatcgaccatgcacccatcatgcctacttttgctattcccgaagattttgggacggaagaaggctatcgggcgaagtttacggaaaaagacctgtttgatgagtttactcaagatgagcacggtaatgtggtattgagtgaagaggatgcgaaagcaaaaatcaaacgcttgggtggctatgataaactctatcgtattaaacttgaaggagattacttggcgaaactagcttttgacggagctaagagaatttatggtgaacctctgtcggaagaagtcaaagagcgaatgaacttcgaactgtatatcatgaaaacgatgggtttcccaggatacttcttgattgtacaggactttatcaatgcggcacgtaaggaattgggtgtgtcggtcggtccgggacgtggttcggctgccggttcggcggtggcctattgtctgggaattacgaaaatcgaccctatccagtacgatttgctgtttgagcgtttcttgaatccggaccgtatctccttgcccgatatcgatgtggactttgatgatgacgggcgtggagaggtacttcgttgggtaacgaataaatatggtcaggaaaaagtagctcatatcatcacttatggtacaatggctaccaagttagctatcaaggatgttgcccgtgtgcaaaagctgcctctatcggagtctgaccgattggctaaattagtgccggataagattcctgataagaaactgaacttgcggaatgcgattgaatatgttcccgaactacaagctgcggaagcatcatccgatccgttggtacgggatacgatcaagtacgctaagatgctcgaaggtaacgtacgtggtacaggtgtacatgcttgtggtacgattatctgtcgtgacgatatcaccgactgggtacctgtcagcactgctgatgataaggaaacgggcgaaaaaatgcttgttacccagtatgaaggttcggtgattgaagataccggattgattaagatggacttccttggtctgaaaactttgtctattatcaaagaggccgttgaaaatatccgtttaagtcgtaatgttgaagtagacgtcgatgcgatagacatctgcgatccggctacttataaattatatagtgacggacggacgattggtacattccagtttgaatctgccggcatgcagaaatacctgcgcgaattgcagccttctacattcgaagatttgattgccatgaatgccctttatcgtccgggaccgatggattatatacctgattttatcgaccgtaaacatgggcgtaagccgattgagtatgatattccggtaatggagaaatacttgaaggatacgtatggtattacggtttatcaggaacaggtgatgcttctgtcgcgtttattggcggactttacccgcggtgagtctgatgcactccgtaaagcgatgggtaagaagctgcgtgacaagctggaccacatgaaacctaaatttattgaaggtgggcgtaagaacgggcatgacccgaaagttcttgaaaaaatctggaccgactgggaaaagtttgcgtcatacgctttcaataaatcacatgctacttgttattcgtgggtagcttaccaaaccgcttatctaaaagctaattatcctcctgaatatatggctgctgtgatgagccgaagcttgtcgaacattaccgatattacgaaactgatggacgaatgtaaggcaatgggtattcagacgctgggaccggatgtaaacgaaagtaacctgaagtttacagtaaaccatgatggtaatatccgttttggactaggggctgtcaaaggtgtaggtgaagctgctgtccatagtattatggaggaacgtagtaagaatggtcctttcctcggtatattcgactttgtgcaacgtgtcaacctgaatgcctgcaacaagaagaatatggagtgtctggcattagccggagggtttgatagttttccggaactgaagcgggaacaatactttgctgtaaatactaaaggtgaagtatttttggaaacgttgatgcgttatggtaaccgttatcaggcagataaggcagctgctttcaactctttgttcggtggtgaaaacgttattgatgttgcaactcctgaaatacctcaaggtgtagaacgttggagtgatctcgatcgcttgaaccgcgaacgtgatttggtaggtatctatctttctgctcatccgttggatgaattttctatcgtattggaacatgtctgcaatacacggatggcggatttggaagataaagctgcacttgttggtcgtgaaataacgatgggagggattgtgactagtgttcgtcgcggagtcagcaagaatggaaatccgtatggtattgctaagattgaagattattccggttctaccgaaatcccattctggggaaatgactgggtgacttatcagggatatctcaacgaaggaacgttcctatatattaaagcccgttgccaagcgaaacaatggcgacaggatgaattggaagtgaaaatcacttctatggaacttcttccagacgtgaaagaagaattggtacagaagatcacgattatcattcctctgtcagtcttgaactcggctttggttactgagcttgccactctgaccaaagaacatccgggaaatacggaattgtattttaaagtgacggatgatgccgatgtaagtcacatgtcaattgatttgatttctcgtccgattaagctttcggtggggcgggatttaataacatatttaaaggaacgtcccgaactgggatttcatataaattgattatatttgtggcgagaataagctaacgaaataacatttaataattaatacttaaaaaaatggctttagaaattacagacagcaactataaagaggttcttgcagaaggaaaaccggttgttgtagatttttgggctccttggtgtggcccatgcaagatggtggctcctatcattgaagaattggctgcggagtttgaaggacaagtaatcatcggtaagtgcgatgtagacgaaaatggtgatatggctgctgaatatggtatccgtaatattcctactgtattgtttttcaagaacggtgaaatagtagacaaacaggtaggtgcagttggtaaaccggtattcgcagaaaaggtgaagaagcttttatagtcgataatacttaatacttatcacttaatacttaaaaaaatgggactggaagacgattttttattagcagatgccgatgacgaaaagaccatcgagtttatcaaaaactatctgcctcaagaactgaaagagaagttctcggacgatgaattgtattattttctcgatttaatcgacgagtattactctgaaagtggcattctcgacgctcaacccgatgaagacggctatgtcaacatcgatttggaagaggttgtggcttacattgtaaaagaagccaaaaaggatgaaataggggaatacgatcctgaagaagtcctctttgtggttcagggagaaatggaatacggaaactctctgggacaggtggactaaacgacgtccggtctcattgcagataaaattaagataaggggtgtgctctgtgagtataccccttttttttttgcgggctttttctcaaacagttttatgctatgagaaaaagttctcactgcaatgagaaaaaatactcattgctatgagaattaattctcactacagtgagaataatcccttgcctgaatagtctgaaacagcgtattctggttatatttcttccaatgcataatactgataatcgcgaagtatcgtctgaagaaatttctcttgattaccctcacggggagtaacggaaagtaattcctgtacttttttggcaagtgccgtgatacgtcttgcccggtctttttcgctggattccaaagtccgggtaattacattcacttgttcgagagataaatcagccgattgcggatataccggatgataattttgggtcagataatcaaattcatccaggctgacatgtatcttacgatagtttttctctttaattaccatagtgccggcagctagatcccctaatcgttggttgttcttattcaataaaacgaccagaagtccaaggccacttgtgatgggaccatcaattgggaaaagaagccatcgtaacagataagagccgatgcttggagtagaaccgtctacttttacgacacggatattgatgagttttttgccaaagctctgtccgtgattgaacatctcgcaaagaaaagaataaccgagaatcggtaaataaacgacgcacagaaaaaagaacaaactgaatcctgacggtaaacttaatttagacaagagcgtaatagtggacaagatgtaaagcccgatcagaaaataatcgatgattaaagccatcagtcgttcgccgatactggcgggcgtttggctgatacgaacgaattgtccggttattatcgtagattctgccatttcaggttaaacatttttaggattccgttgcaaatatatcataattctcttatttttgcttccggtttcggacaaaacttatccgaaatctattgaaaagcatgaaagaagtaacgtttattcgtcggaacattgaaaaatggaaggagacagagaaagttgtggagcgggcggcaagtctgtcccccgaccaactagccgatgcgtatacggacttgacagctgacctggcatttgcccaaacacatttcccaacttcccgtattactatttatctgaataatctggcttcagcgttgcacaacgaaatctaccgcaataaacgcgagaagtggacacggattattactttctggacacaggaagtgccacgaaccatgcacgatgcacggcgcgaattactgacctcctttttgatttttgttgccagcgcattaatcggtgtattatcagcagcgaatgacccggattttgtccggctgatattgggaaacggttatgtggatatgacactcgacaatattgccaatggggagccgatggccgtatataatggttcttccgaagtaccgatgttcttgggcattacacttaataacgtgatggtctctttcaactgctttgcaatgggattgctgactagttttggaacagggtatatgcttctctccaatggtatcatggtaggagcttttcaaacattcttttatcaacacgatttgttgtgggaatccagtcttgccatctggttgcacggaacgcttgaaatctgggcgattatcgtggccggtgccgccggattggctttgggcaacggctggctgtttcccggcacttattcccgactggaatctttcagaagaggagcgaagcgaggcttgaaaatagtgatcggcactgttccggtgttcattatggcaggctttatagaaggttttcttacccggcacacagagcttcccgatgtgttgaggcttggcgtgatattcacttctctggcatttattatattctactatatttatttaccaaatagaaaaaaacatggaatcacagaaacctaagattgcgatgtatgtgaaacgtcctttcggtgagaagttgaacgcttcttttgattttataaaagagaattggaaacaattgtttaagtattcaacttatctgatactccctatatgcttaattcaagccgcaaactttagtggtttaatgggaagtatgacagatattactgctatgcaggcgtccggaggaataagtgataatcctttagctgctctgggaccttcatttgcactgaattatgcaggagttgtctttttttcatgtttgggggctttgttgatgacttccttgatttatgcgatggtacgattgtataatgaacgggaagaacgcctgaacggggttgtattcggcgatataaaatcgttgttgctccgtaatattaaaagactgtttttgatggggatcgcctgcagctttttattcatctttgcggtggtctttattgtcttattggctgtattgacacctttcacactcattctgaccatcccgcttttattcgcctttatggttcctttggcattaatggctcccatctacttatttgaagacatttcgttgggtgaggcatttgcaaaaacattccggttgggatttgctacctggggaggcgtctttctaattttaattgtgatggggattattgccagtgtgttacaaggaatcgtttctataccctggtatgtgatctatattgtaaaaatgatctttacgatgagtgacggaggtgcaacctcttcatcagtcggactgaactttgcgcaatatttgttctctatcctgatgttgtatggttcttacttatcggctatattcggtatcgtcggtctggtttatcagtatggtcatgcatcggaagtggtggacagcataacggtagaaagtgatattgacaattttgataaactctaaaccaaacctccactagatgaatctcacttccccggctgatacactagtctgtgatacggtgcagattgccctctggcagtctgatccggcatacaactataattgtgaactgattactccggagatgaatgtctttgagtggatcagtcggcagtttggggagttgttgcgtaaaatattcggcagtcattttgctgaagagtattcagggcttatcctggtatgtattgccattcttcttttgttgctgattgtttggtttgtctatcggaaacgcccggaattgtttatggtctcgcataaaaatgcgttgccttatacagttgaagaagacaccatttacggagtagattttccgggagggattgcggaagcgctttcccgtcagaattaccgggaagcagtacgtttgctctatctgcaaactttgaaacaacttagtgacgctgaacgtattgactggcaactttataaaacgcctacccagtatatcaatgaagtccggctaccggctttcaggcaactgaccaatcatttcctgcgggtacgttatggcaactttgaggcgacggaagaactcttccggacaatgcaggtcttgcaggaagaaatagagaaaggaggcgtcgcatgaaaggaagtcgctggttcattgtctttattgtcgcttttctattcatcatgtttgcaatagaatataatttaccgaagaattttgtgtggaagcccactttcggacataatgacgagcaacctttcggatgtgcagtgttcgatagcgtattgtcttcttctttgccacagggctacactttttcgaggaaaagcctctatcaattggagcaggaagatacgacgcaacgcaaaggtatattggttatctctgataatttgcgattgtcggacgtcgatgtaaacgctctgttgaaaatggcggaacgcggagataagatcatgttagtgagtaccttgttcggcagatatttggaagataccttgcagttcaggtcttactattcttacttcagtccgatggctttgaagaaatatgccacttcatttttgaaaaaagatagcttgcattggataggagattcgacggtttatccccatcagactttctatttttatccccagttgtgttcctcttatttttggggagattcgcttccggaaagggtgttggcacaaagagtttttgagtcgaatgagttccggtatgaaacagaggcggactcgttgacaacggatagtcttgtttatatgcctgtagcgatgtcccgtcggtgggggaaaggagaagttattttagtttccactcctttgatttttaccaattacggaatgttggacggcaagaatgcaacctatattttccgtttgttgtcgcagatgggaaagcttcccatcgttcgcacggaggggtacatgaaagaaactgcacaggtgcagcaatcacctttccgttattttctggcacatgaaccgcttcgttgggctttgtatctgacgatgattaccatcatactctttatgatattcacagcgaagaggcggcaacgggtgatccctgttattcacgagccggcgaataaatctcttgaatttaccgaactgataggcacgctttactttcagaagaaagaccatgcggatttagttcgcaagaagttttcctatttggccgaagaactgcggagagagattcaagtggatattgaggaagtggccgacgatgaacgctctttccaccggattgcccggaaaaccggaatggatgccggagagattgctaaatttatccgcgaagtcagacccgtgatttacggaggacgtgttattgatgcggagcagatgaaggtatatatcgataaaatgaatgaaataatcaatcatatctaaagaagaaatttatggaagagaatacagaacagcgagtagatttaactctcttttccgagaagatacaagagttgaaagaccggattgcttccgtcatagttgggcaggagcagacagtcgatttgatactgacagcgattttggcgaatggacacgtattgatagaaggtgttccgggagttgcgaagacactgttggcacgtttgacagctcgtctgattgatgcagacttcagtcgtgtccagttcactccggacttaatgccgagtgacgtattaggtacgactgtgtttaatatgaaaaccaatggttttgattttcatcagggaccgatttttgcagatattgtattggtcgatgaaatcaaccgtgctcctgccaagacacaggctgccttgtttgaggtaatggaagagcgccagatcagtattgatggaacgactcaccggatgggagatctttatacgattttggctacccagaatccggtagagcaggagggaacatacaaacttcccgaagcacagctcgaccgttttctgatgaagataacgatggattatccttcattggaagaggaagtgaatatcttggaacgtcatcataccaatgccgcattggtgaagttggacgacatcgttcccgctattaccaaagaagaactgctgtcgcttcgtgcttttatgaatcaggtatttgtagaccgcacgttacttcaatatatcgcattgattgtacagcagacccgtaccagcaaagctgtatatttgggagcttctccacgtgcatctgtagccatgctgcaatcgtcgaaagcgtatgctcttttgcagggacgtgattttgtgacaccggaagatatcaagtttgtagctccttatgtacttcagcaccgtctgatcctgactgcggaagctgaaatggaaggctattctccagtgaaagtgacgcaacgcttaattgataaagtggaagtaccaaaatgaaaagatttatgatttatgagttctgatttatgatttgggctgcgcgttggatgtctgactctattcataacataaatcgaagaaatcataaatcgtaaattataaactgtacgtaaattgtaagttgaagaaatcgtaaacccaagaaattataaatcataattcataaatcataattcatttgtttctaactcgtcgtttctatattgcccttgtcatagttatcctgttgttgggtagcggatatgtttttgctccgttctttgttatcgggcagtgggcactctttgtcttgcttttggtggtactggcagacgtatattctctttatcgtattcgtggaatccgtgctttccgccagtgtgccgaccgtttctctaatggcgacgaaaatgaagtaagtattcgggtggaaagtagttatccgcatcctgtatctttagaaatcatagatgagatcccttttatctttcagaaacgtgatgtcgactttcaggtgaagcttggagcaaacgagggaaaaacagttacctatcgtcttcgacctactcatcgtggtgtttactctttcggtcatattagagtttttgtgaccggaaaaatcggctttatatcccggcgctatacttgtgcagaacctttggatatcaaagtgtacccgtcatatctgatgctccatcaatatgaattgctggcaataagtgataatctgacagaattgggaatcaaacgtattcgccgggttgggcatcatacggagtttgagcagattaaagagtatgtaaagggggatgattaccgtacgattaactggaaagcaagtgcccgtcggcatgaacttatggtgaatgtgtatcaggacgaacgctcacagcagatttataatgtgatcgataaaggtagagtgatgcagcaagctttccgtggaatgaccttgctggattatgcaattaatgcttcgctggtgctttcgtatgttgctatgcagaaagaagataaagccggattagtgactttcgatgaacacttcgatactttcgtgcctgcttccaagcaatcgggatatatgcagacattgctggaaagtctttatagccagcagaccacttttggggagacagacttctcggctctttgcgttcatttaaacaaacatgtcagtaaacgtagcctgctggtactatatactaacttctcgagtataggaggaatgaaccgtcaattatcttacctgaaacaactaaaccgccagcaccgtttgcttgtagtcttttttgaagatgtcgatttgaaggaatatatcgcccaaccggcaaaagatacggaagggtattatcggcacgtgattgcagaaaagttcgcttatgagaagcggctgattgtatctactttgaaacaacatggcatctattctttattaactacaccggagaatctttcgattgatgtgattaataagtatctggagatgaagtcacgacagttgctttagacataagaacaaaagaacatatttttgtagtcttttgtacttatgttcttttgtctgaaaaaatgtctcaaagagtgatggctttccgtgtttccacaaagaagaatatagccattccaatgatgataattcccagtattccatagaagagtcgtgctcggttgcgtcctacgtttcggacaatggtttgtgcattgcgcgttgtaaagaaccagtcccagttcagcaatgacgccagcagggagacgattcctgccagcgcaaagattccttgtacgatatattgtccggtcatagtctgatcactctatttccgtcttccagttcttcaatcgttacttttacggcatttcccggaagtagttcttctaccagttccggccattcgataaagcagagagcaccactgtagaaatagtcttcgtagcccatgtcgtacacttcacttagtttcttgatgcggtaaaaatcgaagtgatagattaattctccggtttcgtccgaacggtattcgttgacaatggcaaaagtaggagaagtgataacatccgttacgcccaattcttcgcagagcgctttgacaaatgtcgttttgccggcacccatctttccgtataaagcaaatacagtgttgtcgcccatagcagcgataaattcacgggctgcttcatggatactttccagtgattgaattttgatttccatatactatctattattatgactttttcctgcaacaactctttccgattttacaaacagcgtaaatcaggatagagaagaatatgatggaagctcccgaagggactttccagtgataagaaataaataatccacctaggcagcccaagaaaccgatgccgattgataaccagataatcttcttgaaactataagtgaacaagttggctgtcatctgtggaatggtgagaagagaaatggccagtacgatgcctaccatacgcaggcaggctacaattgtcagcgcaatgaacatcatcaacacatattcgaatatctctaccggaatcttttgcgaacgtgcaaactcacggtcaaaagcaatatatacgatagggcggataaacagataaaagaatccggtcaatattagtgccaatatgccgagcatccataagtcgatttggttgatggtcaggatattgccgaagaggtaagccgacaggtcgggcgcaaatcccggcgacaggaagctgaacataattccgagtgccatccctaacgtccagaatactgcaatggcagaatcttcgcgcatatctttccgtctgctaagccactcgacaccaaaagctgataataccgagaatacggctgccgatagtatcggggaaattccggcaaacaatcctaacccaattcctccgaaagaagcatgagtgattcctccgctgataaataccaggcggcgggttacgatatatgtaccgataatcccacaggcaatgcttgccagcagacttcccaatagggcgtgttgaaagaatgtatattgtagtaaatccatcacctctcatctgctttttttacttctacgtttcttctttctccgataatcagaaaaacttcgtctttgagatcatccggtaattcaatgccacggagctgaaggctgcgtacccatccggccacttctacatccagtgtcgtatacaatacatcccgaaacatttctgtttcttcttctgtatacgcatctcctgccttgccaatgaactgatccagttcttcgtcatcgtaatattctatttttttgctgacagctgccagcaggctatcccgttcgcatacttcgtgttgtccgcagcattccacatctacttccttcacttccggcatacggtccagttcgcccttttctattttcttttgcagtcttttgttgcggataattccggctatcagcgcaatgacacccagcaacaccagacttataataagtatccacatgacaatataacagttaccaatcaattttgtgcaaagttacttataaatttgcattctatcatgtatgctatctatttctttcgtacttttgtatgttacctacaaaataaacattggcgggtgaattaaatttcaccaatcaatgaaaatgacttaagatatttgaagtataatgaagagagattatttactattagcgttactgttggttggaaacattacttttgcccaatctcctattgagagggccttgaatacaattaaccgttcctctgccgaagctactatcaactttttggctagtgatgaattgcaagggcgtgaggctgggtttcatggttcgcgtgtgacttcagaatatattgtttctttgttgcaatggatgggagtatcgcctttggctgacagctatttccagccttttgatgcttaccgtaaagaacgtcagaaaaaaggacgtctggaagtacatcctgattccatagcaaaactgaaacaggaagttcatcagaagcttaccatgaggaatgtattgggaatgattcccggtaaaaataccaaagaatatgtgattgtgggggctcatttcgaccatttaggtattgatcctgtacttgatggcgaccaaatatacaatggtgctgacgataatgcttccggtgtatcggcagtgctgcaaattgcaagagcctttttagccagtggacagcaacccgaaagaaatgtaatcgttgctttttgggatggagaagaaaaaggactgcttggctctaaatattttgtacaaacttgtcctttcctatctcaaatcaaaggctatctgaactttgacatgattggccgtaacaacaaacctcaacaacccaaacaagtcgtttatttctacacagccgtccatccggtctttggggattggttgaaagaggatatcagaaaatacggtttgcaattggaaccggattaccgtgcctgggaaaatccgataggaggaagtgataacggttcgtttgccaaagtaggtattccgatcatttggtatcatacggacgggcatcctgattatcaccagccttccgatcatgccgaccgattgaattgggataaggtcgtagaaatcaccaaagcctcttttctcaatatgtggaagatggcaaatgagaagtctttttaatgaagcagataaaatacaatcctgataattagcgggaaaagtcaggattgtatttcttattttttgagtattctttttaaatagtcgataggtggcaaattcacagtctcaaaacttcctttataaaatacagcaaaattattaaaaacacacggtaactctttggctttctgtagcgtatctacttgaataaaagaaacagggacatcatttgtttcacaatattgtttgatcatttcaatgtatttatagatataggggcattgcatatcataataaatcgtcagttcctcactttctattttcagattcttggcatttggcgcaaattgcggtactgttccgtcgaaagaaagagcaagcaattcatatccattatcggtagtgtcaaccacttcaaaaccaaatttctttgcaaatgattggtcggaaagccagctcttctgtttttttgccccaagcatacaaatgccggatctacctttttctttggcatcggctatacagtactctattaatgctttcccatatccgtttcctcgggggctacctagcacccataaacaatacagataataatagttgtcgccgatgacgggaacccaagctgtttcaagaggggcatattcaataaaaacagtagctttggcgtttaactttctaaagacatggccttcattcagccggtcggaaagccattgccgttttgcttcaataccaggatgagactttttgctgcggatgatgcagcataaatgctcattagaaagattttctgttgttaagtttgtaaagtcagtattcatatacacctttgtttcaagttagatattatcaatcggatagtgtagtaattgtaatacttgattagcccggttgacagataagcaaatacaaatgtagtgaattttgcggataatctctgttgggtgactatggaaatcataaagactttttatacatctgcagaggatgttgaacgagaactcatgcgaatgtaaaacttcattgcctaacttaggattagattgaccgcagttctacctaatctggagcgagacaatgaagtttataaaaataaaaagataacagatatataatattaaggtcgatatatttgtaaactcaaagagttgttcttttatctttttattattctacaggttgtgcaccggtgtcgccttcaat

SEQ ID NO: 8133 - DNA, 19002 bp, Unknown
  gut microbiota DNA sequence
catttaccggcgtagcgccggagcaaggtttccattcggtattccctgaaagagatacagttccaccctttagggtatgtctaaaacgataacatgccgaatggaaaccttgttggggcgctacgcccctaaattcccatttaacgaacaatcatttacaatgagttcaatatttgatttgcccggttcacggttactgctgccggggtttccggcatactacccaagttgaacggagcaagcattttctctattttctttaatccggctttatttccctttttctcaaattcctgacggaggatatttatcttctcgtgcgcctgaattccttcaatcaagcgttcgaaacggatacagctacgcgctcccggatatacaagatacgtatctccacctgcccaactgcggaaacgggaatcgagcagcggttccaatggccagctgttgtatgcccaacgcaaataaccgtccaggtgtttcttagaagaataataacttatccagacagcttctgcaggatcggagaaagtaaatgtattggggtgagcttccgtacagcaggtgtaatagttggtacgcttgttttctgccacacggcggaggcgtacttcttcggggaagttctgtccgattacaatgcagtaatcatacaaatcgggctcaatctccgcatggtaatttcctgccaacgaaactttgaaatccggatcggccttacgaatcaccttcaaggtcttctgcatcacttccatcggacgttcatccattgctatagcgcagatatcgaaccatcctttttctttcaggtgcttggagaaagacgaaagcattgctacccacatttcttcgtaagcctcctcgcccggtgctgttttcacaaatttcagcgagttggttgcctggtcgtaatactggaatgacaactcccaaggaaccattgaataacagttgatctgtttgtcaatgcccacactcatcataaattctacccaacggtcgaaaatggtatagtcgaaagaccatgtgccgtccgcccgtttcatccaggtaaccattgtatcaaaataatcttccgtctgaccgttccagggtttgtgcgtcaaagtagccgtgataatcttttgtccggcgtctgccagcattttcatcaaaggacgcatggcgtctaaatgctcctggctccatagaggaacctgatagtaacgtgccactgcatagggactttgccacaaatccaagtggtaagcccactccgaaggcgccggaagttcacgggaagaaaccgtaatttccagattcaggcgttgcaacaaacgagagccgtcgttgattagcaactcccctttatacgttccgggaacagccgattgaggaatccaacattgcacccagacaggttgaactgtgcgggcaggcaaagccatcgctttcagactggtatcaatcggatcggccaccaataatgaatcataatccaccgctttccgatgtccgcaggcacctctgccgtctttgttcaattcgtccgtcatcacataacgaacaaaaccgccggtgaatgcatcttggggaagaacatttcctttcttgtctttgaaatcaccaaagctgaaattcaggtctttcagttctacacctgtccatacaaccgcttgcgcgttcacacgttcaccacgccagcctttcaaagcaaccgtttgctggttcttcaaccggggaagcccgtgttttgcgtaccggacgtctgttgtaccccaagacacttgtgttattgtcactgccgcccattctttatcagacggcgcagcagggtcgggcaattcctgataagtctgtaaagggaacttcggttgtcctgtcggaacaccacattgagtgactccttgctgggcaaaaactgcgcctacgctaaagagacaagtcagagaaaaaatagtaagtcgtttcatggttagttaattaaatgattaaaggtttttattagggggaaaaatattcaatcacatggggtctacatcataatagacaatcaaagatttatagcgttcatcttccaacatctcccgttggatgcgcaacagcaactcccgggcacgccccatcggagcgttctgctcaatctttacgacaatctttttaataaacaacgtttggatacgggcaacaggaggtttatccggccccaacactcgattaccaaataccgcccgcagcttatccgccatcactaccgccatctgatccaacaacgcttcattatgatttttcagataaacatataccaaccggtaataaggaggataatggaacatctgccgttccgccaactgcccgcctaccatgtcttcataatcattggcaatgacctgatgaatgataggatgctcgatactcttggtttgcagcaccaccctaccccgtttgttcttacgtccggcacgtcccgctacttgcgccatcaactggaaagcccgttcataggaacggaaatccggataattcagcatcgtatcggcattcagtatacctacaatactgacatgatcgaaatccaatccttttgaaaccatttgcgtaccgatcaatatatccgtctttccctgttcgaaatccgcaataatcttttcataagcagagcgggtgcgcgtggtatccaagtccattcgtgccactgccgcttcgggaaaaaggattttaatgtcatcttcaatcttttccgtaccaaagccacggttcaccagttccgtaccttcgcaggcaggacaggatttcggcagttggtaggtataaccgcaataatgacaagttagctgattgatccctttatgataggtaaggctcacgtcgcaattcttacacttgggcacccaaccgcaagtacgacactccaccatcggagcaaacccgcgacggttctgaaagagaatcacttgctcttcttgttccaaagcctctttcatgtattgtatcaacagcggtgagaattgtcccaccatcctctttttgcgatgcaattcctttatatctaccggaataatctccggcaattgaatttctttatatcgttcttttagttgtacaaaaccatatttcccctcccctgcattctgccacgactcgatggaaggagtagccgtccccaacaaagttttagctccgtacatggcagccagtacaatcgctgcgctacgggcatgataacggggagcgggatcttgttgcttatacgtattttcgtgctcttcgtccacaatcaccaatcccagatttcggaaaggaagaaacacggaagagcgaacacccaggataatatcgtacccattctctcccagttgtttccgccatatttcaacccgttcggcatcggggaatttagaatggtagatccccaggcgagcaccgaaaacccgttgcagacgctctgtaatttgagtagtcaaggcaatctccggcaacaaatataagacttgctttccctgacgaatcgtttcttcgatcagatgaatatacacttccgtcttcccgctggacgttactccatgaagcagacacacgtttttctcctgaaaagactgaacgatttcatcatgtgcccgttgctgaaactcgttcaaggcgttcagctcgactacttctttctcctgtttattcaaccgtccgatctcgtgatagtagatttcgaaaatcttcttatccaccagcccgttcagtaccgaaggagccacattagcccgttgcaacaattctttcttggagacttctttcggagttccggttcctaaaatacctgaatactctacatacttcatgagcaacgccagttgcttcggagcacgagacagaatatcaaacagaatatggagttgcttttcatctgccgtacccgcaagccgcacccgtgcctctgtcttaggcttataagtgcgtttcaattcttcctttacaaaaatggcttctttatcgagcagggacttgatggcggtaagaatattttttatgccgctatctttctccagtttagtgacggactgctgcgcatctacggcaagtaaatccaaaatgcgttgttcccgttccggcaatggcgcatccgcctcaaaatcgggattatattcaacaatcgtttcactctccagcttcaggccggaaggaagtgccgctttataaacatctccctgtgtacagagatagtaatcggctatccattcccaaaatttgaactgaacgggtagtaaaatgggagaagcatccagcaatgcagatatatctttcacttcgtactccgttggagcacaataatgaacgttaaggacgatagccgtataaaacttctttcgcccgaaaggaactaccacacggcagcctatcttcacatcttccgcacattcgtccggcaaagagtaagtgaaactcttcggaagcggaagcggtaatatgacatctacatattttttcattgcaggtacaaaaatacaataaaaaaatggggaatgaaaaagaaggaagagagaacactcaaaagaaaaacgcttcttaaggcaggattgggcagaaacagtttcgaggctgcaacagggcagcctccgaacaaaaaaagagttcccgttcaccggaaactcttttttatatacgatgtaaaatgacagactatttaaaaaatataggcaacagatacctgccaagtcttagtcttataagaagcgtctgttccttcaatatccgcagtgtcgcccaatgggatattgtagttagcacctacctgcagatggttcagcaacttcaaaccggcacccacattaatacctacttgcgctttcttcttatcaattcccgatttcttttcaaaatcgaaataaaaatcaggacctgcagcaagataaataccggccatacttcccaaaccgattgtatatttcaggtttacaggaatatcaataccgttttgcttgatagtcaaatcctcgtttccttcagaaacctttatacctctttgagcaaaaagcaaggcagcatctactcccaaccctacgattggaatattaaactcggccatcggaccaataaagaaaccggtaaaattatccttcttaaagttttcgctcacattagagaaactcgccttcgacaagttcaaacctccttttacaccaaagtgtatttgcgcctgggcaggcattgccataccgatacatacggcaatcattaaagcaccaaaaatctttttcataaatttacgtgtttataattcgggacaaagatatataattagaataaataaacacaatttatcggttttttgttcgctcaaagtcgctgttgttcacttaatccgacgcccgtacttttatatttgctcttttgaagattgaacttacaatagagcatcagtttcatccaccactcacagactaataagaaattcttattagttcaattttcatcctatctatcatctataaatcttgggaaaatgatagttaatcaaatttacttccagattatcatacataaccttttcagccaacacgcacggcaagtggtttgttccaatgcaagttctttttctaaatgccgcacccggtcacattgcttcaaccatttgccctgcaatgtatcatacaagtgtttagctcctttatatatggtgatttccttatcctgtttgcctaaaagtgatgcgtatattgaacagactcgagatttatccatgcaatatcgttccaacttttcgatatacatcaatgtaatcccctttttattccggttgataaaatcctgaatactttcatcgtcgatgatgtcaatgtcggctctttggtagtccacggtgatttctcttatctctatcaagacccagatatattctgtctcgaatccgtactttgcagccgcttcttctatactaatccattgtgccatagcgtttgttcttttatgtgtgatacaataagggatgaataatgttttattcatgtatattagcacaacgagcatccactctttttgcagtctgccggatggagattggctaggttaaattgtgggataatcaataaccggccgaatacaagaaagacgcagatgctgctgtaccattatccactttcaaggctagctaaaccgaccagagaacaatgataacagcagacacccacgtcaatcgtttatatataacacatcttttacgaatatgttgatatacatccgttcacgtggagtatctaccgtatcatctccctctgtttgaattagctatttctgaaagtgagagataatacgcttttactccatataggaaataaaaaccgcttcctgcctgtttcatcacgctgatgggctgaaagcgtatgacaaagatatatgttttttttgaaaggtagcagaaatatggaaataaatataggaagttctgtattaaaatgaatttgataaaatataatcctgtttcttatttctgattactgaaatccgtcactaataaaaataaataagcaattttactctcatactctcatcaatcgtttgaaaagcctttattcatcggagttacaggtatgagagtaagtatgatagtaagatgagagtaacttttactctcaccatgcctcacaccaagacaggaccattatcttctgacatacagtacattatctactattaccaaaagtattaacagctatagcatcaagtattaactccctaaaaatcatatattaatagttcgaaaatcaggtattaatgcatgggaaacagtataataacacctatattagtagtgacaataaaagcattatagataaacttataaccaagctaccatcatctttctaccatttaagcagtgaatgttcgttaaaacacgaatataggatttgctttttatagcattgttcgtatatttgcgaacattaaataaaagagaaactaatgtatggaacagcaggaacagattgctcgttttgctaaagcgttggggcatcccaccagaatagcaatacttaattttcttgcaaggcaagaaagctgttattttggggacatccacgatgagttgccaatcgctaaagcaaccgtttcccagcatctaaaagaattaaaagacgctggactgatacagggtgaaatagaaacgcccaaagtgaaatattgcataaaccgtgaaaactgggaaatagccagacagttgttcgcccaattcttttgcgattgcgcttctaaaaaaggtgcttgctgtgaatagcagccccttttttagacttattgttcgttgttttgcgaattacgtttaatatataaaatagaaaatatggaaattaaagttttgggtacaggctgcgcaaattgtaaagctctgtacgtaacagtagaacaggctgtaagagatctaaatttagatgctacgttagttaaagaggaagatattttaaagattatggagtataatatccttagtttgccggcattagtgattgacgaaaagatcgtttccgccggaagaaaattatccttagccgaagtaaaagaactattgaaacaataacttagaaacactgtacctatgaaacatttatttttgattgctatcagcttactcctgttttcttgtagcgggaagccaaaaacagaaaacaaacaagaggtttccgcacagggagatcgtgtagaagtaatctactttcatggaaaacaacggtgtgttacctgccgtgcgattgagcaactgacgaatgaagtgttggaagccactttcaaaaatcaaatcgataaaggggcagttgtgtataaggttatagatatttcagatccgcaaaatgaagcgattacggataaatatgaggtgacatggtcgtctttgtatataaacggctggaagggaggaaaagaaactgttaataacatgactgaattttcttttgccaacgcaaaggggtcaccggacatattcaaagaaggtataaagaacaaaataaatgaactgctaaaataactattatatggattttcttcaaaatcttctggataatagcaatatcccgataataaccgctttcctgctcggtttgcttacagccataagtccttgccctttagctaccaatataactgcgataggctttatcagtaaggatataggcaaccggaacaagatttttttaggaggattgctttataccttggggcgtgttgtggcttatacagttttagggatcatcctgatttctatattgaaagagggttcaagtatgttttccctacaaaaaagtataagtaaatatggtgagatactgatcgccccggtcttgatatttgtaggggtattcatgcttttcggagatcgtttgaatttacctaagttcggattttcgggaacaggaaaggcggaaaaactgaaaggcaatttaggcagccttttgcttggagtgcttttcgctctggcattttgccctaccagcggactgttttacttcgggatgcttataccgatgtcggcagcagaaccgggaggctaccttttgcctattgtctatgcggtagccaccggcctgcccgttattctggtagcttggattttggcgtatagcgttgccgggataggcaaattctacaaccgcatacaggtatttcagaaatggtttaacagagtggtcgctgttttgtttatcgcagtcggcatttattacgcatatatcaattacttataaattaaataaaaacagaatatgaaaagaatcgagatttttgatccggcaatgtgttgtcctaccggattgtgtggcccgaatatcaatcctgaccttatgaggattgcagccgtactggaaaccctcaaaagacaggggatcgttgtcgagcgtcataatttacgggacgagccgcagctttatgtcagcaataaaacggttaatgattatttgatgaaagagggtgcggaaggcttgccaatcaccatagtagagggggaaatcgtggtaacaaaaggttatccgaccaataagcagttgagcgagtggacaggcattaagttagacattattccaattatcaaccaatgagattatgaagaatttcaatttatcagacatacagttaacaaagtatttattttttacaggtaaaggcggtgtaggaaaaacttctatcgcttgcgctacggccgtaggtcttgcggatcttggcaaaaagatattattgataagtacagatccagcctctaatttgcaagatgtgtttgggcaggaactgaacgggcatggtacgaatatctccgaagtgcccggcctgacggtcgtaaatcttgatccggaaaaagcagccgcagaataccgggaaagcgtaatctccccttatcgtgggaaattgccggaaagtgtgatccggaatatggaagaacaattgtccggatcttgcacggtagagattgcagcgttcaatgagttttcggattttatcaccgataaaaccaaagaaaaagaatacgattatatcatttttgatacagcgccaacaggacacaccctaagaatgttacaattaccgtccgcctggagtacgtttatcagtgaaagtacacatggtgcatcctgtttaggccagctgtcgggactggaagaaaaaaaaggtatttataaacaggctgtaaataccttgtccgatgaaaaagcaaccagcctgatactagttgcccggccggatcttgctccattaaaggaggctgcacgttcttcccacgagttgaatttgcttggcataaagaaacaggtacttgtcataaacggagtgttacaacaagccgatgataacgacaaagtttccaagttattaagcgaaaaacaaacttcggctttacagaacattccggaggagttgaaagattatccggcatatagcgttccgttacgttcctacaatttatcaactatagaaaatatccggaaaatgttatcgagcgataaccttatttcgggaggtgattacaagcctttgcagggtgaaaagaatctggatgatttggtaaatgaccttttttcttccggcaaacgggttatttttacaatgggaaaagggggcgtaggaaaaacgacagttgcaaccaatatcgccctaaagctaaaagaacttggcgcaaaagtgcatttgacaacaacagacccggccaatcacttgaattatgaacttgtaataaaagcagggatcgacgttagcaaaattgacgaagccgaagttctggaggcttataaaaacgaggtaagggcaaaagccagggaaaaccaaatgacggccgaagatatggaatatattgaggaagatctgcgttccccttgcacacaggaaatagctgtattcaaggcatttgccgatatagtggaaaaggctgatacggaaattgtagtaatagacacagcaccaaccggacatactttgttattgttggatgcaacgcaaagttatcacaaggaggtagaacggacgcagggagaaatcaagggagcagtggcaaacctgttgccacgtctgcgcaatcccaaagaaacggaggttgtcatcgtaacacttccggaaacaacccctgtttttgaggcggaacgtttattgcaagatttacaacgggcaggcatcaagaacaaatggtgggtgataaactcctgtttatctctggttgatacccaaaacccatttttaaaggccaaagcacaaagtgagttgccatggatcgacagagtaaagaaattatcagacagtaataccgcgttaatcgcatggagagcaaaataaaaagagagtgattatgaaacaacttgcttttttagaccgttatttgacggtatggattttcttagcaatgtttatcggtgtaggattgggttacctatatcccggcatcgtagacttttggagtcattttgaagtcggaacgacgaatatacccttggcaatagggcttatcctgatgatgtatccacctttggcaaaggtgaaatatgaagaattaggcaacgtattcaaagataagaaaatcctgaccgtatcacttctgttgaattggttggtagggccgatactgatgttcgttctctcaatcatcttcctgcataattaccccgaatatatgtacggattgattatgataggtcttgcacgatgtatcgccatggtactggtttggagcgaacttgcaggaggaagcaatgaatatacggccggactggtcgcttttaacagcatctttcaggtccttttcttttctgtatatgcttatttcttcttatctgtgttccctgaatgggtgggaatggaaacaaccgacgccgttcaacaaatcacgatgtccgagattgcgaaaagtgtaggcatttatttaggaataccgtttgttcttggatttctgacacgtttagtcttggttaagaataaaggcatggattggtattaccagaaatttatccctaaaatcagcccggttacattgttggccttgctgtttacaatcgtgataatgttctcttacaagggagaatatatcataaaattgccgtatgatgtgatgataatagcagtcccgttggtgttgtactttggaatcatgttttttgtttccttttttattacccgaaaaatgggaacggattacccaaaagccgcatccgtatcatttacggctaccggaaataactttgaattggctattgctgtggctattgccgttttcggtatcagttcgggagaggctttcgccgcggtaatcgggccactggtagaagtacccgtattgatactattagtaagatatgcgttaaagatgcgccgcaaatttaaagcaaagaactagaaactacagttccgaggcgggaaactacagtttccaaggcaagaaacgccagttcctaaggcgggaaacgagagtatctaaggtaggaaactgaagtttccatatagagttattataactctcccgtaaggataactagaacttcccatagctttgcataaagaaatcaaggacttttctttagttatattatacgttgcagataaagtatctgcaacgtatctgcaacaggtatctgcaacgctccaactgcctatttactaatacattacaagcgttttgttgcaggtggcagatactttgatgttttttaaactttatggaggaagattatactcattcttactactataaaaacaaatcatttaacgcctcgctcatactaggatgagtaaagatgaagtcacgcaggaaagtataatcctgacctgtcttcattgcaacagcaactatattgattacttcgctggaatcaggcgcaaacagcatacagcccaatatttttcccgtattcttatcaatgacagctttcaacaggccgtccgtttctcccaatgttttcgctcttggtatcgccataacgggcaatttcttgataataatatccaaattctgcttacgagcctcttcttcattcaatccgatacgtgctaatggaggatcaataaaaacagagtagctaaccggattgcgatcattcgttgtccgttctttatcgccaaacagatcctcccggataatccggtaatcatccaatgaaatataagtgaactgcaaaccacctttcacatcaccaacggcacgtatattcggttgggttgttttcagatattcatccacaatgatcgctccgcgtgcatccgtctccactccggcaacttccaaattcagatctttcgtattcggtcggcgtcctgtcgccagcaatacagcatcagcttcaagttccaccacctcgccagtttgtgaatcagaaaaaacaacgagtgctccatcttcgatatgtttcacagattgaacctttgcattcattcgaaaaacaatgccttttttctctaatgtttcttttacacttgcagcaatatcccggtcttcacgcacaatcagttcaggataactttcgagtacggtcacctgtgaaccgaacgaagcatacatagacgcaaactccaaaccgatgtaaccgccaccgacaataaccagttggcggggaagctcggccaattccatgattgaggtacttgtataaaccaacggattacccacaactccatcaatgggaggaataactgtttctgctcccgtattgataataatttgcttcgatgtcagcattatttcttcagtagatgtacggacagaaaccacatcggaagagacaaaagagcccacacctgtatagactgttacattgggattatctgccagattatggtaattcttatttctcaatgcacttgtcacagcttctttcacagaaatggcattgcgatagaactcactcctttcttcaaatgtagcatctttcataccggaagcaattttagcctgatgaaccaatgtcttggtcggaatacagccaatattaatacacgttcctccatacattttatccgaacgttcaacaatggcaacttttcgcccacgctttgcaaactctgccgcaagagtcttccctcccttgccaaaaccgataataataacgtcaaatgcattcatatccatatagttttaattggttctaaatttacttgttaagttcataactaatgatgttgcaaagttcactgtttttgaaagaatgaacaataaccattttaccggataagttagcaattattcccatatagaataaaagtaacaaataatcaaaatcgccggagcagatcagtgacttgcccggcgatttccctattgaatcgattcccacttactatctatcaacggttgggatgaatatccagtttgactggtttaatcatattttcaggttccagaatggtatccaaatctttcttggaaaggatattatgttccaaaacaagttcatacactccctttcctgtttccaatgcttctttagctatcttggtagaatttttataaccaatcaccggattcagggctgtcactacgccaatgctgttgtgcacatctctccggcatttttcttcattggctgttatgccgtcgatgcataacgtacgcaaggtatcaaagccattcatcaacaagtcggcagactcgaaacagcattgcgccatcaccggctccatcgcattcagctccatttgagcggcttcgccactcatggccacgcaaagatcatttcctatcaccttataagccacctgattcatcacttcaggaatcaccgggttcacttttcccggcatgatggatgagcccggttgcatagccggcagattgatttcgcccaatccacaacgcggaccggaagccagcaaccgcaagtcattgcatatcttattcattttgacagctatacgcctcatcgctcccgaataacctaccatgcaggaagtgtccgaagtggcccccaccaaatcatcggcaagttttatatccagtcccgtaatcttgcgcaaagcggcaatacacttctccgcatattccggttcggcggtgattccggttccgatggctgtggctcccatgttgactgtcagaaagtcctgcgcggcaaaatcaagattcttcacttcatgttcaagaatactcgcaaacccgttgaaggtctgtccgagagtcatcggtacggcatcttccagttgggtacgtcccattttgatgatatgcgcaaactcacttcctttcttccggaaagcctctatcaacacttcgaaatgcttaaccaatttcagatgagtgtaatagagtccaatgtggatggcggttggataagcatcgttggtagattgcgagcggttgacatgatcgttaggcgaacagtattgatactctccgcgctgatgccccatcaattccaatgcccggttggcaaccacttcattgatattcatgttcgtggtagtacccgctcctccctgaatcatatctacggggaactgttcgtgatgctttccttcaagtatttctttacaagctctcaagatagcatccgtttgttcttcggttaataagtccagttcgcggttggcaacagcggctcccatttttgtgatagccaatgcctggataaacaaagggtactcatttaaatgaaacttactgatgcgaaagttttcgataccgcggagtgtctgtactccgtacagtgcactttccggcacttcacgactacctatcaggtcactctccgtacgagttttttttgataaattttgttccatatcggttgttttataataataacagtttcgttagttcttataataaccaatgagtttagttattgttttaataaatatgcaaaaactattcaaagacttttttgttgttaatacaagaaaaagaaaatacaaagagagaaatcacttatctttgttgggaacttaaaacagcatcttatgatattacaattagcatttgttctgacagctattattattggcgcacgcctgggaggtatcggcctcggcgtgatgggaggagttggattggctatacttacgttcgtttttggtttacaacccaccgcgcctcctatcgacgtaatgttaatgattgccgcagtgatttcggctgcttcctgtatgcaagcggccggcggactggactatatggtgaaactggcagaacatttgcttcgtaagaatccttcacacgtcaccttgcttagtccgctggtgacttacctgtttacttttgtagccggaacgggacacgtcgcctattctgtgttgccggtcatcgcggaggttgccaccgaaacaaaaatccgtccggaacgtccgctaggtattgctgtcattgcttcccaacaggccattacagccagtccgatttccgcggctaccgtagcacttctcggactcttagccggattcgatattaccctgttcgacattctcaaaattacgattcccgctaccattgtcggcgtgttggtcggtgctttattctctatgaaagtcggtaaagagctggtggaagaccccgaatatcagaaacgtctgaaagaaggattattcaacaataaaaagatagagattaaagatgtgaagaacaaacgttccgctatgatttccgtccttatctttatattggcaactgcatttatcgtactcttcggttcttttgaaggaatgcgccccagtttcctgatcgacggggaaatagttacattaggaatgtcttccatcatcgaaatcgtgatgttatcggctgctgccatcatcctgttagtaaccaagaccgacggaatcaaagcaacgcaaggttccgtatttccggcaggtatgcaggcagtgattgccatcttcggtattgcctggatgggagataccttccttcagggaaacatgggacagctaactctttctattgaagggatcgtgcaacaaatgccgtggctgtttggtgtcgcgctgtttgtgatgtctattctactatacagccaggctgccacagttcgggcacttgtgcctctgggcattgcgttggggatttcgccttatatgctgatcgccttgtttccggcagtgaacggatatttctttattccgaattaccctaccgtagtggctgccattaatttcgaccgtaccgggacaacaaaaatcggcaagtatgtgttaaatcattcgttcatgatgcccggcttggtatcgacgattgttgccattgccctaggactgctctttatacaaatattttaatatacatatattattaacctaaacatcattcagttatgaaacaattcaaaagctttggactggtagtagtcacactactattttctgtaacaatggcatttgccgccaaaccgaacattcatatccttgccaccggaggaacgattgcaggcacaggaagttcagctaccggaaccagctacacagcaggacaagttgccatcggcgcactactcgatgccgtgccggaaattaaggatatcgccaacgtgaccggagaacagattgtcaaaatcggttcgcaggacatgaacgaccaggtttggctgacgcttgcaaaaaaaataaatgaactattgaaacgcccggacatcgacggcatcgtgattactcacggaaccgatacgatggaagaaactgcctatttcctgaacctgaccgttaaaagcaacaaaccggtggtactggtaggtgccatgcgtccgtctactgctctaagtgccgacggcccgttgaatctttataacgccgtagttaccgccgccgcaaaagaatccaaagacaaaggagtactggttgccatgaacggactgatccttggagcacagagtacagttaaaatgaacacggtcgacgtgcaaactttccaagctcccaactccggcgcgctaggttatgtgttgaacggaaaagtattctataatcaggtgacgctaaaaaaacataccacccaatccgttttcgatgttactcatctgaacgcacttcctaaagtaggtatcgtatacagctactctaacattgaagcagatatggtcactccgatgctcaacaacggctataaaggcattatccatgcaggagtaggaaatggaaatatccatcagaatatcttcccggtactgacagacgcccgtcaaaaaggaatccttgtagtccgttcttcccgtgtcccgacaggtcctaccacgttggatgcagaagtagacgacgccaaatatcagtttgtggcttcacaagaactgaatccgcagaaatcacgcgttttgttaatgcttgcactaaccaaaacaactgactggaaacaaattcagcaatattttaacgaatactaaaagcctgacctacttatgaaaaaatggatatttatgttgctcctcgcgggcagcatacagggagtatatgctcaaaaaacggagaagaaggataaattcaacccgaacactcccctgtttgaagaactgacagacgtgaaaaagaaaacagataagttcaatctttatctgaatatgcaagggagctttgacgctcatttccaaaatggttttcaggaaggtgacttcaatatgcaccagctccgtatcgaagccaaaggaaatatcaacaactggctttcttaccgctatcgtcaacgcctcaaccgctcgaacgatgcaaacggtatgattgacaatctgcctacttccatcgactatgccggaattggtatcaaactgaatgaccagttcagcctcttcgcaggaaagcaatgtgccgcatacggtggtatcgagttcgacctcaacccaatcgacatctatcagtacagcgatatgatcgactatatgagtaactttatgaccggactgaatgtaggctataacattactcccgaacagcaacttaacctgcaaatactgaacagccgcaacagttcgttcgacagcacttacggaatcacggaagatgccgaaggaaatcttcccgatctgaaatccggcaaaatgccgctggtttatactttgaactggaatggtaatttcaataacgtattcaagacccgttggtcggcttctgtcatgaacgaggccaaaagtcacaatatgtattattatgctttaggtaacgaattgaatctcggcaaatggaatgcttttgtcgatttcatgtattcaaaagaggacattgaccgcaaaggtattattaccagtatcgtaggccgtccgggcgggcataacgcttttgatgctaactatctttcggttgttgccaaatgtaattaccgctttcttccgaaatggaatgtttttgtgaagggtatgtacgagacggcttccgtgagcaaggcatccgaaggaatagagaaaggcaattaccgtacttcctggggatatttgaccggtatcgaatattatccgatggaaaccaacctgcatttctttgtgacgtatgtaggacgttcgtatgatttcacctcccgcgccaaagtgctgggacaggagaattacagtaccaaccggatttccgtaggattcatctggcagatgcctgtattctaaaaaacagcctcat

SEQ ID NO: 8134 - DNA, 27260 bp, Unknown
  gut microbiota DNA sequence
atgaaacacgaagcaagtgtcaggaagaagaaccgtaaaaggttcttcttaaatatatatccgtttttcatatctatattcaatatattaatattataactatttattggtttccgacggtccagtcaggagtttgtaccaaattccaattcttatcaatatcgtcctgtggaataggccaccaatagcttataaacttacgtgtctgatatactgtacgagtataatatttatttctatagtccgcatcggatactttaatataagcattcatgccataaaaatcaccatccaatactttctcggctaatttccagcgacgcagatcattaaaacgaagtccagattcacaattcaattccacacgcctttcttgacgaattaactcgcgcatttctacaggatctgatggggctgttatcttgccttcttcagctgaaacactatattcgggaatacccgcacgctcacgaatcaaattgacatatttcagaatctctttttgattggcagtataagtgcccttctcaatgctatattcattcaacgcctcagcataacttaaatagatctctgctaaacgacataatgcaccatgacggtttttataatctccactaccttctttgggatttgcagatggatctactctcttacgtaccagatagccgctccatggagcgtcatgagaaggaccaccgtctttaccatccatatagaaatctgtatttctcttaccaccaatatgccattgttcgttatgcagtactgaaatataaaaacgaggctcgcggtcacaatacattttataggtattggcatctacaactacattttcatctttattacgatctccttctgaagacccatactgccactttgtagaataggtctctttttgcgtactaaagcctgtctctgaataattagcatcagggttaactttaggagaaccatccgaattataacctataataggtctttgaccgtttctcatgaaaaaagcatcaaccaaagattgggttattccgatcgctcccactccattaatacccaaaccacgtggaatacagtttttatcataccatccaccggaatccattgtgcgaacaaacagtaattctctgttagcttcgttccatctcttcatcactgcattctgataagaaagaaaaggatcaatatcaccgttatccaaatattcataatgcaaatgatagccagcggcttccgcctcatcgataaccagtttacaagcatctactgctcttttccatcgttccggatcatgtgcagaattaaagataggggttccatcaatgttttttatattcgccaatgcaggattaccattcaccaagtcgctagcagcaaataataacatacgagcacgcattgccaaacatccaacagaagtcacacggccatatttcttatcttcagtttgagtggcaggcaattgttttgaagcttccagcatttcttgatctgcccaatcaattacattataaaacggctcttgtttcaacatcagatcatcagccgaagtactttcactagcctcgcgaataataggaactgaaccataagctatagccatcatagaattataataagctataaagaaacggcattcagctttcataaagtctacttcttcagccggtacagcctccaatgggtgagcatgttttataaacaaataagcagaacgaatatatttgggataagtattccaataagcaattaccccgggattgtctgctgtccagttacctttttgatattgaatggctttaaatccttgcgcttcccaaccaactgaaggaatcagttcatcagctatggcatccggaccatcataagtataatattcgggcaggccgcgataaatatatgccagccaacgttccatattctttttattctcaaatactgattctaaatccaactggtcatccggttgcttatccagataatcagaacaagaagaaaaagtaaatgtcgtaataatacttagtactataaattttaatatgctatttttcatatgcgctattattagaatttaatttcaaaacctgcagataacgatttcataattgggtacgcagcccctgtagtattttcgacttccggatcccacaaatcaaattttgagaatgttaaaagatttgttcctctcacgaaaagacgaatgcctgatataactgtagtatttctccacaaattctttggtaaggaataaccaagttcaatgttttttaaacgtaaaaaactcatattccgcagccaccatgtagatggttggttattattactatttataccgtcatccaatcgcggataaaatacgttctgacttgggttgtctacagtccaacgatcatttgcattagtaaacatattgcctgtcactcctctattggcacccggaataatgcttgagcctaaaatattccaactacgacctattccttgaaagagagctccaaaatctagatccttatatttcatattcagtccaaagccatatactatctccggatcttttgttcctccgattggcgatttatcaaatacgtccactttaccatcaccattgacatccctgtatctgatatctcccgggcggagtttgcttacaaaactttgagtcggaattccttctttcagtttacctgtacttacgtcttcaaaatcgtcttctgtaaacaaaccttctgctatatagccagttaattgccctaccggatgtcctgtttcagcacggttagtaccaactactgcactaggttcatccttttctgttatttcattatgagcataggtaaatgttcccattaagctgacaaataagtctttgccaaactgtttattaacatttaaggaaacttctacaccctgattagtcacttttccaaaattcttccaaggctgcttcataaatccagccgtcatcggaacagactcacgtggcataaatatatctttacggcgttcgtcgaaataatctaattgcaaatcaatcataccattcaggaaacctagctcaacccccaaattcatcttattaacaatctcccacgtcaaatcttgtacggcaaactcaccttccgccataccagttaaaccataactactatccaatccccatttatacatgtttaatgtatcatagtcatcggtaattgtagaaaggtacgcaaaacggcgtccacctaaattagcattacctacctgaccataagacgcacgcaatttcaatttagatatgaccttacgcaatggttgcataaatgcctcttccgatacaatccacccaattgctcctgaagggaaaaagccataacgtttacctttggcaaaattttcagagccattatagccaaaattaaattcacctacatatttacccgaataggtataagatgcacgtcctgccaatccctgattacggtaaggcaacttgcttccatcatcataattacgacgattaaacaataacattgcagcaacggaatgtttctctgcgaatgtacggtcataagacaaagttgcttccatatatacgctcttatttccatagtcaccgctttttgagtaatccaggaaattagtaccattggattttgatgctataatcaaattaccttcatcatcacgtcctgtagcaggtacataataatccggtgtctttccacgagaaacagtacctgaagaaaacctgtcaaatgagaatgtaccttttactttcaatcccggaagtaagaatttcaaatcttgttctacagaaaacagtgtttcaatcttactgtcgcttcttcttttatatccactttgagtagcccatgcccaaacgtttggctcctctgttgtcggtatctgtccactggaatactgtgcagggaaagcatgaggtacagcaacgaacgctttctggaaaatttgagatatatctttcgttgtagaatttctatcttgcaaatatccaccaatattaaaacgtaattgcgtagtaggacttaatttcaaatccacattagaacgaacgttataacgttgcaatttaatagtaggatcccaatcatagcttttatcacgtttcaaaataccacgttcattatacgcagcagcaacaaaagaataacgtaatgtctctgtaccaccagaaatatctactgttacacgctgattcgaagcataatcatttgcaattgcatccatccaattcacgtccggatataaatcaggatcataacctgcacgagtttttgcaatacgatctgtatatttaggctgttgtcctgtatccatcaagatatcatccaaaacctgcatataatctgccgcacccaaatactcgggaagtttaactggctgtgtagctgcaaattcagcctttacagtgacacgaggtttaccaacttgtccgcgttttgtattaattaaaataacaccattagctccccgcactccataaacagcacttgcagcagcatctttcaacacagaaaaagattctatctcttcaggatcaatattattcaaatcgcgttctataccatcaatcaaaaccaatgggttttgtccggcatcctggaatgtactaataccacgaatccagaaagaagagttatcatatcccggttcaccagaacgttgcacagctaatacaccggcaactgtaccagccagattattacttattgaacgagtagtagaaacctttaactttgcaggttcaatcgttgtgatagaaccaacaacagactctttcttttgtgcgccataggcaaccactacaacctcatctaattgaccaacatcttctaccatttgcacattaacaacctttcggttattaacaacctcttctttagggacaaaaccaatataacggaaagaaagcacagattttctttcaggaacaataatactataattaccattcatgtctgtcaatgcatgcactgtggaatcatttttcaaaatgattgttacaccaatcaaaggctcacctttttcatctgaaacgttacctgttacctttatacctttttgttgtgtagcttgctgtactttaggagcttctggtatcgaaattgtaatctgtcttcccgacatcttataattcagtcctgtctctgaaaacagctcttttaacacagcatctattttcttattggaaactgaaatggagactttgttattcagatttttctgaacattagcagagtatataaaaatatatttactatgtttttcgatataatctaaaatatctttaactgtagcattctcatattgtactgagaatagatcttcttcggaattccaactaatagaattagcaccgaatgaagaaaatggaatcataaaaaagacgtttataatgcaaaaaagcttaagtcttttctttaagtgtaaaaaaatacttttctttaccataaaaatttctttttaggttaacaattttggatttattgatttaactagggaattactatcgggtaaatacggcaatatttatccgattttttttgtcataatggcagtctgttcttcataggcaaacatattaaaagattaattaaaaaaattatttatttaaatatatactagtatcacttttttcgatcgtgaatggcagggtttgctgaatacattcaatcacctcgtctatatcatctttcaaatctaatttcccatacactttttctttaccaataattggatcacattgaatagatataccatagtagatgcttagtctttgaatgatctgcgacaaatcattaccattcaataacataatcccctctacccaactaatatactctgctacatcaacttgcttttgataagcaattgtaccatttgctatattcaacagatcattaggattcaaacgtgctttcttttcattcttatcagtaacttctaccgcaccttccaccaatacaatattagttgttcctcctttataattcgagatattgaacttcgttcctaacacttgcagtttaaaatcatcagactccactataaaaggatgtttcttatcatgcgcaacttccaggaaaacttctccttgggcatagattttacgaatgtctcctttaaaacaacgaggataaatcacttttgactgggagttaacgaccagccgagtcccatcagacaattctactctagcccttttccccgcaggaacaagtagctgattatattcttgttcctctttggttttctcttctttctcttttatcacttgtgaattgacagcaactttcccctctttcgaatacttaatgaaaacatcttcatccaaattaagctgttccttggaagtaataagagtcacttcctcaacagattggctatccatttcttcagcaatagcctgaaagtctaaattaacacttccattctgatttaaaaaataaatagttgaaatgcaaatcaaaaaggaagcagcaatagaagctgaagcaactaagaaatatttctttctgcgcttcatagcatcttttcgcatctttcgttgagtcttctctatgatagaagatgaatcaatcttttcctgcacacaattttcccaaaagaatttcaacttctcagcatcaggcatagaagtaaaatcatcctcaatattttcttgagaattcaatttactaaataaatctgcgagacgatggtattctttcaagctcataatcctattttaatgttgttctatagataaagacgcaactaaaaaaaaaatctcccagtcaaaaatgattttttttcatttttcgggtaaaaagaataaaagtggagttagctatgtgaaaaaataaggcattaataagcaggagagtaaaaaacttagctcttgcgagatttcatattcaatcttttagcaatttcatctaacgcaaaagcaatatggttattgatagtcttcactgatatgttcaacatatctgcaatatctttataaggaagcccgtctatttttgctaagaaaaagacatgtttacacttgggaggaagttgttgaatggcgtcattaattttagccatttcttccttactaatcatctcctcggctggagattgaaccggctcaaaaataaaatcttcgatatcatcaaatgacaattcatactttccagtttccttccgcaaaaaagaaatcgcttttcgataggtgattgtctggatccaagcattcatattgccaatttcagccagactttttctatttttccaaacttcaaaaaaaacatcactcacaatctcttcagctgactccttctggccaagtagcgcaaatgtatagtgatataaacgcgaagaataatgctccataaaacgattgaaagcaatttcatcgccgtctactattctacatatttcattattctcaagtttcacagaagtatttatagattatttccaattaacaaaattgagccaaatatagcagtatcgtatcaattacgaaaataaaacaccataaaaaggaattaaaagttatcaattatagaaaaatggctataataaaaacattaccatttagctataaaagtctcttacttagataacgtacaggataccatacggagagaaaaccaacggctaaaactgtgataaagattaatacgacatcccaagcgtgaacgctgacaggataggcatctacaacaaaagtaccaccaccgcctcccaatgaaattataccgaatttctgttgtataaaacataggattaagcccaggacaataccggaaatagcgccaaaaagagaaatgagacgtccttcaaagaggaatattcgggagatgagtttatcactagctccaagactccgcaaagttactacatcatccttcttatccaagatcaacatagaaagggagcctatcacattaaaacaggctatcattaaaataaaagtgaggaacaaataagagattagtttctctatctccataatacggaaaacatctgcctgctgctgataacgattctgaacaacaaaatcatcacctagtatgttttctattttagattgtaccgatgaagtatttacattaggtttcaatttcaattccatcgcagagacttctgttgtataatccagaagctgacgaagaaaatcgagagaagtcagaatatattttccatcatattcttgctgattcaccacaaatacgacacctggagaatacagataatcacggttaaaagaagcgcctggatttgccatgttcactttggcatttcgcttgggaagatatacctgaagaggatcgacaaactccaaaccagttcccaaagtcgcaaccaattccactcccatgacgccataattcacgatcgaatcatgaagaacgaattctcccgcgccataaagtatgctgtctatggccgtcaactcttcaaaattatcttccaccccttttagtacaaccatagcctgacggtccttgtattgcaccattgcattctcttcgagcgtctctgtaaacacttccacttcaggaagctcacaaacggcacgaatccgttcatcttgtgcatcaaagacttttccttcacggaccgtaattttcaactgcggatcaaaagccgtaaaaaagctggccaccatatcctgaaaaccattaaaaacagaaagagtgcaaaccaaagcaagcgtagcaagagccactccacatacggaaatgccggatatgatattaatagcattatgctttttctttgaaaaaagataacgcctggctatataaaaagggaagttcacctctgcaatgagttatttcacttcagcaatgaatctattttctcaatataatccaatgaatcatccacgaagaatttcagttcaggaatgatacgtagctggtgacgtacacgagtcccaagctcataacgaatggatttcatattgttattgatattcttcaccatctcttctgctttctctgaaggaaaaacactgaggtagacacgggcaatactcatatcaggactgatgcgaactgcgctaacagagaccaatgtacccggcatggactttgtttgaagcaggaatatctcacttagctctttctgcaacaggcgagatatcttattctgtctggttgtttccataaagttatttactgttttacaatttactacttattattttcttccttatgatcgttaatccgtcacgcaaaggaagtattactttttccactcgcacatcttgtgctaccaaatcattaaaggctttaataccaattgtttgagcgtccgtattgcgaggctgttcaagcacatgcccgtcccacaaagtattatcagcaatgatatatccgccttcggaaagatacgccaatgtcatctcgtagtattcaatatacttacgtttatcgccatcaataaaagccatatcaaaagtaacacctaaacgcggaacaagttctaaagcatcacctatataaaaacgaattttatcggcaaacggtgatttctccagccatggacgggtaaagtcctcttgttcatcattgatctcaaacgtatgcaacagtccaccttccggcagaccttccgccaaacaaagggcggagtagccgctatacgttccgatttccaatatctgacgaggctgaatcatttctacaaacatcttcagcatccgtccctgcaaatgcccggaagccatacgaggacgaaggagctttacatgcgtatcccgatagagcgatttcaagtaatcgctctcgggatcaatatgctgcaaaatatattcgtctatcgattcggtttcctgcataaaacttacctctttaaaaattaaagataacggttgttgttaggtaatacagtctcctctgcatgcttcaaagcatcttccactacattgatttcgaggaatgaggtctttgtccctgccttaccactacttaaataaccaaccatatcggaaggctgcaaacggccttctttcaacagacggcgcaatgccgcaaagtaatattgctgtccgttagccaattccggcatatagatagcttccacaccataagacaaagccaaatgacgcattgtcttttctttatagcagatagccagcactggatactttccacggaaagcagccagattacgagcagtgcgtccgctataactatcagtgataatagcacgtatttttagcttagaagtagcttttactgcttgtttagcaaggaacgccgtaacatcattactattctcatctaacggaatacggatatcattttcttccagtttatctttttctgcctgagccgcaattttagtcatcgttttcaccgcttctaccggatacttaccataagcggtttctccgctcaacatcaaagcatctgtacgatagtagattgcattggcaatatcagtcacttccgcacgagtcggacgaggattatttatcattgtatggagcatttgagtagcaacaattaccggcttctttgccagaatacacttgcgaatcaatacacgctggattcccggaatacgttcttgaggcacttcgatacccaagtcaccacgggcaaccattacgccatctgccacttccaggatttcatcgatattatccaccccttcctgattctcaatcttagcaataatcttaatatcactattatgtgcatccagaatttcacgtatgtcaagtacatcctgacggttgcgtacgaaagagtgagcgataaaatcaatatccttttcgatagcataaagaatattgttacggtctttttccgttaatgaaggaagattgatgcgaacacccgggacatttacgcttttacggcttcccaaagtagcatcgttcttaacttcacacagcaaataaccatccgtcttatcaataacttccagttccagatcgccatcatcaatcagaatcgtaccgccgatattcaggtcagacacaaagttcggatatgaaacagcaatacactcacgagttgtttccaaatccggattacctacaatctttactttctctcctattttatatggaatcggctctgcattagccgtcgtacgaacttccggaccttttgtatccatcaaaatcgcaatacggttggacacagcacgtacatttgcaatcaaagcttcaaaaccttcacggctagcgtgcgctgtattcatacgcactacattcatcccagcttcaaacaactgttttataaaatccacatcacaacgtctatccgagatggaagccacaatcttagtctgtttcaataacatagtctttctacctattatatattattaccttatttattatctatccaataaagcctccaaagccaaacggtacgaatttagcccaaagccacaaatcactcctttacaagcacaagcaatcatcgatacgtgccgaaaagactcgcgactatgcacattggaaatatgcacctcaatcaccggagatgtcacagaacgaatagcatcctgcaaagctatggaagtatgtgtatacgcacctgcattcaagattataccatccacatcaaatcccacctgctgtatgcagtctatcatttctccctcgatgttcgattgaaaatagtcgatctccacgtcaacgtatcttttgcgaagatcagccaagtaatcttcaaatgtaacgcttccgtaaatggaaggttcacgcttacccaacagattaatattcgggccattaataatttgtatcttcatcgcgcaatcctgtttttttatacctttgtatctgaaagaatgtgcaaaggtagaaaaaagaaatggaaatcaacgaaaaaaagcataagaaggaacaacaagagctgataatcaggaagtatcagcagtatctcaaactggaaaagtccttatctcttaatactctggatgcctatctgacggatctggacaaactgatgagctttctgacattggaagggatttacgtattggacgtatgcctgtccgatcttcaacgttttgcggccggattacatgacatcggcattcatccccgttcacaagcccgcatcttatcaggaatcaaatcatttttccgtttcctcatcctcgaaaactatctggaagcagatcccagtgaactattagaaggccctaaaataggtttcaaacttcccgaagtactgactgtggaggaaattgaccggattatctccgccgtcgaccgcagcaaagctgaaggacagcgaaacagagctattttagaaacactatacagctgcggacttcgggtatcagaacttatcacccttaaactatccgacctctattttgatgaaggctttatcaaagtagaaggaaaaggaagcaaacaacgactcgtaccaatctccccccgggctattaatgaaataaagctttacatcacagaccgtaaccagattgaagtgaaaaaagggcatgaggatttcgttttcgtcagtcagcggagaggcaaaggtctttcccggattatgatctttcatatgataaaagaattagcacaaaaagcgggtattaccaaaaacatcagtccgcacactttccggcactcctttgccactcatttactggaaggtggagccaatttgagagccattcaatgtatgctcggacatgaatccattgcgacaacggaaatctatacccacatcgaccgcaatatgcttcgtagtgagattatcgagcatcacccacgaaatatcaagtataggaaagaaaaagaggagttatttcattaaattatgataaaatcgcccccttatctatataattatattaagaattaatatctttgcgttactttttctgtgtgagcagaaggaggttggcaaatagacgatatttcaattacaaacatttaatttatacctaaaatgactaagaagttgtacttgcctttactcatggcaatggttgttgcattattctcttcttgcagcaaaaaaatgggtgaattgtcagctgattacttcactgttactccgcaagtgctggaggcagtaggtggtaaagttcctgcgaccatcaatggtaaatttcctgaaaagtatttcaacaaaaaagcggttgtagaagttactccggttttgaaatggaatggcggcgaagctaaaggccaaccagctactttccaaggtgaaaaagtggaaggtaacgaccagactatctcttacaagatgggcggtagctacacgatgaaaacttcttttgactatgttcctgaaatggctaagtcagaattgtatctggaattcaaagctactatcggaaagaaagtggtgactattcctgctgtgaaaatagctgatggtgtaatctctacttctgaattagtaaacaatacattaggtaacgctaaccctgcattgggcgaagacgctttccaacgtatcatcaaagaaaaacacgatgccaacatcatgttcttgatccaacaagctaacattcgttccagcgaattgaagactgctaaagaattcaacaaagaagtagctaacgttaacgaagctgctaacaagaagatcagcaacatcgaagtttctgcatacgcttctcctgatggtggtgtaagcttgaatactactcttgctgaaaaccgtgaaggcaacacaactaagatgttgagcaaagacctgaagaaagcaaaaatcgatgctccgatcgatgctaaatatactgcacaggactgggaaggtttccaagaactggtttctaaatctaacatccaagacaaagagttgattctccgcgttattgcaatgtaccaagatcctgctcaaagagaaagcgaaatcaagaacatctctgctgtatacaaagaattggctaacactattcttcctcaattgcgtcgttctcgtttgactttgaactatgaaatcatcggtaagtctgacgaagaaatcgctaagttggcttcttctaatccttctgaactgaacgtagaagaattgctgtatgctgctacactgactagcgatcctgctaagcaagaagttatctacactcaagctaccaaacagttcccgaacgattaccgtggttacaacaacttaggtaaattagcttaccaggctggtaacattgacaaagcagaatcttacttcaagaaagctgccagcgttaatgctactcctgaagttaacatgaacttaggtttgatctctttgatgaagggtgacaaagctgctgcagaagcatacttcggtaaagctgccggcacaaaagaacttggcgaatctatgggtaacctgtacatcgctcaaggtcaatacgaaagagcagtaaactcattcggtgactctaagactaacagtgctgctttggctcaaatccttgctaaggactacaataaagctaaaaatacgttggctaacgtagaaagacctgatgcttacactgactacctgatggcagttttaggtgctagaactaataattcttctatggtaacaagcagcttgaagagcgcagttgctaaagattcttcattagctaagaaggcagctactgacttggaatttgctaaattcttcacaaatgcagatttcatgaacatcattaaataagagaattaccactctattttaaatattaagaattgcctgtcattataaatgacgggcaattctttttttttatctgtaaaaaccgtactttcgcagaaaagaaatcaaagcaatgaaaaagagtagcattttaatcctcataatcatttgtctatgcagttgtggtaaatcttcaaagaaggttagcataaccggggaaatcaaaggtctgggcacagatacgctttatctgtatggaatggacgaatcattcgaccggatagataccatttccgcgaagaacgataaattctcttatacagcttcaatagacaccattacttctgcctttttacttattgacaatcagacagaatatccaatcttccttgacaaaggaaatcagatcaaaataaaaggagatatcaatcacccggaatatctggatatcaatggtaatatatataatgaagagtttacaacctttcagaaagaactaaatagcctgcctaccccatccgagaaagatttagagcaaaaagcagaagaattcatcatgaagcatcattcttcttttgtcagcctctacttgttggataaatactttgttcagaaagattcgcccgatttcaacaaaataaagaagctaattgaagtcatgacaggaatattgcaagacaagctgtatatcgaacaactcaatgaagccatctcgctgtcagagaaaacagaaacaggcaaatatgcccccttcttcagtctatctaatataaaaggagagaaaattacccggtcatcagaagatttcaagaaaaagaacctgttaatcaacttttgggcttcatggggagatagcatttccaatcaccgaagcaatgccgagttaaaagagatctatcagaaatataagaaaaacaaacatatagccatgctcggtatctcccttgacatggataaacaagaatggcaagatgctataaaacgtgatacgctcaattgggaacaagtctgtgattttggcggactaaattccgaagtagccaaacaatacgccatcaagcaagttcccagcaacattcttctgtcggcagacggtaagattctcgcgaaaaacctcaaaggagaacaattgaagaagaaaattgaggaagtagtcactgctgctgaagaaaaggaaaaacaagacaataagaagaaaaaataatcagtaatcaaacgtgttaattaaagtattcggagcggctgttcaagggattgatgcaacactcatcacaatcgaagtcaacagctcgcgcggctgtatgttctatctcgtcggccttccggattctgcggtcaaagaaagccatcaacgtattatttccgcattgctggtaaatggctataaaatgcccactagcaatatagtagttaatatggcaccagccgacatccgaaaagagggttcagcttatgacttgcctcttgccatcggattgttaggagctaacgaaacaatctcttccgagaagttttcccgctatttgttaatgggcgaactaagtctggacggaagtatacaacctatcaaaggtgcgcttcccattgctatcaaagcgcgcgaagatggtttcgaaggactaatcatcccccaacaaaacgcacgggaagcggccgttgtcaatcaattaaaagtatacggagtcagtaatatcaaggaggtcgtcgaattcttcaataatgaacgcgaattagagccgactgttgttaatacacgggaagaattctatcaacaacagacgaactgtgacttggattttgcagacgttaaagggcaagagaatgtaaaaagggcactagaagttgcagcagccggagggcataacttaataatggtaggtgctccgggtagcggtaaatcgatgatggccaaacgccttccttccattcttcctcctctttctctgggtgaaagtctggaaaccaccaagatacattcagttgccggacaactgaaacgcggttcatcattgatttcccaacgcccattccgcgaccctcaccacacaatttcccaggtggcgatggttggcggaggtagttttccacaacccggagaaatcagtctggcacataatggggtacttttcttagatgaattgccggaattcaaccgaggagtgctggaagtgttgcgtcaaccattggaagaccgccagatcactatttcccgcatcaaaagtactatcagctatccggccaatctgatgctgattgcatccatgaacccatgcccctgtggatattataaccatccgacaaaagcatgcgtatgcagccccggacaggttcaaaagtacttgaataagatatccggtccattattagatcgcatcgacattcagatagagattgtacctgtaccctttgataagatttccgatcaaagacagggagaatcgagcaatctcatcagacagcgagtgataaaagcccgtcaaatgcaggaaagacgctacaccgaatataccggaatttattgcaatgcacaaatgaacagcaaactgcttgcaatgtatgctcaaccagatgccaaagggctcgcattactgaaaaatgctatggaacggctcaatctgtctgcccgagcctatgaccggattttaaaagttgcccgtacaatcgccgatttggaaggagcagaacaaatactccccaatcatttggcagaggctatcagttatcggaatctcgacagagagaactgggcaggataataacaatgaatacaaacagaagagaattatttcatcatcagcactatcttttttcatatatttgttttacatttgtaacaaataaataaattctaatatgagaaaatcgataatagctattttaatgacattttgtttgagtataatgacttatgctcaaactccccgagacagagccacagaattaaaagaacaagcacaaagtagcctcaatcaaaaagattacatcaaagcacgttacttattcaaaaaggcatacgaagcatttgcaacccgcgaaaactatccacaggcgatagaatgtggtgttcaggctaatgctttatacgtcagagagaacttttacaaagaaggattcgaactttgccgtgatatggaccaacttatatgggccggagagcaaaatcagaagaaagtcttttatgacctccgcttcctcgtgaacaaggagcgattgcagatgtacacggcacttaaaaatccagctcaggcaaaaacacagctgaataaattggaagaaaccgctaaccttgccaagaatgactcactgacagaggttttactgtatacaaaagccaactattactatacatttaaccaaaacacgcaaggtgatgcctgtttccgcaaactgattaatcaatacaaggaaaagaaagactacgccaaagtgagtgattgctacaaaaaccttatcggaattgcccgtaaagccaataacgcccctttaatggaacgcacctatgaaagttacatcgtttggacagactccgtgaaagcactgacagctcaagacgaactgaacgtactgaaaaggaaatatgacgaaagccaactgactatacaagaaaaagacgacacgctatcagccaaacaatacatcattataggtctgtgtgttcttgtagtcatcctcgttgccggactggcaatactggccgccatattactgaaatttatcgccggcaaccgcaaattaaagaaaagtgtgaagattgccaatgaacataatgaattaaaaaccaaattcatacagaacatatcttcacagatggagccgactttgaatacgttagctacttctgcgaatgaacttttacagaaagcccctcaagaagcgagccaaatgcagagccaggtcgctgctctaaagaaattcagcgatgatatccaggagctgtcttcattagagaattcattaaccgaactctatgaattgggtgaaatcaacgtaggtactttctgcgaaaatgtaatggacaaggttaaggagcatataaaaatagatgttactccttcagttaatgctcccaaacttcaggtaaagacaaacaaggaacaactggaacgtatccttctctatttattgagaaatgcagccttctacaccgaacaaggacgtatcagccttgagttcaagaaacgtggtgcgcacactcatcagtttatcgtgacggatacgggaatcggtattccggcagagcaacaggaaaatatcttcaaacctttcacggaagtgaaagacctcactacaggagatgggctaggattaccaatctgctcacttatcgccgcaaaaatgaatggtagcctaacgctagatatcggctataccaaaggaacccgtttcatactggaacttcacgtctaaattttgcataaaacgaataacttgtatcattagattacttcctaatttgtttattatagttacctccgacaggcactattccaagcttttgttttgaagtatacaaaaatatggacaggttcatacataaacgcatctcatatttataataaactttggagtagtttattataaacggtatccatgtttattagaaactccaaaagctgatttccggttttttatttctattttttacaacaagaaggctgcaaattttgtaaaatttgcagccttcttgcttatatccagcccaccattcttagtgtatgctagaaatattctctatatttgttgtaatattatatcatttaagtcactagtttcatactcttttatctgctatttacaaggtttagattcttttttcgactataaagatacaacatttaaaagcatttgtcaagagatacatcttataaaatacctcctccaagcatttataaaaagtattgtccttcttcttttaaccttttacgcaacaaaacagtatcaattttatgaacgtcattccttgtctgtttgatggcatgcacagcagccattccagcggcttcccccgtcaccagacaaggaggcattacccgcaaacttccaaaagcctcttcatcagtagagatacaacgaccagccaccaatagattctttaatcctttgggtgtcagacaacgataagggattccatgcgactctccttttttgtaacgtgtctctttatggcctggcttatgaacatcaatatagtaacagttacgtccgatctcatcttcaaacgttttgcgttccagccagtcctgaaaagtaaacgtataatccccttcaatccgacggctatctctgactcccagcaaggaggcagtcttcactacaaaagcactaccaaaagccttgggccgcacttctttcagtgcttccaaatattgctctgctatctgcctaccgatagccattgcccgcgtagtatcccatggatcggtcgaatcaacattatcaatatgccctgcattgaactgaaccacatccggaccaatcagattactattgaaatgtttgcctatcaatggatattttccggacttaatcacatcataaataggactattcttgttactcgtatgtaatgaagggcctatgagattatagtgatagctatcgacattggcaaacgagaaacataaagtagaactttgcactactccatcctctcctccttttttaaaggaagcacctgcccatgcagccacatcaccatctcctgttgcatcaataaagactttcgccttgaatgcgacaagtccggatttatttgccacaatgatagcgtctattgtatcatttgctgacatctcaacggctgcaaccctcgaaaagaaaagaacctgagctcccgaatcagcgaccatttgatcataaacctgcatcagatattcgggatttatgttcacccagttcaacttctgttttctctcatgaggcactcctttttttgatgcctcgaatatcttttccgccaatcccctataaatgattttctcaccatccgaaaacggacaccatgccggaaccatccctgcagttcccataccaccaagttgccccattgcctcaatcaataaagtcttagcaccttccctagctgcagaaattgcagcggtacatccaccaggtccaccaccgattacaataacatcccatcgatcgtccaccgcaatcttagtattcttcaggcgtattttagactgtggggtatcgccattcacattaagggcaggaactgcaaaagcagcactaagcagcccggcttttttaagaaaatctcttctagacgtcattacaaattaatttattataattactttttcataaaagtctctgcacgccctggtgtaaacagctcccacaaagaagcaacagtccatccgggcgcaaaaatatcattatagtatcctttaccattctttccataatcccaacttgtatgttggacaacctccggataataacctacctttgcaataccgcacatatgcccttcataaggtaataattggcgcatagaagttgaaattacttctgcaaaatctgaaaagcgagactcgttatactcgttcgacagccaacgaagcacatcggcaaattcaaacacaaagacatcgatatgattattttctactgatacatttccccagccacgtgttttcaaaccaatatcacccagcatctgaccgggagcaaaaggaacatcccacaaataataccatgataaggcaaaataagcggcttgctttgtcaggtcagcataatgtttatgttcctctcccttagtaaccaatgaaagataataagtagcagttgcagcataaagtgatgcttctttatcttcacaattcgcatcaagggtagatgagaaataatctgctttagaaatcaattctttctccagataacctgcagtccgcttagcactatccaaataacgtttatccttgaaatacttatatcccatcaccaaaggcaatgtagcagaaggagtgcttcccccacttttatctacaatagtgaaatcgtcacgaaacttgcgtggaaaactgccgtcggcattttgcaattgcagaaacatatccagcattttcttcaatcgctgttcccattccggatgtttacgtcctttttctttttcataagccaggaaatggaagattgcataaagcccttctgactgacgacggatgctatgaacaggatcttcagaattcttatcaaaattaaccgattccttgaaaaagcctgcctctgtgaaaccattcttcaggtaactatcaaagactttagtactattagccttcaaatcctcccggctacattcccagccatattcccaagcattgaatgcattcagaagaacacgaccgataaaaccgacctctgcctgcccattacttgtacatgcgtctgtcctaagatgtatgcccgaattatataccaatggatatttatcaacaaaactacttacaaagaattggctaagagtctgcttcatatactcaattgagtagggagtatcaacaggcttgggagaatatgtatcataacaatattcccaggtatggcgcacaaaatcagaatagtctttggcttcaccttcaacaatttgccaggtcaacaaaatagtttctccttttttcagaagctgataagcagtcacagccggagctaatgtcaatttacgaatataacttttgggagcttcccgataaggaaaaccgaaagaaagagtagcaacaccacctttattttcaaatccggtataccccaaagatgtcttatccgaaagaataatctcaccttctcgatgcgtggccaaagtgctgtttacaaacttatccagtctgttgacagtcataaaacgttgtgtcttctcacagaaaattcccgtaagaggtgcacttaacctgtcttcgcttacaatccaactatctgatgtatggaatgaaggagcctctttgggtgaacgtagattacgtcgataccagaaccccggcatatagaacaggcagtcatcatgacggaagccggttgccatctgttgattgtaattaaaatagacatcttccaatgcagtgatagatacactaatacgtagcccatcattaccagtaactatattttgagacacagtcaacggcatcttttccgaattctccaaataataagtgccattattattctgcgatttctgaaaagtcaatggatagtgtttcgccccatttccaggtactttcaaagaaatagatgcagaaatcgattccggcacattattaaaagcctcagcaatagtggcacatgccacaaaagccatcccacaaagtaaatatttcaaactcatataaaacatgattgcgaatcagcctgtctgattccgtttgtactaaattgttgaaccaaagttaaggaacatccttcacattgaataaaagaaattgagctataaataaaaaaattatccaaatcaaaagaaatatctcccaaaagcctcaattactactcaataccggaacaattacttttccattagagcggcagcacaccacagataaggtccttgcccatgataatcacccgtgcggcgtggacggtcataataatactgtttactgttcttcttattcgtgcccacgcaaatttctctcacttgatttttatcattaagatatgagactaaagctatccacgccttacgagcagcaggagcatattcttcagcattcaaccatccattcttaactcccttgataaaagcaaaagtgaacatagccgatcctgatgtttcagtccaacagtcagactggtcaatcaactgattccacaagccctccggattctgatatttcttcagactttccatcattgtccgatagccctgcaaaatacgaggacggtctttgtgatttttaggcaaacactgaagtaattccgtcattccggcagccatccagccatttccgcgcccccaataataaggtacatccggtgcatgatagaaaagaccgttcggacgttgcaactcatccagatacatcaccatctctttagctgcacgatcaatatattttttatccttcgtcactttataagcacgagtctgcacgattgtaatcatatacatatcatcaatccacaaacgtgtttgccaggaatatcctttttcagcccattccttttcctccggtttcgcatttgcaggcactttccattgagaatcggcataaggcaatcctaaataccaatatttcttatccttcgtcacaagatataactcaagtggcaaactcccgaacatattcacatcaacatgattcataataggttgcaacgctttctcctcggtaaacagaggttcaaacttatcttgcaaacgattgagaagttctttatcttttgcaagataagcataccgtaaagccccgttccaatagaaagtctccggataaccaatccattttccgacatgaagcgcatgtttctctgtcagaaaacgataggccaatcgcttacctatttcctccggagtagagccttccggaaagtctttcaacatacttttttgagcaaacaacaactgaaaaggaataaaaaataataatattaataccttcttatacataaatacctaatctttatttattcaacaatatatctttcgattcaacattatatccatctacccgcaaaagcatcttatcaacaccttctttacaatccacctgaaaacggatttctttagattcgccgggcatcaaataaaaatatccgtcatcaaaataagctggacgaatgggcacatctgtttttgcattcctcaaagtcaatgctattgcggctgccagatattgtcctggatttttcacaataagtttaccctcataatgatttgctttttttgcaaaattcttcacagatacattcaccgaagcaaccggtaaatcagtcaaaacctttccatcccattccttttgattgagccaatagacattatcatccaacagctttccattatttgttgtcaataccagctttacccaactgaaatcaggaagaccttttatatcctctaattgtgttacaggagtcagtgcattagctgtcacatgacttaccttctgttgtgaggaacgtatcttttttcctactttatcgtaaaccgcgacttccactttcaaattccgatattctttcagcatagtattaataatatcaactttatgttgactattaagactcatctgaatatgaagaggacggcacgctttttgagtgccataataggcaccggcagtttcgccatttgaactgtaattctgccagaccatactaggccatgcaggatgactcatccacagtagtactccggaagcatcattccacatcttactgttccatgcttcaaaaatagcccgatggctttcgtaattaatcaattgtgcttttttacagaaatcatctaaattatcagaaggtcctaatttacgatccatgccttccttataaagctcgctaaaagtcttactaccatatctatgattatgccagtcatggtaataccaaacatcactaatgggccatgtatcctcttccgccataaactcacgaacagtttcagccgtaggcagcgaaggagtacccacttcggatcggaatcctccggccaaagaacggtagtaccagcctgcatcaaactgataacgccaaggcccgcttcctgaactattcaatgaacgggaatttcctgtataatgcctgctgccgtcctctttagctaaagtggcggccaacatgtactcaagttcattggttgcaaatccttcattacgtgcacaccataaagcgatagagggatgattgcggaaacgacgtactgtttcggtcacatttctaacgaacaggcagttatccagcggattgaggttaaacccatctgtcgaaagccaaaaatcattcataaccaacattccgtactcatcacaaagctcataaaatacttcttccgtactctcacccgtccagttacgaatcatattataattcatattcttatgcaacttcaaggcaggttccagtcgttcccgggaaactcgcttcataccatcatccattccccagttacctcctttacaaaaaatccgttgtccgttcacctttataaccatatattctttcatcagtgaatcttttatcaactctattccttgtgaagatactggttttaataaataggggacaaactctccatcgtaattcgtatagcgaactttattatctgttttcttacgtttcacagtatcaaaagcgggttttccatcttgcaaagcagcagtcggattatagttcaaacgcactataggagagttatcctcgtacgcagacaattcatactccaactcacggataccgatacgcaacttctttacgtcaagcgtgtccttacctgatgaaatcagacttaaagatgcatcatataaatactgttctccatacccattcggccaccaaagacgtggattcttcatttgcagttctttacactcattagaagtcagcttaatcatcctcttttcatttgcattcaaagaaaccggataaacagctgacactccgccaatattaaaatgcaaattagcagtacgagtcgttttagaagaattataaatctccgtctgaacgataaaattgacagaagtagtgtcaggcaaaggcaaatccgtaataacatgtgtatcaacgatttccaattcatttccaaatttgattctgacatcctgccaaatacccatgtttcggtcgcgtatgccgggaatccaatcccagccttctgaagagataaaagtaggaccatccaggcacaatgctccaccattgggaccaattccttctttcctatttgcctcgtgaggaataccgggattattaggcggaagaatacgaatggccaacagattctttttatcataatccacccaaggagttatatcaaaaatacctctttcaaaagcaccggtcatcgttcctaataattgcctattgaaccagatctccgctttataattgattccattcagaatcaacttcactttctctccctttttattacgaggaatattaaaagaattgcgataccaccagtccatccggcaaagcgtatcgggaatcaataaattattaagtccccaataaggatcagggtatacaccctgatccaccaatgtagttaatactgtacctggaactgttgccgaataccattcgcttgtatctaaatcttgcgcaactacagatttttcagctgctctggctttatatccttctatcatttcccatcctttggagagttgatattcccaatcggaaagtggactcaattctccggattctatcaccttctttttaggattagctgtttgaaacgaatgttttgaatgaggtatcacttcggaactttgcttacgtgataaaccaaaattccatttcaacttttgtgaataaatacattctgtagaagaacacagaaaaatagcaatacaagcaatatatatattcagctttattctcattgttttataatctactatttaatcttcaacttctttacatcatcacatacggcgactgctacccgagaatccgcacaaccgtaatagaggtataatttccttttgtgatatgcaagcccct

SEQ ID NO: 8135 - DNA, 4077 bp, Unknown
  gut microbiota DNA sequence
tgaattgttggattcctggcatacgttattgatggcgaaatttatttccgctatgatgtttcccgatgcaagagaacaggcgcaagcgttgagcggcttgtcacgttggctttcttcttctttgcgttatactccgggaacgatcggtggtataaaggtagacggtacgactttccatcatggcggtttctatccgggatataccactggagtacttgcgactgtaggagaatatattgcatttaccaatggtacaagttttgaactgacagaagatgcgcgcaaacacatgaaatcagcctttattgctatgcgcaattattgcaatttttatgaatggggcatcggaatcagtggccgtcatccttttggagggaagatgggaagcgatgatatcgaagcatttgccaatatcgctttatccggcgatttgtccggtcagggaaatacgtttgatcgtggtctggctgccgactatttacgtctgatacgcaatagtgatactccgaatgcgcgttttttcaagaaggaaggtattcaaccggcacaggctccacagggattcttcgtttacaactatggttcggcaggcattttccgtcgtgcggactggatggtgacattgaaaggatataccacagacgtatggggctctgaaatttatacgaaagataaccgttacggacgttatcagagttatggctccgtgcagattatggggaaaggaaatcccgtgtcacgtgccggaagcggttttgtgcaggagggatgggattggaaccgtttgccgggtacaactaccattcatttgcctttcaacttgcttgatagcccattgaaaggaacgactatggcacgctccaaagagaatttctccggaagcagttctttagatggtaaaaatggaatgttcgctatgaagttggcagaacgggattatgagaattttacaccggactttgtggcccgtaaatccgtattctgttttgataaccggatggtttgcctgggaacaggtatttcgaactccaatgcggattatcctacggaaacgactcttttccagacaaaatataatggtaaggagcccaaagtaggagaggataactattggcttcatgatggttatgacaattattatcatgtagtggacggaaccgttcgcgcacaggtggcagaacaggaatcacggcatgaaaagacgcgtgaaataaccaaaggaaaattttcttctgcctggatagaacatggcaaggcgccgaaagaggggacttatgaatatatggtattgatacagccttctgcttccgatctcgacgaactgcgtaaaacttctccatacgaagtgttgcaacgcgatcagactgctcacgttgtttatgataaaaagacaggtatcacggcgtatgctgcttttgaaacttatcagcctgctggtgataaaatgttcgacactattcctgcggaaacaatggtgatgtatgtaaaggaacctaataaaggtatccgcttaagtgtctgtgatccgaatctgaatatagaagagaagacgtatacaacgaaagagcccagtcgtcctattactaaggagatacggcttaaagggcattggacattgacaagtccgatggaaaatgtccggttggaacagcagggagatcagaccgtattgacggtaacttgtcagcatggacagccggttgaaatgctcatggaaaataaataattagtgaataagataagaggaaacaagaatttaaagagagggtattagttatcatgtttctatgaaaaaagagaagaccggttcgtggtgagccggtcttctttgtatttacacggtgcgttgagcactttcttttcttgttacttattcagtctccattcgaaaccgtctttagtatctttgatttcaaatccgagtgctgtcagtgtgttgcggatctcgtcggaagtagcccagtctttgttggctttcgctttcatacgttgttccagtagcatatctactactttgccgtaagctgcttcacgaccatctgaagagcctttttcttctttcaatcccatgatgtcgaaactgaacagatggaatgtttctttcaggtctttcaggtcttcggcggagatggtagcattacctgcaatgatattgtttataatgcgggcgccttcgaaaagctgtgcgatgacaatcggtgtatttaagtcgtcattcattgcttcgtagcatttggcgcgcagttctttcacgttgattccctctgaagttgccgatgagggagttatcttatctaatgcgtcaatggcttccatcagacgctgcagacccttttcggatgcttgcagtgcttcattgctgaaatctaccgtgctgcggtaatgagcttgcaggatgaagaaacggattgtcattggtgtgtaggcttgtgctagcagcttatgagtaccgttgaagaattcgtccaaagtgatgaagttgccgagtgatttacccatcttggttccgttgatggtaatcatgttgttgtgcatccagtagtgaaccatgtcatcaccttgtgaggctaccgattgtgcgatttcacattcgtggtgagggaaaatcaagtccattcctcctccgtgaatatcgaagtgttcgcctaggtatttgcgtcccatagcggtacattcggcgtgccatccggggaaaccgtcgctccatggagacggccagcgcatgatatgttcaggttgtgcctttttccaaagggcgaaatcggcgggattgcgtttttcgctttgtccgtcgaggtcacgggtggtattcaatacgtcgtccagattacgtccggaaagttttccgtaatggtgatctttgttgtatttggctacatcgaaataaacggagccttcgctttcataggcgtatccggcatccaaaatcttctgtaccagttggatttgttcaatgatatgtcctgaagcatgtggttcgatgctcggagaaagtacattcagtgcttccattgctttatgatagcggttcaggaaatattgaacaacctccattggttccaactcttccagacgtgctttcttggcaatcttgtcttctccgtcatcggcatcatgttccagatgacctacatcggtaatattgcgtacgtagcgtactttatatcctaggtgggtgagatagcggaataacacatcgaaggttatagacgggcgggcgtgtcctaaatgggcatctccgtaaacagtcggtccgcacacatacatgcctacatgaggtgcatgaagcggtacgaacaactctttctttctatctaaggtgttgtaaatggtaagttgatgttccataacattttatatttgttttattggaactgcaaagttagtataaaatctgaatatgcgctctatctttgatgagttgattttagctcttgagctgttttactggtaatattattagtttcccggtatgaaactaaaagtttcacaccgaggaaccaatggtttcattacgggaaaccaaaggtttctcaccgagaaactaaaattttgtcagcatgaaagtaaatgtttggttattgttgactgcaaaacttatcaatagcttctgctacaccgtctttttcgttgcttagagtgatgtaatttgctgctttttttacaggttcttgtgcatttcccatagcaattcccagtcctgcaaacttaatcatggataagtcattatagccatctcccattgctatgacttcttctcgtgctactcctatttctttcaataagacagcaagagaaagagctttgtcaattccttgcggaactaattcgaggaaatagggttctgaacggaaaacgttaatatgtccttgtagccggagactaagttctgcttcaagcggaatgagtttatctgcgtctcctacgatgaggcatttggctacaggaagcgtgatctctgtgaggaagtcgtttgttttccgtactgccattttattgagaaaggcctctttctgtacgtatgggtcttgagagttttctgttattatatctgctccgtcataggttaatatactt

SEQ ID NO: 8136 - DNA, 25577 bp, Unknown
  gut microbiota DNA sequence
ttattttattattttctatactatctccttttttatctataaaaaaaaatacgaaagttataaatctaccctcaccaaccctcacctttgacccatatcttataataaaaagataacggggaatcttaaaaactcaatcatctttttcagatttaccacaacgtttccagaatacttcattattttattcaaaactgtgcggatatgaattaaattttggtgcggttgccctagataaaatatcaatagactaactcaataaaatgcattgttcgacaccaatttcctgaataaaataattgtcgtgtgagattgctatcacagtacctgcataatttttgatagtagcagtgataatttcaatactttgtatgtccaaattgttggtaggttcatccaagataaacatatcaggggtattgttactaatcatcagacagcagaaagcgagacgcattttctcaccaccactaagtttccggcaggatttgtcccattcggatgcaggaaacaagtaacggtttagaataatctttatttcatgctccggcagattccggctgttgaaagcgtaagcctgttcaagaatactgttccggtcgtcaatgatcgaatactcttgattcaaatagacatagctaaagtccgtccgtgtcagggttccttcctgtggttgaagttggccggtgattaatttcaatagagttgttttcccgctaccgttggctccttctatacggaggcggtctccgctctttagctgaaagctgacaggagcttgccaaagctgttgttttgagatactattttcctgaatatcattgctattcggattgggatgataacctgtgtcagacgaatttatttcatcattcgtcagaatatcattgttaatcgaattggaatgataactgaagttaatctcttttgctgtcactaatatcttcccggtatgaagcgaggaactgttgaaatcggtttttaatgccgcagtcggagagagcgaacctcgaagctggttacgttcatttgttaacttctcggctttctcctgatggacaccagtcagtttactagtgctcttctcggatttcccttggagtgcgttcaatacaatgcgtggaactcctttttttatattactcttttcgccgcgtacattctgtttgtctctgcgttcggccgtttcgcgagccactttacgggcgatacgtagtgccttttctttttcttcaatacgttgttgcaatgcttcctgcatcagcgttttttgttctttgtagaattcgtaatttccgccataataattgatttgatgcttctccaattcgcaaatttcggggagaagattgagcagagtacggtcatgacttaccactaacagggtggaacgatatttttctacccagtcatataaacgttgtctgccggaagaatcgagatgattggtcggttcatccataagtatgacagatggatgatgaatgtccatacctgccaggaatacgcgggtcttttcgccgccactaagcagattcatcgggtaggatagcgtaaactgtcctaatccccataaatcgagagcggcgatggaacgttcttcgatattccagtcatcatttagaatggtgaaattctcgtttgagacatctcctgtcaggatagcgtgcagagcttgctgtttacactctatttgaagagcctgtgcgatggtcagtgaatcatattgcccgaaatgttgcgggatataatataggtcgtccgggcggacaatgacaccggaagagggtgataactgtccggcaataatttgtagcaaagtagacttgccacaaccattgttaccgactaatcctagtttctgccctttactgatggcgaaattgaggtcactgaataatacttctttatccggatggatatagctgatttgttggatactgatagacatgatgatctattgggtttgaggttgaaaatagagtgaaaaaaatcacaggataggggaacgacaaacacaatactggctaaacaacacggatttcgtgatgcttaacaaaatagaaaaagcatataagaaaagtgatgtttacttagaagtgttgtcttacttagtaattctcattgtggtaggtatatagtttaacttggctgcaaagataacactttctattagatttcactctattaagactgaaaaagaatgaatttcatttatttagaggctccgtttacctcattcagagcctccgattactccaaatagagcctctgtttaccctattcagaggctctgttttagaagtgagttatactctttcttattcttatacatcaaacagttgatttaatccctcactcatactgggatgcgtgaagataaaatcgcgcaagaatgtagaggtttgccctgtttttatcgccatagctacgatattgatgatttctgaagcatcggcgcagaatagagtacagcccataatcttcccgttatgattattgatgatagcttttagcataccatcagtctgcctcaatgtacgggtacggacgatggaggatgccggcaaccgggaaaccttaaatgaatatcctcttttcagagcttcttcttcactgattccgatatgcgccaatggcggatcaataaacactgcatattgcacaggatcacggtctccgatatcacgtttcttgtcgccgaagagctgatcgcggataatccggaaatcatccagcgagagatatgtaaattgcgatccgcctttcacatctcccattgcccatatatgaggaacagtagtgcgtaactgatcgtttacgatgatagctccgtgggcatcaactcctacacccgctgcttgcagattcaatccctcaatcatcggtttacgtcccgttgcgataagaatggcatctccatctacataataaggagtaccgtcggatacgtccgagtaagtcagtgtcactccgtcattcgtgtcatggatagactgcgcacgagcgttcagatggatttcaatacctttcttctccatcacttctttgacgctgtttgcaatatcccgatcttcacgaggcataaatttgtttcctccttcgagtatcgtcactttactgccgaaaccggcatacatagaagcgagctccagtccgatatatcctccacctatgataatcaggtgatgaggaagtacgcttaagtccaaaagcgcactactggtatatacgtgctgactttgctgaataccatctattgcagggataatgggagtagaccccgtgttgataaatatctcttttcctttcagttcgatttctccttcgggaagttccacttttatggtatcggcggatatgaaagaccccgttccagtatagatagtcacattaggacgtttgcttagtctttcgtaattatcattcctaagaaaggaagtgaggcggttctttcggccgatggcctgtttgtacatattcgcctgcttcggaaaatcatcgtggtaaagcaaagcggaaacctcggcttcatgtaccagcgtctttgttgggatacaggctacattcggacagcttcctccatacatcatgttggaacgttctacgatggccacttgccatccgcggttggaaagttcggcagccagggttttccctgccttgccgaatcctataataattgcatcatattgtttcataacttcttgtattaatgatttgtatgagactatataacagtctgaaaatacgatttgttccgcaatggcaagaagtcagaatcctctttagtggttgtcttagtcttttttaagtgttttgagtacgcgttgtgacgagtcggataataacactacggcactggccaggatcacaatgtctttaatcaccaaccgccctgcaccggatagtaatgggaaaccgaattctccgcttcccaagtcgggaacccagacttccggggtggtgacaagaaaagaaagtgtgccgagcgtcatgataatggcgagggtgtcgcctgccaatcccacttttgggaaaaagattcccaggaataccagtatgccgatactcataataagagctcccagtccgtaagagaaagtataagtgcggtttgcttcgtgccatgcacgattttccgggacaaaagcaccttccgcatttttatgttctttgtattcgggtgcacctttagcatagaagaaactcataaaaggactgttggcaacaaacggaacaatcccgtcggcttcataatggaaatacttcaatccgcctatccatacaaatactaccaggatggcaacgcggataaatttcataccaaaacttttcagacttgaagtgaaggtcagtaaagcgatcaatttctctttcattttgttggggttttaatggatttatcttatgtcgcaaaggtcgtccatttccactaccctcaaaatagcaatacttccgtatgccttgtcaatttttcccttcctgtgtgtttctgaattgcacggcgctctgtccggtcatatttttgaagaaacggctgaaagaagcctggtcttcaaatcccagaatatcggcaatctctttggcgcttttgttgctgtaaagcaggagacgtttagcttccgcttccacccgttcgtggataacccgaagcggcgaaggcagtttgcaggtagaaaagatgttcgatagtgtcttgggagatttatgcaacatatcggcatagtcctgcacctgtttcttcgtccggtaatgctcgtcgaccaagttatagtattggcggacaatctcaaatccggattctttttcacgggtgatattcatgcggtgacgtgcaattcgggtacattggataatgaaacgtttcagcaggatgcgcagcatctcttcctgcaggctgtcggaaacggtaaactcattttccagtgcttcggtaatagtgtcgagttctttacgttctttttcgttcagtgtgaaacggatcaggtgagatgaaccgttgaacaggaagccgctgcatgacacttcatggtcgttgccatagatacaatagaaattgctgttgaacagcaaagtcaggtattcgccatcaatcgatttaaattcgaggtgttgcagatgagtgagtgaaatcacttcatcttgggtaagtaccatttcctgatggtcgatttctactgtgatgtttccgttgcgtacccatataaatttataaagccctttttctttttgcagtgctttttctgtcagataagagtctgtaagtgcgagtgttccttttagtttcgtgtgatattgttgtaacataattaatcctccattgctgatgcgtcaaatgataatggcagtagatcgcctatactttttacttcgtagatacattctttgccatataataggatgcggatggggtgtttgtaacgcttttccgtttccagaatcacttgccggcaagcaccgcagggaggaatcggatggtcgatgaagtccttttccgttcgtgccgcaatggcaagagtgacaaccgattggtcgggatattgggagttggcatagaatagggtagtacgttctgcacaaagccccgacggataggccgcattttcctgattggttcctgtcactactgtcccgttgcccaatagcgcagcggcacctacggagaaatgggagtacggagaataactacgagctgttgcctccatggcagtctttataagtgaccgatcgccctcattcaactcatcatattgatatactttaataatagcggtaattgtgaggtctttcatatacgtcagggtattggtttctacaattaatgttacaaagttaggaaagagattgataatcccaattatttttcggatttttgtgccatctaattcacatctgaataaaaatggagaataaactgcatagacttatctttttaaccgttgtttttttctttgccgtaggagtgcaggcacagaaacggaatgcccgttacgtcgagtatataaataagtatagtgatttggctgttgaacagatgaagcttcataagattccggcgagtatcacgttggcgcaaggattgctggaaagcggtgccggatacagccagttggcacgaaagagtaataaccactttggtattaaatgtggtggcagttggcggggacgtacggttcgtcatgatgatgatgcgcgcaacgaatgtttccgtgcttataagcatccgcgtgactcttacgaagatcattccgacttccttagaagaggtgcccgttacgcttttcttttcaaactggatatcaccgattataaaggatgggcgcgtggactgaaaaaagcaggctatgctaccgatccttcttatgctaatcgtctgattacaattatcgaagattatgacttgtataaatacgaccgtaagggggtatattcggaacggaaactgaaaaagaatccttggttgatgagcccgcatcaggtgtatatcgctaatgatattgcttatgtggtagctcgcaacggtgatacctttaaagatttaggtaacgaatttgatattagttggaagaaacttgtgaagtacaacgacttgcagcgtgattataccttgatggaaggagatatcatctacctgaagagcaagaagaaaaaggcttccaaaccttatactgtatatgttgtgaaagatggagattccatgcatggcatctctcaaaaatatggtatccgcctcaaaaatctgtataagatgaatcgtaaggatggtgagtatgttccggaaatcggagatagattgcgtctgcggtagagacttctctcaaaagtttcgaatttcggaaacttaatgactcattcatgtgttattatcttgataaaacatgattagaatatgagtctaaacattgcaaaaagtaataagaaacgtgtcgtcatagtaggcggtggtttcggtggcttgaaactggctaacaagctgaaaaagtcaggctttcaagtcgtattgatagataaaaacaactatcatcagtttcctcctttgatttatcaggtggcttcggccggtatggagccaacttccatatccttccccttccgtaaaatattccagcatcggaaagatttctatttccgtatggcggaagtacgtgccattttcccggaaaagaatatgatacagacttccatcggaaaagcagaatatgactatctggtgttagcagcaggtactacaaccaactatttcggtaataaacatattgaagaggaagccatgccgatgaaaaatgtgtcagaagcgatgggattgcgaaacgctcttctggctaatctggaacgagcgctgacctgttcaacaaagcaggaacaacaagaactattgaatattgtaattgtgggaggtggagctaccgggatagaagtagccggaatactttccgagatgaagaaatttgtcttgccgaatgattatcctgatatgcccagcagtctgatgcacatctatttgattgaagccgggccgcgattgcttgccggaatgtcggaagaatcatctgcacatgctgaacagtttctccgtgaaatgggagtaaatatcctgttgaataaacgtgttgtggattatcgtgaccataaagtagtacttgaagatggtacagagattgccacgcgtacttttatttgggtgagtggtgtcaccggtgtgactatcggaaatctggatgcctctctgattgggcgtggaggacgtattaaagtcgattcatttaaccgtgtagaagggatgaacaatgtgtttgctattggcgaccaatgtattcagttagctgatgaaaattacccgaacgggcatcctcaactggcacaagtggcgatccagcaaggagaactattggcaaagaatctgattcgtatggagaaaggacaggaaatgaaacctttccattaccgcaatttaggttcgatggcgactgtcgggcgcaatcgtgccgtggcagagtttagtaaagtaaagatgcagggatggtttgcctgggtgatgtggctggttgttcatctgcgttctatccttggagtgcgtaataaagtgattgtgctcttaaattggatctggaattatttcacttatgatcaatccatgcgtatgattgtctatgcccgtaaagcaaaagaaattcgtgatcgtgaaaagctggaggagactaatcattggggaaaagaactgatacaggaaccgaagcaacactctccgcaggagattcagcaagcttccggacaagagaaaaaatagtcaatgagaagtcattataccgtagttgacaatccgtcattatccaggtatactgaccttccgccgacaggtggatagattcatattctgaacagtaaattcgtacagggtgtccgatatcggacaccctttgttttttgttatattctatttatcaattacttacggttttggcatagatttggtatgtaaaatgctaaattgatacatgataaaattgtaaacgatcagatatggacagagaaattcctaaagaggtacgtcagaaagaacgtaataagaagatcattcgttattcatccatcggggtggcaagtattgttgttattggtgtacttatatctgtactaagggcaggagtggaggcaaaagatcttgtcttttccacagtcgatacaggagttattgaggtaagtgtcagtgcttccggcaaggtggttcctgcatttgaagaaataatcaattctccaatcaacagtcgtattcttgaagtttataaaaaaggaggagatagcgtagatgtaggtactccgattctgaaactagatcttcagagtacggaaaccgaatataaaaagttgctggacgaagagcagatgcgtcggtataagctcgatcagcttcgtgtcaataatcagacgaagctttccgatatggcgatgcagatcaaagtttcggctatgaaattaagccggatgaaggtggagttgagaaatgaacactatttggacagtctcggtgcgggaacaacggataaagtgcgccaggctgaattgagctataatgtagcccagttagaatacgaacaactccggcaacaatataaaaatgagaaggaggtggctgctgccgaactgaaagtacaggaacttgattttaatattttccgtaagagtctctccgaaaagaaacgtactttggatgatgcgcaaatccgttctccgcgcagagctattcttacctatattaataaccagattggtgcgcagatttccgaaggcggacaagtcgctatcatttccgatttaagtcattttaaggtggaaggtgagattgctgatacgtatggcgaccgtgtggcagctggaggaaaagcaatagttaagataggaagcgataaactggaaggaacggtcagcagtgtaacaccgttatccaaaaatggcgtcatatcattcacggttcagttgaaggaagataatcaccgtcgtctgcgctccggattgaagacagatgtttatgtgatgaatgccgtgaaggaagatgtgatgcgtgttgccaatggctctttctatgtggggcgtggtgaatacgaattgtttgtctgcaactctgacaatgaactggtcaaacgtaagatacagttgggcgattcaaactttgaatatgtagaagttttgagtggattgcaaccgggtgacaaggtagtggtaagcgatatgagtgcatataagaacaagaataagctgaagattaaataaattaaatactagaagttatgataacattgaactctctttccaaaatttaccgtactgatgagattgaaacggtagcgttggaaaatgtgaatctgacggtagaacgtggagaattcctaagtataatgggaccttccgggtgcggaaaatctacattgttgaatataatgggattacttgacgcacctaccatgggaatagtggaaatcaatggaatacgtacagaaggaatgaaggacaaagaattgtcaattttccgtaataaaacgcttggttttgtgtttcagtcttttcatttgattaattcgttaaatgtgacggataatgtggagttgcctttactttatcgccgtgttggcagtagtgagcgaaagcggttggcacaagaggtattggaaaaagtagggttaagccatcgtatgagacattttcctacacaactttccggtggtcagtgccaacgtgtagctattgcccgtgctattatcggtaatcctgaaataatccttgccgatgagccgacaggtaacttggattcaaggatgggagccgaagtcatggaactgcttcaccgactgaataaagaagacggacgaactattgttatggtcacccataatgaagaacaggcaaagcagacttcgcgtaccattcgtttctttgacggacgacaggtgcagtagaacctgcgttttatacataaaactaaatagaaaatagattaatctctctctaaattaaaaaccaccatgacaaagaatatttttatcgttgcgatagctgtcctgttaagtgttgctttttgttcgctatcggcacaaaatgtgagtaaagattataatgtaggcgacttttctgccatcaacctgcaatctgtcggaaatattattttcgctcaatcggcagaatgtacctgccgtttggaagggccttctgaatttgtagagaaaacccgggtaacggtgaagaacggtacactggttatcgattataaagagaagaacgtaaagaatgtcaagaatctgattttttacatcactgctcccgatttgagtaaagtgaaaatcgacggggtagggaactttgatgcaaaggaaaaattgaatcttaaaaatatagctttcgaacttgacggagtgggaaattgcaacgtgaaaaatcttcattgcgatgaactgaaactcgatgtcgacggagtaggcaatatgaaaatgaatgttgactgtggccttatcaaggctaaagtggatggagtagggaatatcactttatcgggtaaggctgatactgctttctttaaaaaggatggtgttggtaaaatcaattacaaaaacctgaaatgtaaggatataacaaagaagggatggaatttctaatatggaacgttctttgacgaacttctgtggaacctaatcgaagaagaataaaaaagacgagtaagaaatatactgaactctatactggtaacgatcatgataaaactctattttaagcaagcattccatctgttgggagaaaataaactgctttcatctatttccattattggtacagctttggctattgctatgataatggtaattgtgattactttacgtgcgactattgctccctttgcaccggaaacccatcgtgaccggatgcttattttccggtttgccggacttcaaagtaagtccaacgtgaattggcaaagcaatggccctatcggatacaatacggcaaaggcttgtttcaaagcaatgacaattcccgaagttgtttccataaccaatatctggcaggaaacaatgctggctgctaaaccggcaggtgagatggaaagttgtagtgtgttgcaaacagacgacgctttctggaaaatatttgaatttgagtttctatccggtaaaccgtatgataatgccgattttgatgccggagcagcaaaagctgtgatttccgaagatatggctcgccgtttgttcggaacgtcagaagtggttggaaaaacattccttctgaatcattcggcttatattgtttgcggagtggtacgtccggtctctaaactggcaaagtacgcctatgcacaagtttggattcctttgagttcaacaagtgccttcacagccacttggggcgatgacaatatcatgggtatgactgccgtctatatactggctaaatcgaaagacgattttccggctattcgtcaggaggcagaccgcttgcgggctatctttatggcagggcatcccaatttcgatttactctatcgcggacagcctgatacttatttcgtagccgcgcaacgctattccgccaacaatcctcctgctgtgaaagaagcagtacggcaatacatactgacattacttgtcttattgattgttcctgccgtcaacttgtccggacttactttgtcacgcatgcgtaagcgtatctccgaaataggagtgcgaaaagcctttggtgcccccagacgggagcttatgatgcaggtactatccgaaaatatgctttattccctgttcggaggaattctcggactggtattaagttatgtcgccgctttccttttgggaggaatgcttttttccgtagactttgtatccaatggtgtggaggatttgcggaccatgtgtgtcgacttactgttcgatcctaccgtattcctgctggcatttctggcttgtttcctactcaatttattaagtgccgccattccggcatggagagtaactcgcaccaatattgtggatgccatcaacgaaagataattcttcaactcatctaaattctaaagaaaatgcaactattaaaacaaatatggaacgagcgccggtcaaacggatggttatggtcagaactattaattgtttttgtggtcctgtggtatgtggtcgattggacgtatgtgacagcgcgtacttattacgaaccggtaggatttgatattaccgatacgtattatttggaactaagcctgaaaaacgacaagagtaattcctatctttcgaaagagcaaaagagtacatctttaggacaagatattatcgagttgaccaatcgtctccggagattgccggaagtggaggccgtttcaatatccaataatgcgcgtccctatatcgggagtaactccggtagtatgttgcgtatcgatacattggttagtaatccgctacggcgttcggtaacccctgacttttttcaggtctttcgttatcaaagtgctgatgggcgtggttatcagccgttggtgcaagctttaaggaatggcaatgtagttgttggtgaaaatttctggcccaaagattataaaggcgatcgtacgctgttgggtaaagaaatggtcgatgtggatgattctacgaaagtgtacaagatagggggagtttcgaagaaagtgcgttacaatgacttttggcctaactacagtgaccggtatgtagccattgaacttactgaaaagataatggtcgaacttgacgatgaactttatccttcgagtgtagaagtttgtctgcgggtgaaaccggggacttccagagactttgcggaacatttgatgaaattgtccgccaaccagttgagtgtcggtaacttattcatcctgaaagtgcatgattatgaagatctgcggaatgacttccagcaaggaagttataatcaggtacaggtacgtttctggatgatgggcttcttattgcttaatatcctgttgggcattgtcggcaccttctggttccgtacgcagcaccgtcgtgccgagtctgcgcttcgtatagcagtcggggccagccggatgcagctttggcaacgtttaaataaagaaggattgctattattgactctggctgctttgcctgccaccgccatctgttataatatcggccatctggagttgactgaagggtatatggagtggggagtagtgcgttttcttattacatttgtcataacctacctcctgatggctttgatgattctcattggtatttggtttcctgcccgtcaggtaatccgcatacagcctgccgaagcgctgcgcgaagaataaaaaacttgggctatctatttgttttcaatagatttaacgtatctttgtcggcataatattgaaaacaccgcaggttttaattatatgaatcgacgctattattgtatgtttatagttctgttttttgctgttcttacgcaggcggcggcagcggaacgtacattcaatatcctttttatacagtcttacacctcgcagactccttggcacagtgaccttaatcagggcttggctaaagggtttaaagagagcggtttgaaggtgaacataacaacggaatatcttgatgcagatttttgggcattcaattccgagaaggtaatcatgcgtcgtttttgtcagcgtgcccgcgacaggcagacagatttgattgtaactgcgagtgatgaagctttttataccctttttgcatgtggagattcgttgcctttgcagattccggtggtgtttttcggtattaagtatcccgatacgaagttgattaccactcatcccaatgtttgcggattcacagccaatccggatttcgatgtcatattacgtcaggcacaaaagatatttccccgacggaaagaagtggtttgtgtgatagataacagctttttaagtaacaaagggcttgaagattttgaagaagagtggaaaatctttcagaaagacaacccggattatagaatgaaaatctataatacccaaaatcatacgactagtcatatcattgcggcaatttgttaccctagtaacagctacgaacgtttggttgttgctcctaaatggtcgcctttcctttcatttgtaggtaaaaactcaaaagctcccgtattttcaactcaaaatgtaggattgactaacggtgtgtttagtgcttatgatgccgacagctatacttctgcatcattggctgctcaaagggctgcttcggtcttaaaaggtacctctccccgggatataggagtgacggaaattacacagggattcatctttgactacaagcaattagattttttccatgtcgactctgataaagtatcctctagcggaaccatagtcaatgaaccatattgggagaaatataaatacctttttatacttctctatccgtctatcctcgcattgttgatagcctctatcgtgtggctgatgcgtgccaaccggcgtgaatccaaacgacggattcaggcacagacccgtctgctggtacagaataaactggtggaacagcgtaatgagttcgataatgtatttcattccatccgtgatggtgtgataacgtatgataccgatttgcacattcattttacaaaccgttccttattacaaatgcttcatttgccgtatgaggcaggtgggcgtttttatgaaggaatgatggctggcagtatcttcaaaatatattataacggtcaggacattcttcataaaatgctgaagcaggtagcttcaaaaggagaaagtgtgaagataccgcagggagctttcatgaaagaagtgcatagtgataagtacttcccggtgtcgggggaaatagttccgatccgttcaaaggacgcgattaccggtatggcactttctgcgcggaatatttcggatgaagaaatgcagaaacgtttctttgatatggcggtagacgaaagctccatatatccgtggcagtttgatatggaaacgaactgtttcatttttccgcaaggtttcttgaaacgtcttggatacgatgagtcggttactaccatcccccgtgatgaaatggatcgcactatccatcctgacgatttgaaagaaataagaccgttgtttgacagagcattgaccggggaagattctaatacccgtttgaacttccgtcagcggaatgtcaacggagagtatgaatggtgggaatatcgttcttccgtaatcacgggattgacacaagattcattgtacaatatattaggtgtttgtcagagtatccagcgatataagactgccgagcaggaaatgagagaggcccgtgataaagccctccaggctgacaaactgaaatcggcgttccttgccaacatgagtcacgagattcggactccgctgaatgcgattgtaggtttctccgatttgctaagcgatacgagtggttttacaagcgaagagattgcccagtttatcggaaccattaataagaattgtggcctgttgctggctttgattaatgatattcttgatttgtcacgtatcgaatcggggaccatggaatttatgttcgccgagcataacctgccgctattattaaagaccgtccatgattctcaacgcttgaatatgccaccgggagtagaattggtgttgcgtatgcccgaaagtgataagaaatatctcacgacagataatgtacgcttgcagcaagtcgtgaataatctgataaataacgctgctaaatttacgagcagcggtttcattactttcggctatgaagacgatgaggttcccggctacacccgcatctttgtggaggataccggagtcggtatttctgaagaaggtatccgtcatatattcgaacgattctataaagtcgataatttcacccaaggagcaggtttgggattaagtatttgtcagaccatcatcgaacgtctgaatggtaccatctccgtcacctccgaagtaggtaaaggcactcgtttcactgtgcgccttcctaactactgcgaataatcgaacgttcacttttgggcatagtgtccgaaaatggacacttttcttattttctaatctattgataataaaaactttacttttttggcacatcgtttgattctctcatagtggaaaatactgtgcataatgaaaaagaaaagtatattgtttgctcttgctgccgtttgcctgccgttggcattgtcggcacagaaggaaagggaaataaccttgaatgaagctattgctatggcgcgtattcaatctgttgacgctgctgttgccttgaatgaattgaaaacggcctattgggagtttcgtacctttcgtgccgatcttctgccggaagtcaacctgaccggaaccctgcccaattataacaaatcatatagttcctatcaaaattcggacggttcttacggtttcgtccgtaataacacattggggcttaccggtgatctttctatcgatcaaaacatctggcttaccggtggtaaactttcgctgacttcctctctcgactatatcaagcaattgggagccggaggagaccggcattttatgtcggttcctgtcacattacaacttacacaacccatctttggagtcaataatataaagtggaacagacgcatcgaaccggttcgttatgccgaagcgaaagcagcttttatcactgctaccgaagaagtgacgatgcgtgccatcacttattactttaatcttttgttggcaaaagaaaatcttggcacggcgaaacagaaccagacaaacgccgaccacctttatgaagtagcccttgccaaacgcaaaatggggcaaatttccgagaatgaactcttgcagttgaagctctccgctttaaatgcgaaggctgcattgacggaagcagagagtgatctcaatgccaagatgttccagctccgtgcctttttgggagtaggagaggatgaagtactaaacccggttcttcccgaagctgtggatggcccgaggatggagtacaatcaggtgttaaataaagcattggaacgtaattcttttgcacagaatatccgtcgccgccagttggaagccgattatgaagtagctactgcacgcggaaatttgcgtagtgtcgatttgtttgcaagcgtagggtatacgggtgagaaccggaattttccggccgtttacaggaacttgcaggacaatcagattgttcaggtaggcgttaagattccgattctcgattggggaaaacgccgtgggaaagtccgggtagccaagagtaaccgggatgtagtgctttcaaaaattcgtcaggaacagataaacttcaaccaggatatttttctgttggtggagcatttcaataatcaggcacagcaattggacatagccaaagaagccgatgcgatagcccagcaacgatataaaacaagtattgaaactttcctgataggtaaaatcaataccttggatttgaatgatgcgcagaactctaaagatgatgcgagacagaaacatatttccgaactttattattattggtattattattatcagattcgcagtctgacgctatgggattttcgtaccaataccgaacttgaagctgattttgatgaaatcatccggcaataaaaagggtaggaaaaagcttttgaatcttatggaggaacttgccggagattatgggaaaagtttttcaagtctgcaaacagactattgcgtatttatgcctgattcatttggtattacgaactatttatagtacctttgaaactcgattttaacactcgggaaatgaaaaatacgtaaataatacagaaaaattcatcccccattataaataaagaaagaaataaaaaaagaaatacttcttcttggaagattgaaaaaacagaagaagaagttttcttggtagaggaatcttgcaattttaactatgattctgataattgacgacgacagcgcagtgcgttcttcgcttagcttcatgttgaagcgggcaggatatgaagcacaaaccgttcccggtccacgggaagctatggaagtggtacgttccgtagctccggatttaatcctgatggatatgaacttcactctttctacaacgggtgaggagggtttgaccctactcaaacaagtaaaaatattccgtcccgaaacaccggtgatattgatgactgcttggggaagtatccaacttgctgtacaaggaatgcaggcgggagcttttgatttcataacgaagccctggaataatgccgccttgttgcaacgcattgaaacggcactccaactttcgggcactccacaggaaccaacgcaggaacagagcgattctttcgaccgcagccacatcatcgggcgtagccagggattgatggatgtgttgaatacgattgctcgcatagcaaagaccaatgcctctgtcctcattacaggggaaagcggaacaggtaaggaattgatagccgaggccattcatatcaacagtcagcgagccaaacactcctttgtgaaagtgaatcttggaggtatttctcaaagcctgttcgaaagtgaaatgttcgggcacaagaagggagcttttaccgatgcttccgcagaccgtatcggacgtttcgaaatggcaaacaaagggacgattttcctggatgaaataggtgatctcgacccttcgtgccaggtgaagttactgcgtgtattgcaggatcagacatttgaagtgctcggcgacagccgtccgcgcaagacggatatccgggtagtatcagccaccaatgccgatttgcgcaaaatggtaggcgaacgtacttttcgtgaagacctcttctatcgtatcaatctgataacagtgaaactgccggccctgcgcgaacgtcgtgaagatattcctttgctggcacgtcattttgccgaccgtcaggcggtaaccaacggattgccccgtacggagttctctgccgatgccctgcaattcttgagccgtttgccctatccggggaatattcgtgaattgaagaacttggtggaacgtaccattctggtaagtggtaaaccgctgcttgatgcttccgattttgatgcgcagtatattcgccacgatgacgcaagagtgaccgaaggcgcagctctggccggtatgactttggatgaaatagaacgccagaccattcttcaggcgttggaccgttacaaaggaaatttgagtcaggtagctacggcattgggtatcagccgtgcagcactctatcgccgtctcgaaaaatataatataacaatgtgatagatttaggcacgtgcctaataatattaagattaaccgttaaccacagataacgtgcgtataaaaggattcttttacatactagtctttctgctgctggcattaggtagtgtattgctgttcctttccagtcaactgaatacaatctttttctacataggggaggggctgatacttttcatcctcatttatctgacctttttctatcgtaagattgtgaagccgttgaatacaatcggaagcggtatggaactgttgcgtgagcaagatttcagtagccgtcttagtcctgtaggccaatatgaggccgatcgtgtggtgaatatcttcaaccgcatgatggaacaactcaagaatgaacgtctccgcctgcgtgaacagaataattttcttgatttgctgattaaagcttctccgatgggagtgattataacttcccttgatgaagacctttcggaattgaatccgatggctctgaaaatgctgggtgttcgtttggaagacgtacaaggcaagaagatgaaagagattgattctccgttagcggtggaattagccaacctcccgaaaggagagaaggtaaccgtccgtctgaacgactcgaatatctaccggtgtactcattcttctttcattgatcgtggatttcaacatcccttctacttggtagaaaccctcaccgacgaagtgatgaaagcggaaaagaaagcatacgagaaagtgattcgcatgattgcccacgaagtgaacaacacgactgccggcattacttccacactggatacggtagaacaagccctttccagcgaagaaggaatggaagacatctgcgacgtgatgcgtgtatgtaccgaccgttgtttctcaatgagccgtttcattacccgctttgccgatgtggtgaaaatccccgaaccgacactttcttctgtcaatctgaatgatttggttttcacctgcaagcggtttatggaaggaatgtgtaatgaccgtcgcattacactccgcatggaaatagacgaaagtctgaaagatgtgatgctggatgccgctttgtttgagcaagtactcgtaaacatcatcaagaatgcagcggaaagcattgagaccgatggggaaataatagtccgcaccctcgctccggccactgttgaagtgatagataacggtctggggatcagcaaagaaacagaagctaaactgttcagtcctttcttctctaccaaaccgaacggacagggaatcggacttatctttattcgcgaagtactgatgcgtcatggatgtacattctctttgcgaacctatgccgacggactgacccgattccgtattactttcccctaattgtgtcaaataagaacatttcttccgtcaaatagacctttttttgtcttgaaatcactcctacctttgccccgctcaattcaataggatttaaggtatgagattaatgaaaaaaggcacattgacgctctttcttttattggctatcagtattccgctttgtgcgcagtatgtggtacaaggggtggtgactgattctctgaccaaagagcctttgccttatgcatctgtacgcttaaaagacacgaccgaaggaactactaccggaagcgacggacgcttttacttcaaaacccatcgctcggaagcagtgcttgtaatctctgtaatcggatataatgactatgtccgcaccattcgccctgccggtaatgcatcctataaagtagcgcttgcgcctaccgaatacgcgcttggtgaagtggtagtcaaacccaaacgtgaacactaccggaagaaagataatcctgccgtagaatttgtccgccgtatgattgaaagccgtgacaactactctccctacgagaaagacttctggcaacgcgaacgttatgaaaagaccacctttgcgttgaataacttcgatgaagagaaacagaaaaaatggctatatcgtaaatttgatttcctgacggaatatgtagatacttctgccgttaccggtaaaccgattctgacggtatcagcccgtgaactgcttgccacagactattaccggaaatctccccgttccgagaagcaatgggtgaaaggacgcaaacaggccggtgtcgatgagtttctctctaaacaagggatgcaggcagccatcaatgaagtctttaaagatgtcgatatctacgaaaacaacatttccctgtttacaaataagtttgtcagtcccttgtcccgtatcggtacaggcttttataaatattacctgatggacacgttgcagattgccggagagccttgtgcagacctcgctttcacaccttttaattccgagtctttcggtttcaacggacacctgtatgtgacgctcgactctacctactttgtcaaacgtgccgtattcaactttcccaaaaagataaacctgaactttgtagactacatgttgctcgaacaggaatttaagcgcgctgaagacggcacacgcctgctcgatcatgaaagtatcactgttgagtttaaactgaccgaaggacaggacggtatttttgcccgccgtgtagcggattacagcaactacacctttacgccgactgccgaagccgacaaagccttcaccaaacccgaacgtattattgaagagacggaagccctgtcgcgtcccgaaacattctgggcggagaatcgtccacaagccgccatctcccagcaggaaaactcggtagaccgcctgatgacacaattacgcagttatccggtatattactggacggaaaaagtgctttccattctctttacgggatatattcccacctccaaagaagcaccacttttctatatcggcccgatgaatgccactatcagcggtaacacattggaaggtccccgtatccgtgccggaggtatgactaccgcctggctcaatccgcacctgtttggcaaaggatatgtggcttacgggtttaaagatgaaagagtgaaaggattagcagaactggaatattctttcaaaaagaagaaagaatacgccaacgaatttcccatccattcattgaaattgcgttacgaatcagatgtgaaccagtatggacaaaattacctgtatacaagcaaagacaatgtgttcctggccttgaaacgtgagaaggacgaccgtatcggctatttccggcaggcggagatgacctataccaatgagttttattccggcttttctttccagttgacagcgcgtacacggaaagatgagtcctcctacctgattccttttttaaagaaagaaggagatacctacaccccggtaaaagatttctctatcagtgccgcagagttgaagttgcgttatgctccgaacgagaaattcttccagacccaatggaaccgttttcccgtatcgttggatgcaccggtgtttaccttgtcgcataccattgccggaaaaggagtgttgggcagcgattacacctacaatcataccgaagccggtattcagaaacgtttctggttttccgcgttcggctatacggacgttatactaaaagcaggtaaagtgtgggataaagtacctttcccgttgcttatcatgcctaatgccaacctttcttataccatccaaccggaatcttactcgttgatgaatgcgatggaatttatgaacgatgagtatttctcgtgggatgttacttatttcctcaacggatggctgttcaaccgggtaccgttgttgaaaaaacttaaatggagggaaatagtttcctgtcgtggattatatggacatttgagcgataaaaacaatccggctttgagcgacggtttgttcgcttttccgatagagaacacacaaacaatgggaaaaacaccttatgtggaggcgggtgtcggtattgaaaacattttcaaggtgttacgtttggactatatctggaggctcacttatcgtgattcgcccgggattgacagatcaggcttgagaataagtctccacatgaccttttaaaagttaaatcctgctaattgcaatgtttatatgacaaataaagactgtattagtaattaattaatcttatttttgcatcaattttagtttaattttaatagaatagaaatgaaacaagaaattaaacccgctactgggcgtcttggcgtactggtagttggagtgggtggtgcggtagctaccacgatgattgtaggtacactagcctctcgcaagggactggcaaaaccgataggatctattacacagttagccacaatgcgcatggagaacaacgaagaaaaactcatcaaggacgttgtgcctttgacgaatttggaagacattgttttcggaggatgggatattttcccggacaacgcatacgaagctgctatgtacgccgaggttttgaaagaaaaagacctgaatggagtaaaagaagagttggaagctatcaaaccgatgccggctgctttcgatcacaactgggcaaaacgtctgaacggtacacacgtgaagaaggctgctacccgttgggaaatggtagaacaacttcgtcaggatatccgcgacttcaaggctgctaacaactgcgaacgcgtagtggtgctttgggctgcaagtactgaaatttacattccgctgtctgacgaacacatgtcactcgctgctttagagaaagcaatgaaggaaaacaacacagaagtgatttctccgagtatgtgttacgcgtatgctgctattgcagaagacgctccgttcgtaatgggtgctcctaacttgtgtgtggatactcctgctatgtgggaattctctaaacaaaagaatgtacctatctccggtaaagactttaagagtggtcagacattgatgaaaaccgtattggctccgatgttcaaaacccgtatgctgggtgtgaacggttggttctctaccaatatcctcggtaaccgcgacggtgaagtgctcgatgatccggacaacttcaagacaaaagaagtcagcaagctgtctgtaatcgacactatcttcgaaccagaaaaatatcctgatctctacggagatgtttatcataaagtacgtatcaactactatcctccccgcaaagacaacaaagaagcatgggacaacatcgacatcttcggatggatgggctacccgatggaaatcaaggtgaacttcctttgccgcgactctatccttgcagctcctatcgctcttgaccttgtgttgttcagcgacttggcaatgcgtgcaggcatgtgtggcatccagacttggttgtcattcttctgcaagagcccgatgcacgatttcgaacatcagcccgaacacgacttgtttacacaatggagaatggtaaaacagacattgcgtaacatgattggtgaaaaagaacctgattacttagcttaatcagtaaccccaaataataagttgagattgagatttaccatcctataaagactggtggatgctcaacctcaacttttacttttttattgtacaaattccccattcgtttgggggactcgtgacacaaccgactcgtagtttgtaattagtaattagtaataaatgaagcgtcctccctttctacctgtttttataggcacgggctttggctccggtttttctccttttgctcccggcacggctggggcgttactggcttctatcatttggattgcactttattttctccttcctttctcttgggtattatggctgactgccgctttggtgattgtatttacattcgccggcatttgggctgccgataagctggagacttattggggagaagatccttcgcgtgtggtagt

SEQ ID NO: 8137 - DNA, 20943 bp, Unknown
  gut microbiota DNA sequence
caggcggcgatgtgaatctatcagattacgaacgcgtgccaacagcaattgcgaactgaagggcttggagatataagaatccgcacctccgtcatacccctgaatccgttgttcatccaaagaacaagctgtcaataggatgacaggaatatggcaggtttgcagttcgcttttcagccgacgacaacactctattccatcaataccgggcatcatcacatcagagattatcaagtccgggacatatttcattgctttgcggataccctccgaaccgtctgctgcttcaattacagtataatcggtatggagtaatccgcgtacatacgaacggatatctgcattatcatcaattaccaaaacggaaggcttggaagaatcatagcctttttccagttcctcttcttcggcagctaaagttccattcaggttggaagaggcgggagatccgagagaagcaggatttaaaggaactgcagagattgatgactttagagaatcttcggccagaatagtttcacaagtctgtaccggtaaatcaacggtaaagacagtgccctgcttttcatcactttccacagaaattgtacctttatgcaattcaacgaaagctttgaccaatgcaagtccgattcccgaaccggcatggtgcatgtctattttataaaaacgatcgaaaatgctccgaatatgttcggcggaaatcattgaaccggtattggcaacagtaaaacgaatccagcgagtatcctctttcgttaaggaagataaacgaaccgttatctttccattttccggtgtgaacttgaacgcgttggaaagaagattaaaataaatacgttccaacttttccatatccgccaatgtatggtaatccgtatccggcatattatcaaaaaagaaatgaatgtgtttcttccgggccgctgcaaggaatgattcgttccagccctcaaaagaggaaagaacatctacctgaacaggtgtatattccatcttaccgttctcgtatttacggaaatccagaatctgattgacaagacgtaagaggatattcacgtttcgttgaatcagcatcaacattcgatgctgatctccacttagtgtatgatcggccaataaatgttctaccggatcggcaaccaatgtcagcggagtacggaaatcgtgagatatatttgtgaagaaaaccagtttggcatgcgttgcctcttccagttgatgagaaagctggatgagctgatcccgttgctcttccagtttgtcccgctgttcttctaattggtcgcgttgttcctctaacttgtcccgttgctcttccaactgtttcttctgctcggaaagttccttattcagacgatttttagcacggagagatttatagactaccaataataaacctgccaccaatagaagaataaccaaaccaccatacatcaccacctgctgtgtagcaacccgagacagatatccgccaatacgtccgttcaatgtttcaatcttctgatccagttccgagatatgagttgtctgaagttgcatgacatgcgcatttgtacggtcgaccaccgcagtgttcatgaccgtttcccggggataaggctttttctcaaggatattcattgccagttgcatcactttgtcgccattggtcggataaataaaagtagcattcaacacactgtcgagcaccatttccaatccgttgcctttgccggggagagcatcgataccgacaaaaatcatttccttctcccgtcccactttctttgcagcctgataagctcccggagcgatacggtcattatgcgcatacacggcgtctatcttcggatgccgacggagcatactatccatttccacttccgccggttcacgctcccacgcagcatccgctttatcaatcagtttgatatccggaaagttactgatagcagccataaatccttgatggcgttccatggcaggagttgagccacccagtccagtaagttccaccacattcccttttcctttcaggcttgacgcaatataattgcctaccgcacgtcctatttcataattgtcggcaccgatataggcagtatatttatcagaaagaatcttccggtctaccaggatgacaggtattcccttttgataggcttcctctacaatcggagtcatgggggccgcttcgttggcagaaataatcaataagtcaaccccttcatctataaaataatgaacgtcctccgcctgtttgcgattatcatccgcagccgaccggatttcaaccgataccccatcgtagaacattgcttcgcgaagaatttcatcattcatcttatgccgccaggagtcatcactacattgcgccaccccgatacggaagcggtgtgtgtcctgccgacaagccgtcatgccaagaagacagagcaagactgctatccactttgtatatcccatcattctcatttttttcgtatttctttctatgacccaaatggacgattgagaacaaaaataagaaataaaactgtgagtatgctatctatcacccaattattctcatcattaccctccaaagaaatgcaaaacagttcccaatattcaaccggaaactattaacaaaagtataaagcgtaagacaaacactcaataaatgttataaaacatctctttttatttggattatttgcagatttaacagaagtccgtatctttgcaatgtgtttttcatagtattagatttaaggttaacaaaggttggagcaaggcgttgctcctttttttatgtctgtacggctacgccttgcactctgtataacacctacaacctatatgacagttgataagacctagttttcatcccattccctttccagtttgccatcaatggtataaagtttccaacgtcctacccggtgaccgttcttatattctccacattcgcggagcttgttattcttcacataacgagattcaaaaggaccgttttgccgtccgttgacgtatgtagaagtttcccaataatcaaagcgattgtccaccactaactggcgtgcttttccgtgcagtctgccaaactgataggttgcctcgtacttcaattcgccatttttcaagtcatattcacgatagattccgtccttgcggtcatttttcagataatattctttggtacgcatccctgtctcaccactgtatgaaacgtgcaggccttcttcttttccattcagataagtttcaattacaatggtatcgccactctctgcaatctctgtccaacgaccgttcttctgcccattcttgtaactacccaatacatgaggagctccaaaagtaaagatggacgaatattctccatccttcaacccttcgttattataataaaccgtttcgtatagttcataagtacccttcatgaaagtatattgtttccctacttgtttaccatccttataattatggtccatccgcagagttccgtcataatcatacgacaaatgttttccatcctccttgcccatccggtagtttttctcactttctatttttccgtcagtaaagaacgttttgctcgtaccgttcaactttccttccttataagacttttcttctttcagtttaccgtcaaacttagaatagattttaaataagccattcttccgtccatctttgtagacgccttcatttatcagaatgttatccaaatgctcttcatatttgccatcataaaaaccatctttaaaagaggccagtatatacgcagagtgataaccgtcaatgatacgatgttcgccgttgagcggtttttccgtcatcaagtctcggtacaagaatcttccgtcgcctacattaacgacagatacctgatcgattttaaactctttttgtgctaatgagggaagggctatgcatagaagcaaaaatacattccagcatttcgagcggaataaaatagaaacgtgtttcataatgtgacattctctttttagttattatcttgtgaatcgtgcaaagatatacaattagctaaaaatccaacaataaaaagagaagaaaagaggtgatatccgaaaagatttgaattaaaaaaatcctccttactacaacataccgtagtaagaaggattttcacttttggattcttttcgtccctacatttacatcaatagagaaattacatcagcctgtctttcaaaacctgcggaagttcgggcattgcaccgctttgcgtgcagacataagcagaaacttcaacggcaagtttgtgagcttctggtaccggttttccattgagaatggaagcacagaaagcagccgtaaaggaatcacctgcccccaccgtatcggcaaccggaactctcggcgtctcctggaaagagacaacacccggggtaaacacataactgccattaattccgcaagtcagaatcaacatcttcaggttgtattttgccaacagaatccaacatttatcctgtaagtcgatgccgggatagccaaacatacggctgatggtcaccagttcttcgtcgtttatcttcagaatgttgcaacggcggaaagattcgcgcaatacctctttggtgtagaagtcctggcggagattaatatcaaagattttcagttgtccgtctatgtcgggcatcgtatccagaaaacggttgatagtggcacggctcacttcattacgttgagccagggaaccgaagcaaacggcgcgcgtactcaatgccaaacgtttcagttcatccgtaaaaggtatgttatcccatgccacgccttctttgatttcgtaacaaggcactccctcgttatccagtgtcacctgtaccgtaccggtaggataatccacttgttcaatctgcgttttcagtttcttctcgttgaatacgttcagaatctcgtctcccaactcatccttgcctacggcactcaccacgcgactgtcaaaaccaaactgtgatacatgataggcaaagtttgccggagcaccacctattttctttccttcgggcaacacatcccaaagtgcctcgcccattcctacgattatattattcatgatctacggattttattgtttccaaagttataaaattattttttaatacggaacgtatagaacaagagataaagcacgcccactgtcattacggctactgccccactctgtcccatggcatcggatgctactcccatagccaacggaaataccgtgccgccgaacagtcccataatcatcagaccggaaacttcatttttcttacccggcagataaagcaatgcctgcgagaagactacggagaacacattggagttgccgaaaccaatcagagcgatgcatacataaatcattgtcttgtcatggaatataaacaagcctgccatcgctatcagcatcatcacaacgctaatgccgaagaaagacttcggtgacatcttacgtaaaatgaaagaaccgaggaagcagcctgccgtacggaagatgaaataaaggcttgttgcaaaagccgcatcatcaaggtccatgccgagacgttccatcaaaatcttgggggcagtggtgtttgtacccacatcaattccaacgtgacacatgataccgatgaaagaaagcaggataaacggtttgccaagcaaagcgagacattgtccgaaagtagacggtttgccttcttctttttcctctttaatctgtgtgacattgagcaacaggatagcaataacggctacaatcatgtaaatcgggaacaggatgcgccagcctaaatcgaaagtcggaatggcttgtgtcgctccccacatggcaatataaggagcaaggaaagaggcaatggctttcacaaactggccgaaagtcaggctacttgccaaacggtcgccacgtacgatgttagaaagcaacggattcagggaagtctgcatcaacgcgtttccgatgcccagaagggagaaagaaatcagcatcagcatataactgtctccgaaaaccggtaataacaaagaagcaaaagtcacaagcaaactaagcaatacggttttcttctgaccgatgcggctcatcaacatgcctgtgggcacggagaagatgaggaaccagaagaataccagtgaagggaagatattcgcctgcgagtccgacaaaccgaggtctgcctttacataattggaggcaatgcctaccaggtcaacaaatcccatggcgaagaagcaaagcatcaccgggattagtttggaaagggaagagtttttactgttttccattgtttttttttatctaaatatgttatcatcattagtttatatcataaatctaggcacggattaagcggattacacggcttctcgaatgatggctgtcagatagcaaccgtgtaatccgcgtaatccgtgcctaataatataaaattatattttgcatgagtacttattctatttatatcatgcagttatatgattcaatttacaatctgctgttagtcgtgtgggtactaccgttagttatctgttcgtcgcctatatgaattacgctctccttattgcatcaatacctcaagcctacggtatctttatcttaaacctacggcatagtaaccttgaagctacggtattactaacttaccacggccgtggtaggaattcgtcatggctgtgggaagatctttccacggccatggtaggaactcgtcacggccgtgacgaatcagtaataccgtaggtttaacacaagtatatccctactatccacctactatcccttaaggaaagacgtattcatccatagggaaacatacaaagagcgcatagggcgaacaagagatatttatggcttcaacttatggaccacaaacgaatctactttataagctcctcctttactgtaaaaatcgatatgattgtaaggttccgaagggaatacctgattggtcatcacaaaacgtccaccatctccaaaggcttccacactggatttatccacaaacagacggagtttcaatgcctctttgccgccttgttcctcgtttccaccttgttcaattgctgtccaggtcaacatcgggaaattctcattgaagctgacctctccgctcttgcgacgatccatcgagaatttcttttctttcatgtcatactgcatatccacttcttcgcctttgtcattgtagagacggaagccgattacgtctgcacgttgattttcgattgtcaattctatttcgtatgcaccgtcattgccgggaatcatttctttaattgtgcgtgttccgtttactttgaacgagcgtttcttggaagcatcacgcaaagccagcagttcgggagagggagctgattggaggtaagtctcaccatctacggtaaacaggctcaagtcgcggggaacggagttcgggctacggtattgggaggtaggaacatcgttggcgtattgccagttgctcatccatgcgatagcgatgcggcggttgtcgggagcatcactccaagtcacggtggcataatggtcttttccccagtccatccatttggttttggagggtgattcgtttacaaactcttttccgttgaaggagcctacaaaatattgagtagcacttcctccgaaaggacctccgggattcaaattacaaagcagcacccatttcttatcattggtaccttctactggaagttcaaacaaatcgggacattcccaaacaccaccatgtgcaccttgcccttcaccgaaacgactttcaaaggtccaatctttcagattaggagaagagaatatctgcatctcctgccctactgctaataccatgatccagcgtttggtgctttcataccaaaatactttcgggtcgcggaagtcacgcgcttcggacgtcagtaccggattattctcatatttggtgaaagtacgtccgttgtcagtactgtaagcaatgctttgtacttgtcggtcactgttttgtgtatagatggcgataatggcacctgcaccaaaaccagctgtattatcaaaatcgacaactgccgagccactgaaaattgtccccaatgcatcgggagcaatagctacaggaagatgtttccagtttacaagatcttggctgatagcatgtccccaactcatatttccccatttggaaccataaggattgtattgatagaaaaggtggtattcaccgtctttatataccattccattaggatcattcatccacccataaagaggtgagaaatgataagtaggacggaacttttcacggttgcccgtatcgaacgtgtcggacaatttcatttccttgcaacaaacagcagaaagtttcccccgtataggatcattcgagcctaatttaaatttcaacagtatgtttttaccagcataagccgaaagatccagcggaacaaaatagtccactctgttcactgccagacgaacatccgcaacattcacctctttattattaacgatcatgctgacacgtacatcaggcattacctcctctacaggtaaaagcaaataacgttgatttgtatttatctgtaccaggcaatgtccttcacccaaatcttttattaataaggaagaagtatcggccgaagcatccaaaaatgagaaaatcatcataaccagaatagtcaaaaaggtctgtacttgtttaaacgagaataatacattcatgtcagatggtattagagttaattattaatattcaatgtcttctatttgtcaccatgcaaagataggtgcaacggatagttacacctatcacttttgtttcaaaagataaaaaaaatgttaccgatctatttcttagcgcttagataatgtaatatattcttcgtcatgagcacaatattatcttgataaacgtttatattactattctgattccattcgtaagcagccagaccgagagctatacatgtaccttgatattccgctgtcggagcaaactctaccattccggcacaacaataatccgttacgtgtccccaagtcgccaaaacggtagctttattttcttcttcaaacgctttcaccacatttcctgcattgggataaagagcggggaagccataagaattcaagtcccacatacagttatggtcttcacgccgtccaggcccgatcaacgggaatgtttcatgggggaattgggaagaagtaaccataccagcaaaaaccggatgagcccgatgatcatactccattccgatattggcattaattgtccaaatgtctgccccatctcctccttcaccatctgcaaatattcctggtagccgttcggtacgtccaaatggtacaaccaattgagtcgcatgattgcttaagaacagatttccgccattcttataataagtagccaacgcggcaattgcatcagcagacaaaggtaatttatcccatcctgctccaatgccgacacggtctatatgtacccaaataacatcataagcagaaaggtcctcatcagtcaatgtagcggaagtaatgactttaccatttacaaattgcttcttgaaccacgcataggaagctttttcatcatcatcttctatctcttcgggagtatcatacgttatcacgtaagctgcatttgtcaaatcctgcgcttcggaaggtttcacctttatattttcttccgtcactccacaatctatcacttcggacgactcgctgatataaaatacctgattgctgctcgtattctctatcgtgaaacttgcgaaacgattattttcaccttccgcagcatttacagtcacagggttttctatattgtcactccaagacacctgaatggtgttcgatgtgaaatgattatattcgcctttcacatgaatcacgccatagtctgcttctttgccattgagttgattttcgcttctgtttacagtgaacaagttatcgcttatcagattgttttgtccgcttatatcaaagaaagtcattttgtttcctgtaaattcattatccgagatattcacccggttacaacctataaaattagcacagcgatcatcatttgccgttagtttgttgtgagaaaatatcagattactttctccggaaatacgtgccgttacaccgccctgtgttgagccgaatacagaattggttaccatattctgtatgccaccattcatatcaatgccattcactacatcggttgcatctatccgagctaatgttatggcgtcacacccttggagtttaatgccctggtacatattttccattttaatattgaagaagtgcaggcggtcattatcatgttctacataaattccggttccctgatggtcccccttccccacaagcgtaagtccgtttacctccacaccgctaatgcggtttttgcgtccgtctatatcggcaacaggggcaacgtgtaacgcatattcggcatttccaagcaccagacgactttcccgcgtatcggcagcagcagtaaccgcttcatcgttcacacctttcaatgttacgaaattacgcgtaagttgaatgggactatccaaacgaaaagtaccttcgggaataagtatcgttcctccctcgggcggaagatcggctataatagcatttataagatcagcacaatcagtggacccatcggttggaagtccgaattgggttatgtctataatcttctgaccgttacattcatcacagagagtataggtatcgtcattgctgcaagatgtgcccaacatcaggagcattccgcttattaagaatttatttatcttcatggtgttactatattaataatggtgtatgttgaggaggttattctactatgctcaccttatcagatgatacacaattagaaacttcagttcctgagttcaccaggaatacccgataactctccaaattatctataaagcagtttttgaacacatttcctgttccttgagtagcatttacggccacagcatcagtataagcccattcacatgacaaactgttggatacaaacatattgttgttaccctttacattgattatgccaaagtcatcaccatggtcgagcatctgattttgaagagctccggtaagccaaaaaatattcttatttacccgattatcattaccactcaacacgagaataccattgtagtagcttttaaaattattaccttcaacaatacagttattacaaccatcaagcactaaattttcacgcccgtcaggatagacctgattattaacaaacgaaagtttgttcactccctgcgccttacaggttatgccagtgggctgagcacccagttggcaattcttgatattaatattctcgccaccaatcagcaccatactattgggaagctcacatacccagcaattgattatctgcatgtttttcgcttgttctatcttgacgcctgtatgcaaatttataccaataatattagaaagcattccatcatcactcgtaccggcaaagtgtatgccgatgttcttagcttccgtaccaccggacaccatcaggttcataatctttacacccttcacgcctgtctctacttttatagcagcttcggcattacgcgccaccaatttacttccgccaccagggcccaacaactcatttattccattcacatcaatattgctacgcataccgggattcaaccctttgaatgtcacattgtgcttattaatcacaatgggagcgtcgagcacaaaatcaccttcaggaataaccactactcccccttcggaaggcaaggaagcaatagcactattaatggctttcgaacaatccgtctttccatcgccaacagctccgaatgtggtaacatcgccttcgatttcagtatgagtgccataacacaacagattatcatcactatcgcaagccgtgaacaaacacagacagaaagtgctaagcaaatatctttttattttcatcatatttatatttaaggaatttatactagttaaacttaccatatccgggattctgcacataattgccttcagagaagttatattgtgcattgggaataggcaaatattcatctctaccacgaacaaagcgagcaccacgataataaacgcgcttattctgctccacactaatgtaactgttcatggtttccgcagcaatcccccaacgtaccaagtcgaagaaacggtcaccttccatagcaaactccatacggcgttcccaacgtaatgccttgcgggcaaagtcctgactccagccctcagcaggatattcgcctatcagataattagctgcatcctgttcggaatgtttaaagtcttttacataaggactatttttggcacgcagacgaatacggttaataattttgcgagcctcttccagtccggtagcttcgccaatctctatcaaggcttcagccttccataacaatacatcagcatagcggattatctgccagttgagatgagaagctccccaaggccaaccttggaacatatcttcactttcaggcgagatgtagaagcgctttgtacaattaaagccatattcaccgctgttacgtatccagtttgctttacaaggctcaacggtatatgttttccaagtgataccaggacgaccggtaacgaaatccaaacgaggatccacagttgcatcaatgttggtgagctcacttccttcgtatattccatagtcatcggcgttgaaagtatcaaacaaaggcaatccatagttatctgtcttataggcattgatcaagttctgactgggtaagaaaaatccgtcaccaccataaggacctttaggagcattcaacagattactccagtttatattcccggcaccatcggtttcatcatccatcgaatattgtacggcaaacacagactctaccccattttcatattccaattgatcaagtttctgaaaatcgttcaaaagagtatatgcctttccttgcgcacctactttgtcgcaaagagtcaccacttcagctaacaattgtttatcaatagcaaccacttggttattatcatcttgtcggtaagcctgataaagtctagctttggcagcataagcataagcaatgttcttagtgacacgccctacttgagattgagtatcaggcaaatcgttagcagcatcaagaaattcttgtgctattttacccagaagttcttcacgggtaaactgattgttgggaatgtacttatagtcatcattttccacattctcatcaaaataaggtacttgcttgaaaaggcgaaccagttcaaagaagaagtgtgcacgaatcactttcatttcggctttacgacttttaatcatcggcaaagcgttctcatcaagcgtattcattacccgcaatgcgctgttacaacgttgcaagcaacaataaagttgaaaccatttttcgtcggcattgccccatgtagcatctattttaaaggtttcaagcagcgtacaaaagtctccatcatttacaccgccaccacctttgtaggcattatccgaacgtacttcaccatacgtccaattggtcatcggcacccagtgcatatcacgattaggacctttcaatcctgcataagctgaagtaaccaaaagctctacaccatcggccgatgataacaaatcgtcattgagtgtaccctgaggtttaatatctagaaaacgactctcatcgcaacttgccaatagtgccatcacacctactgcaaagatatatttcaatttcataatgttctgtatttaggataaaaattaaaaaccaagtgatagaccgaatgtataggtacgaggttggggatatggatagcccaatccttccgggtcggcaccagtataattagtcagcgtaaaaacgttctgtgcttgcagatacaaacgcaaattggaaagatgcgctttcttaatccacttatccgggaaagtataacccacagttagagttttcaacttcacataagaaccatcttcaataaagaaagtggaactgcgtgtttctacattattatcaaccacagtcaatgcagggatatcacaattataaactccggtttgctcataagcattccaagcatgcattgcatccatcaaacgtacagagtgattacctgtccaaccttgaaaaaggtcggtataaaacttggaattgttccatgcatcgcgaatcataccattgaagaatacagaaaggtcaaatcctttgtaagatgcaccgatgttcaaaccaccaataaatctaggttggtcactcccttgccaatccatatcagcagtattgataatgttatcaccgttaaggtctttgtagcgaatacgccctacgccgggagcaccaatctgtacatcatatttgcttaggtattcatatacctcctgttttgttttgaatacaccatcagctttataggacatccatgatccgtaaggttgacctacaatagttttgtccacaccattaccacctccccaagtatatttgattacatccggaagttcggtaatttcatttttataataggaaaggttgaacgaaatatcatacttgaaatcctttatttcatctcgccaagtaaaggttgcttccacaccgctattatccatactggcagcattgtaccatttatatccaccttcaccgatcactcctatataaggtttctggattaacataccagtagtctttttttgaaaataatccagtgtcagtcccaaacggttgtcaaagaaagcagcatcaataccaaagttcagttgtttggtctcttcccatttcaggtcgttgttacccgaacggtctttctgtactccgggcaataccgttgtaccatccccattgaaattgtatgagccattggacatgttagtgtaatagaggttgtaagtagcattgttatcaatctgatcattaccatttatcccccacgatgcacgcaatttaagatctgaaagccagttttgcgtacattccataaatttttcacgcgatactctccaaccggcagatactgaaggaaagatagcagaattattccctttaccgaaacgtgaagaagcatcacgacgcactgttcctgatataaggtatttatcatcaaacgcatagttcaccttaccaaagtaagagaccatagcataggtagaagcattgttactcacactttttccttcagttacagtgtctaagtaacgataatcgagatcttctatcaccaatccgcgaccatatccctgtaaatgttcaccattctctttcttagcttcagttcctatcactgcactgatattgttcttcccaaggtctatgctataattggcagtgttcgaccatacccattgcacgctattatcttgtcgtacggtcagttcatttacatctaccttacgatcggcttcactccatttggggacgaaagttgagttgaaaccggtagtatagttcaaaccaaattgactcttcaacactagatttttaatgggttccacttccaaataaacattgccaaagatacgccaacttttgtgacgattattggcttcattgtctgtcaagcgaatggcattcggcttatcccccaatatatccacatagccaccggcataccctccattttcatcatacacaggaatggccggatgctgggcaataaccaattcttctataccggcaggattaagatgctccaaccagtgattcaccgaaatactttcacccacacgcactttaccatctacaaagcgaaaattagaggctaaacgcgaattaaaacgttcgtagtctgtattacggcaaagaccatcctgattcatataatttaaggtaagagccacattcccatccttaaaccctttagaaagagaaagattataattttgcattaaagccgtaccaaatatttcctttgcccaatcagtgttgcccgactttattttcactccattctggtcaaaataatattcttgcagttgggccttttctccatttccatatactacactattgggattggttccaaaagtatttttataagcctgccaatacacatcaccccattggtaagcgtcaagcatatcaataccaccagtaaaagtctgggcagtgagcgacatatcaaaacttacttttacatcgccttccttagcacgttttgtggtgataataatgacaccattggcagcttgcgcaccataaatggcagccgaagctgcatctttcaacacctgaatggattcaacatcattggatgagataatagaagccacattatcatgtgtctgaacaccgtctattacataaagaggagaagaattgttgatggtagtaataccacgtaacttagtatctgtgttaccacctccgggtttaccatcagttgttacgttcataccggctacacgtccctgcaaacctgacatcacattaccagtaggtatgtcagccacctctttcatcttcactacagctaccgaacctgtcagactggctttcttttcagccatataacctgtcacaaccacttcgtcaatcatcttagcatcctcttccatcactatcttcaatgaaggtttagcggcaataattacttctttatatcctatataagaaattgccaataatgcattcgttggtacactaagagtaaagttaccatccaaatctgtgatagttccagttgatttagaatcattttgcactacggaagcaccaataattggttgaccatcagtctttgaagtaacgtttcctttcactgttatgttttgcccccaaaggactgacatgaaagtaaacaggaaacaaacgctacaaagaagttttttgttcttcataatactaagcattagtttgatgttattaaattaaaagtacgaattttactaaatcgatgatgcaaattacggttgatttatatcaaacgactgaaaaaaatgtttcaaaggctataacatttgttgcatagaacgctattttatagggttttatacattattcttcgaaatagaagaattatagaatatctattctccagtaagtatggaaaatattacctttgcaggtgataagaacttaaaaaatggagttaactactggttgtagtcaactgaaaaaatcaacgatatgaaaacaatctccaacaaacaactcacgattcaagtatctcctcacggagctgaactctgcagcatcgtcgccaatggaaaagaatatctgtggcaagccgatcctgctttttggaagcgacactctcctgtcctattcccgattgtagggagcgtatgggaaaatgagtatcggaatgaagggattccttatacgcttactcaacatggttttgcccgtgacatggaatttactcttatttctgaaaaagaggatgaagtacgttaccgccttgtcagcaatgaagaaactttgcataaataccctttttcattctgtctggaaataggctatcgcatccagggaaagaaaattgaggttatgtgggaagtaaagaatagcggtgaaaaggatatgtattttcagattggggcacatccagctttctattggccggagttcgatgcaagcaattctgaaagagggttcttcggatttgacaaggaaaacggtttgaaatatattctcatttcagaaaagggatgcgctgatccttccacagaatattctttagagttgacagacggattattaccactggacacgcatacttttgataaagatgctttgatactggaaaatgaacaggtccgtaaagttaccttatataataaagagaaacaggcttatcttagtttacattttaacgctccggtagtcggtctttggtctccacctgcaaagaatgctcctttcgtctgcatcgaaccttggtacggacgttgcgaccgcgcacattatactggtgaatataaagataaggactggatgcagcacttacaaccggaagagatattccaaggaggatatacaattgaaattgatgaataattgatgaataaaaagtagctgccggatttcacatctgacagctactaaatacctaattctaatctacaaaacctaacttataaatctaacctatgaatccttaaaaagcaatcaatacttgttgcttttactgaatctatgcaaacatctattgtgtaacttctatttctattataaacccaaccgatacgcattgaatgaatctacttgaaatgaacctcctttgctataaaaacacatacggttgtatggttccgatggaaagataagattagtcattgctacctttcctccattcaggaatatttctacagaacatttatcaacaaagacatccaacgtatatttattctctttctttatcggtgcccaggtagctaatgcgaaatcatctatataattgatggaagtcgtctttctgcggtcgtgaacctctatttcatgaggtacactcttctttccgaaatccacgataccacttttcgtccggtccataaccaatctcttttccggaagattgaagtagatatccaccttttcccctttatcattaaagaggctgaatcccattatctccgcttctccggcggtaatttccaatgccagttcataagcaccatcattatcagccaataaagaatcaatatgataatcattggcaaccgtaaatgccggaatctctttcttttcttttcgcagagtctttatctccagtaccggagctgctgaaagataaatttcaccgtcttgtgtataaaggcttaactcacgcggcaaagcgttagcactacgaaattgctttgtcgggacaatattacaatattgccagttactcatccaaggaacagcaatcgtccgttctccagtgtttgagaaacaaacggtagcatagtgatctttgccccaatccaaccatttcgtgacattcgactgactatcacaactgaatttctttccatcaaagtctcctgtaaagtattgagtggcacttcctccaaaataacatcctggattgacgttcactatcaatgcccatttcttacggttcagatctccatctaccggaagttccaccatgtccggacattcaaattgacaaggttgcactccgtatccttctccgaagctgctcatatagttccagtccttcagattcttagagtcatagaaacgcatttctttatcggcggagacaatcatcacccatttatcttccggttcataccggaacactttcgggtcacggaaatctctcaaaccatccgcagggcacaagatggggttcttctcgtatttagtaaatgtccgtccattatccttgctaaaagcaagacattggatctgcccgtttttgtcactggcagaagtataaaaaaccaggatgctccctactccataccccgctacattctcctgatcgacaatagagctgccggaaaagatatgtcccaatgtatcacgggcaatagctggggccaaatgttcccaatgtacaaggtccttactgacagaatgtccccaatgcatatttccccatttagaaccgtaagggttatattgaaaatacaaatgatattctccatctttatacaccaatccgttggcatcattcatccagccatagagaggagtatgatggtaaacagggcggaacttttccgtattggctgtatcaaaagtatcagatagcttgatttctttccagcaaagtgcatcctttgatttattacgaacacggacggtggcagccttcgctccggcaggcaaagcaaagggaacaaaataatccacttgagtctgtgccagacgaatatccatatcggtatccgcagcctctccggtatcaagcagaacctgactttccgcagcttcctcttctataggaagcaatatataattagtcggattggtgatatggatgacagtcaggctatcgcttttctgttccaaggtcaacttgctttttgttgtgtggcaataagtcagtccgtaagagactgctaacgcaagtattgcacctttacatagtttcatccaagggtttgttttcatggcaacaaagtattcctagtttatacaagcttttaatctaaaagacgaaggcaaagatagggggtatcttcgccttcgtctataaactttgtttcaaagggtatcaaatttgatacaaatcctaagaattttcttttatcatccaagaataaagacctgtaacctctttgttttcctgaatttatttttctacttttgaagccaatctttattcttctacttatgccagcaaatagaaatgccttaatccgttataaaacaattgataactgtctgcgtaatccttatcgacgctggacgttggaagatttggtagatgcttgctcggatgctctttatgaatacgaaggcatcgataaaggcataagcaaacgtacggtacagatggatatacagataatgcgcagcgagaaactgggttataacgctccgattgtggtgtacgaaaataaatactataaatacgaagatccggaatacagcattacacaaactccgctgaacgaacaagacctgaaaacgatgtcggaagcagtggaagtgttgaggcagtttaaaggcttctcctattttacggaaatgagcgatattatcaaccgcctggaagatcacgttgcttctgcccggatgaaaaccactcctgtcattgactttgaaaagaatgaatcgttgaaaggactggattatctggatacgatctatcacgcgattgtaaacgagcatccgatacagctcaaatatcgttcattcaaggcacgttcggccaacagctttattttttatccttatctattaaaagagtatcgtaaccgatggttcgtttatggtgtcagaggaaacggacggatcttgcaaaatttagctttggacagaatacaatcattggaagttctgccacaagaacattacataaaaaatacgttcttcgatccgaacacgttcttc

SEQ ID NO: 8138 - DNA, 29755 bp, Unknown
  gut microbiota DNA sequence
cggacatcgccagaatgaagaaatcattcctcgacaagtaaattctaatataataattaggcaaaagagggtgtatcctgcaggggatattccctcttttatctattatagtacgataaaaacaaaactattttagagtaaatcaagaagaaatctttcttttttcgtatttttgtcccaatatgcacgtttaatccaagtagataacgaacattagcaaaaaaagaatgaaagtaattgatttaatacatagcaacaagaaaactgctttttctttcgagatacttccaccgctgaaaggaacgggaatagaaaagttatatcaaacaatcgatacgcttcgggaatttgacccgaaatatatcaatatcactactcaccgcagcgaatatgtgtataaagacctcggtaacggattgtttcagagaaaccgcttgagaaggcgtccaggaacggttgccgtggctgccgccatccagaacaaatacaatattacggtagtcccgcatattttgtgcagcggattcacccgtgaagaaaccgagtatgtgttgctcgacctgcaatttctgaatatcacggaattactggtgttgcgtggtgacaaagcgaaacatgagtcggtatttacaccggaaggtgacggttatcatcatgctattgagttgcaggaacaaatcaataatttcaataaaggtatttttgtggacggttcggagatgaaagtcagcagtacgccgttttcatacggggtggcttgttatccggagaagcacgaagaagcgcctaatatcgagactgacctttactggctgaagaaaaaagtggagaacggggcggaatatgctgtgacgcagttgttctacgataacaggaaatattttgaatttgtggagcaggccaaggcggcaggtatcaatatacctatcattccgggaatcaagccgttcaagaagctgtctcaattaagcatgattccaaagactttcaaagtggacttgccggaagacttggtgaaagaggctttgaaatgcaagaatgacgcggaagccgagcaggtaggtatcgaatggtgtgtagcccagtgcaaggagttgatggctcacggagtgccgagtattcatttctactctatcggagcagtagacagtatcaaagaagtagccaaaatcatttattgatatgtttttcagagacgtaatcggacaggaagaaatcaagcaacggctcattcaggaagtgaatgaggggcgtattccacatgcccagcttatttgcggcccggaaggggtcgggaaaatgccgttggctattgcatacgcacgttacatcagttgcactaatcggggggagactgatgcctgcggaacgtgtccgtcctgcgtgaaattcaataaactggtgcatcccgacgtacatttcgtattccctatcgtgaaaagcgcaaaggggaaaaaggaagtatgcgatgattatatagccgactggcgaccgtttgttatcaatcatccttactttaatctcaatcactggttgggagagatggatgcggagaactcacaagcattgatctatgccaaagagagtgacgagattctgaaaaagcttagtttgaaatccagtgaagggggatttaagattacgattgtatggctgccggaaaaaatgcatccggtgtgtgccaacaaactgctgaagttgcttgaggaaccgcccgaaaaaacggttttcttattggtatcggaagcgccggacatgattctgcccactatcctaagccgtacccagcgcatgaatgtgcggaagattgatgaagccagcatcgaccgggtattacagactaaatataacattttgcctgccgacagtatttccattgcccatctggcaaatgggaattttatcaaggcactcgaaacaattcatctgaatgaagagaaccagttgttttttgacttgtttgtcagcctgatgcggttgtcttaccaacggaaaatcagggagatgaaaatgtggagcgagcaagtggcgggcatgggacgtgaacgtcagaagaacttcctggaatattgccagcgcatgattcgggagaattttatcttcaacctgcaccagcgcaatttgacgtatatgacgattaatgaacagaattttgcaacccgctttgcgccttttgtcaacgaacggaatgtgatgggtatcatggacgaattaagcgaagcgcaactacatatagaacagaatgtaaatgctaaaatggtattcttcgacttctcgctgaagatgattgtactgttgaagcaataataaatatataaacttatggaatataaacttcataatggaagcggtggcctttgctgcaaaggatgctcccgacaagataaaaagctgaacacctacgattggctggcggacattccgggcaatgcggaagagagtgacatggtggaagtgcaattcaaaaatacccggaagggatattttcggaacagcaacaagattaaactggaaaaaggagatgtagttgccgttgaagcggctcccggccatgacatcggcgtggttacattgaccggccggctcgttcccctgcaaatgaagaaagcaaacttcaaagcagatacggaaatcaagcgtgtctatcggaaagctaagccggtagatatggaaaagttcaacgaagccaaagccaaagaacacgctacgatgattcgtgcgcgtcagattgcgttgaatctcaatctggatatgaaaatcggtgatgtggagtatcagggagatggcaacaaagctattttctactatatcgccgatgagcgggtagacttccggcaactgattaaagtattggccgaagcattccgcgtacgtatcgaaatgaaacaaatcggtgcccgtcaggaagcaggacgcatcggcggtatcggcccttgcggacgcgaactttgctgcgctacgtggatgacgagcttcgtctctgtttctaccagtgcagcccgttttcaggacatctcattaaatccgcagaaacttgccggacaatgtgccaagctgaaatgctgcctgaattatgaggtggactgttacgtggaagctcaaaaacgtctcccttcgagagagatagaactggaaacgaaggatggtactttctatttcttcaaagcagatattctaagcaatcaggtttcttattctacggataaaaacttccctgccaacctggtcaccatcagcggcaaacgtgcgtttgaagtaatctctatgaataagaaagggatgaaaccggacagcttgctcgaagaagaaaagaaaccggaaccgagaaaacctgttgacttgctggaacaggaaagtgttacccgtttcgaccgcagccggaataataaagagggcggcaataatgctaaccggaataataaaaagaagaagaaaggaaacaataataacggaaaccgcccgcaacagcaagcagaaggcggcaatcgtccgcaacaacctcaacgggaaaatgaaaaccgcccgcaacagtcagaaaacggcaacagaggggaaagagacaaccgcccgagaaataacaataacaacaaccggaacagaggacagaaccagggacggaacaacgaaaacagacgtccggaaagaggatcaaatcaggaacgtccgcaaggtcaggaacgtccgcagcaacaagaccgtcaacgcgaacagcaaggacaggaacgtcaagaacgtcgtcccaaccacgagcgtccttccagaccggaaagaaatcagaatcaggagaaacagtcaactaatgaaaagcctactcaagaatagtatattgagtctattcagcgcttgcttactgacagcctgcaatgaacatacggtgtatcactcttatcaatcccttcccaacaagggatggggaaagagtgatacactctcttttcagattcccataactgacagcgttcccactactctccggttttttgcggaagtccgcaacagtatcgaatatccttatcatgacctccatttatttatcagtcagaatctacaggattctacggtatggcgcactgataccattgctttctgcctggctgactctaccggaagatggacgggacacggatggggaagcatttaccaatcggaaacttttattacatctgttcgccctttacatcctgcaaattatactattaaaattatgagcggaatgaaagatgaaaagttacaaggattgagcgatgtaggtatccgtattgagaagcagtaagattaaagtcttctgccacgtcctgcatcaatacgcaggaagataaacagcaatatcgtaaatccccataaagaagaacctccatagctgaagaaaggcaatggaataccgataaccggagttaaccccagtaccataccgatattaataaataagtggaaaaggaaaatactgacgaccgaatatccataaacccgcccaaagttggaagtctgccgctcggacaggaagattaatcgtaagatcaaaatcaggaaagccaacaagacagcagccgaaccgacaaatccttgttcctcacccactgtacagaatataaagtcggtatcctgttcgggcacgtactttaattttgtttgcgtaccattcaggaacccttttcctgtcaacccaccggaaccgatggcaatcttggactgattcacgttgtatccggcaccggtcaaatcttcttccaaaccgagcactactttgatacggacttgctggtgaggttcgagcacattatcaaatacataattgctggaatacaggaagccgacagaaccgattgtaaacaggacaatcaggaaataagtacgctgccgctcacttaatgccaaataaatcagatagcctatcaccacaatacaaagcgtccattgcacccaaacgaggctaaaatgcacccaatattcggatattaaataagcaatcagtaatatagccaaacttccaccaatgatattacgggtagcagaccatttcttacgatatacccacaccataccaccggcaaataataagatcaatagtaatacgataaattctcccagtggtgtaggagtatcggcgataaagacttcatcaaaacggatgccgaccacaaagtagattaccgcacatacgcccgcaaaaagcactactcccggcattccttcacgataaagcaccagaaaaaaagcaagataaaccaatgcggaccctgtctcccgctgcccgataatcaataacatcgggagaagaatgatgaatcccaagataaaggcacacttttctttcttgatactgaatgaataagagttcatgtatttggccaacgccaaggccgtagcgaacttggcaaactcggcgggttgcaggctcacaggccccatgacaagccacgagcgtgaccctttggtgtccggtgctatgaagatggtaacaatgagcaagagaatcatccccacatatataatgtacgcgaacatatcatacatacggtcttctagcatcaacagcacgaatccgagtccgaaggaacagataatccacacaaactgcttgccggcacgggtcgagaagtcgaggaagtcgcgttcgccatagtcatagctggctccgcagacgctaaaccatccgccaacaatcaggagcaggtaaataaaaatcgttacccagtccagcgttttccacaaactatcgttcctcgttaccatataatatcactctgttactaaattcttccgccctcaactcgttctccggcgagagcttgcctttcaaatactgttccatcatcagtgcgccgaaaggaactccgtaagtagccccccatccgccgttctctacatagacggcaatagctatcttcggtttgttcatcggcgcaaagcccataaataccgagtggtcgtgtccgcggttctgcgcagtacccgtttttccacaggcttccaaatccggaaccatcactgacagcatacgacaagttcctccggtggctgcgccacgcatcccttctacgactgattcataatgtcttttctcaatagtggtataacgtggtacgcgatagatgctgtccaactgattatcttggatttcctttacaatatgcggtgtcacaaagtatcctctgttagcaatcgttgctcccaggttagcaatctgaaggggagtggatagaatttccccctgtccgatagagatactgattactgtcagtccgttccaatgtccgcgataggctttatcgtagaactgcgcattcggaatcaagccccgtttctctcccggcaaatcaactcccagtttgtagccaaatccttgcgaaaccatgtggtctttccagaccgtaatggcgttttgtggcgaaccgtatttacgatcgccaaacatacggaacaatccccaacagaaataggagttgcacgatgtagcaatagccggaatcaatggcaagggagatccgtgagcatgacagcctactgtcaatcttccgtaatggaatccatgtgagcaagggaatgccggactttgttcggtgataattccttcttgcagaaacgtcagtccttgcgctgttttgaacgtagatcccggaggatatactcccatcagggcacgattcaaaagcggtttggtcatatcacgttgcaaagccaaatgattcttgccacgctggcggccaatcatcaaatgcgggtcataattgggagaggataccagacaaaggatttctccagtctccggttcgatagccacgatacttccaatcttattctttaataaacgttcgcccagcatctgcaagtcaatatccaaactcaatgtcaggttcttgccgggaacagaaggacggtcatattcaccatccatataatgtccctggatacgaccgtgcgcatcacgaagcagaatctcaattcctttctcgccacgcaggtacttttcatacgatttctcgactcctaacttgccgacataatccccacggatgtaatatccttcttcatccgcttccatttcttttgcggagacttctccgatatctcccaaagcatgggcggcagcattgtacgaatattggcggatggtacgccgttggatataaaaaccacgaaacttaaacagcttttcctgaaagacaccacattcttccgccgaaagttgcgacataaacagctggttggtatagcgggaataccccggattgcggcgacggtctttcatgtcgctcattattttgagaaactgcgcacgggtgatattcagcgattggcataaatcgagtgtgtccagattctctatttcctttggcacgatcgttatgtcgtatgccggctggttgaataccaacagtttaccggtccgatcataaatagcgccacgcgaggggtactggatcttattcagaaaagcgttactgtcagcattcttcttgtaatcatcagtcgtaatctgcaatacaaaaagacgtatcagataaatcaaaacaatggagatagcaatgcctccgattacaaatttgcgcttctctaagatataatcttttgccatcgttacttcttaatcccttctatagctatgatacaggttacagtcagaatagtgcaaaggagcactcgcaacagtaacagccaaatgctggtaaatgagaagaactcaatggagagtaatgccagactgtgcacaaaaacacttgcagtggtatattttaagaaaggactgattcccatcgtcttaaaagagggaataaagctatccggattatcacggggcgtgaacagacgaagtaaagagggacgaagaaaggcaagcaatacggtagctgccgcattcattcccggagtatcggagaatatatcaatggtcagcccgaagaaaaaagcccacaacatcagttcattccgggaagtgccggagctgaatttcagaataaaatagatatagagaaaaggagtagcatagccggcaatatgtacactattaaggattagcacctgaagaagtaccaagccgataaaccatccgattctatgtatataagtaataatcattctttcatcaccttgttttcaagtttcttctgttcttcctgacctgtccgggctaccacccgaacgtcactcaacttaccgaaatcagtagccagcttgattttcaacagataggaaagtccgtcattagagtcggacatatcatctaccgttcccaccattataccttcgggaaagacggtggagaaaccactggtaacgactgtatctcccaaattaaactctgcatgacgaggcaagtctttcagataagcatagcgcgaatctccatgttcccatttcaggtagccgaaataatcactgccgataatcttgcaactgatattcgacttgctgttcagtaccgaaatcaccaccgagtaggaaggagaggtttcataaacaatccctacaatcccattaccatccaccactcccatttcggagcgaataccggaagaggaacctttatcgagcgtgatataattatcaaccagattcaaactgttctttatcacatgcgctttaaacaactgataatccgcttgcggcacctgccggatgctgttgatggccatagaatcgagctgctgctctctcaatgctttttccagattagtgatctgttgttcgagcaccatgttgcgatccaacagatcttcattgaccgatttcagatgaaaataagaggaaatccctcccgaaacttcataaaccgcccccacaaccgtattggcagaagtgaagaatgcactctgctgataacggttgaaccgaaataacaaaacaaaactggctacctccaataagatgaagaggaaccagtaattgtatttcagaaggaagtttaataaattcctcatccccggtttatctcattaagaaagagaaacggtctacgttcttcaatgccactcctgtacctttggcaactgcatgcaaaggatcttccgcaatatggaaaggaatattgatcttatcggtcaatctcttatccagtccacgaagcaatgcaccacctccggagagatagataccattgtgcacaatatcagcatacagttcaggaggtgtattttccaatgcactcaagatagcagtttcgatctttgaaattgatttctccagacagtgagctacttcctggtaacatacaggcacttccatcggaagagctgtgatacggttcggaccatgaacgatataatcttccggagcatcatcacccagttcggttaaagcagcacctacattgattttgatacgttctgccatacgctcgctgactttcacattgtgctgacggctcatatattcgcgaatatcctctgtcaggtcatcaccggctgtgcggatggagttgttggaaacgatacctcccaaagagataacggcaatttccgtagatccaccacctatatcgacaatcatgtttccttccggagcttctacgtcgatgccgataccgattgccgcagccatcggctcgaaaatcaaataaacatcacgaccgccggcatgttccgcagagtcacggacagcacggagttcaacttccgtacttcccgaaggaacgccaatcaccatgcgaagagaaggtgaaaacaaatggttgcgagtattcacctgctttatcaaaccgcgcatcatctgctcgcaagcatagaagtcggcaatcactccgtctctcaacggacggatggtacgtatgttttcgtgggttttttcatgcatcaacttcgccttttcccccacggcaatcatcttttctgtacggcgatccagagctacaaccgaaggctcatccaccacgatttttccgttcgtgatgatgatagtattggctgtgcccaagtccattgctatctcttgtgtaaaagaaaataatcccatatttttaaatgaagaattaagaatgaagaattaagaatgaggatgctgtcacgtgcagtcattcttcattattagttcttcattcttcattaatattagtgtttaaaatgacggataccggtagtcaccatcgccataccgtgctcattgcaataagcaaatgataaatcgtcttttaccgaacctcccggttggataacagccgtaataccttctttatctgcaatttccacacagtcggggaacgggaagaaggcatcggaagccatgactgcaccattcaggtcgaaaccgaatgatttggctttttcaattgcttgtttcaatgcgtctacacgtgaagtctgtcctacaccgcttgcaagaagttgtttatcctttgccaatacgatggcgttggatttgctgttctttacaattttgttggcaaacaacatatcttccacttcttccggagtaggagctttgtctgtcacggttttcaggtcggctaccgtttcaatattagtatctttatcctgcaccaatacgccattcagcaaagcacggaattgtttcttaggcaatttagcttccttacgaacgaggatgatgcggttctttttctgtcccaggatttcgagtgcatccacatcataatccggcgcgataaccacttcgaagaaaatcttgttgatttcttccgcagcttctttgtcgatgacaccattcgtaatcaatacacctccgaaagcagaaaccggatcaccggccaatgcgtctttccaagcttccaaaactgtagcacgggaagctaatccgcaagcgttgttgtgtttcaggatagcgaaagtgaggtcatcgaattcgtcgatcaagtcaacggctgcattgatgtcgagaagattgttataagagatttcttttccgtgaatctggtcgaacattgcttccagatttccgtagaaataacctttctgatgtgggttctcaccgtaacgaagttgcttctggctattaacagagcaacggaaagcagaaccttcgccggcatcgaaatagttgaaaatagccgaatcgtagtgagaagaaacggcaaatgcttctttagccatccagcgacgttcttcgagtgaagaagtagcgccgtgctccatcaacatatccaataatggtttgtattgagcttgagaagctacgatgattacatcgttgtagttcttggctgcggcacgaatcagtgagattccgcctatatcgattttttcaataatgtctgcttcagatgcaccggaagctacggtagcttcgaacggatacaaatcaacaataaccagatctatctcgggaatttcatatttctcaatctgttgcatatcctgttccagaccacgacgacaaagaatacctccgaaaattttcggatgtaatgtctttactctaccaccgagaatagaaggataagtggtcaaatcttccactgccttgcaaggatatcccaatgattcaataaactgacgagttccgcctgtcgacaaaaactctactccctcttcataaagtttggtaataatttcatccaaaccttctttatggtatacagataccaatgcagtttttattcttttagactctgacattgaattgcttattaagtatttggtgtgcaaagttacgaaatattgtttatcgtacgtaataaataaggtgtgaattaataaaaaaaagcgttgactctcctcaacggaaaatcaacgcctcttcgcatatatgttctctattcaaaaactattaccagatagatactcgtttttctttaggtacgaacatcgaatcctgttcggtgattttgaatgcttcataccaattctggatatgaggaagagcaccgtccacacgccatttgcctaatgagtgaggatcaagtttggttaatcggagaatttcttccggacggatatttcctgcccacacattagcgtaagccaggaagaaacgttgttccggagtaaatccgtcaacaatttccagtggtgcggcttctgttgcattcttgaatgcctggaaagaaacttgcaaacctccgtggtcggcaatgttctctccaagtgtcaggctaccgtttgcgtgtacgcccggagctacttcaatgctgtcaaagaagttaaccatcacctgtgcccgttcttcgaactttttagcatcttcttctgtccaccagtctttcaggtttccgtctttgtcatattgacgtccctgatcgtcaaatccatgagtcatctcatggccgattaccacgccgattgcaccgtagttcatagcatcgtccgcattcatatcgaagaacggaggttgcaggatagctgccgggaaacagatttcattagtagtcgggttataataagcgttcacagtttgaggagtcatcaaccattcatccttgtctaccggtttgccggctttggcaatcatttcgttataatcccattcgttggcacgctcgatatttgcccagtaagaatcatctttgatctccagtgcggagtaatctttccatttatcaggataacctatttttacatggaaggttgccagtttctccaacgctttttccttggtcggttcactcatccattccaaacctttgatacgttctcccaaagaagtttgcaggttcttcaccagtgtaaccatacgttctttggcagcagccgggaagtacttctctacatacatctgtcctaccacttcgccaagtacaccatctacggtgctcacggaacgtttccagcgaggttgcatttctttcttaccagacattgtcctactgtagaagtcgaagttttgtgcttcaaaatcatcgcttagataagaagcggcagcatctatcaatccccattggaggtacagtttctgatcgtccagtgatacggtgtttatcacatcggctacttccttcatggcagcaggctgacctacgttcacttcttccaaatctttcaaaccggaaacggtgaaataagtatcccagtcaaaagtcgggaagttctttttcagcgtcgccctatccatcttgttataattagcatgaggatcacgcaattccacttgtgaacgagccgctttcgccaggcgagtttcgatgttcatcactgctttcacagctttctgtgcagtagcctcatcataacctgccaactggaacattttggcgatatgttcctgatatttattacggatatttttagtctgctcgtcattctccagataatagtcacgctgtcccattccgataccaccttgataggtctgtacgatattcatggaactgttcatatcatctgcacttacgaacatggtgaagtaaggacggatgcctttcttctggctctcggcgatatatgcatagatttctcctttatccttgagagcgtcaatggctgccagttctgctttgatcggagctacaccttcctggttcagcttcacgctatccattgcgatattataaagatcgcctactttctgcgcagcactgcccggtgcgttatctttcttcgctgccaattcggcaatcaatgctttcagttgttcacgactgttttcgcgcaacatgtcgaatgtaccgaaacgtgaatactcgtctgtcagcggatgatctttcacccaacctccacaggcatattgataaaaacttgtacccggcatagccgtggtatccagattagcaaggtcgataccggacgtcagcacggcctctttcttactgttacatcctgttgtcataaggcatacggcaagaattggtaaatacttggttactttcatattgtataaataattaaatagtctctctaatcaacaatcatcctacccgcagtccggcaccgaggaagaaggtgaccgacaccgaggaacgcctcgttcctcaacgagaaacacctgtttcgacaccgagaaacagatacccgccaggaataccttctaccgaggtataacgtttctctcacatagtgcccggaaatatgcattttgttctaatttttcgtttcttccagttccatcgaaacccgttcccactcttcaacaatgccatccaactgttgcttcagtttttgatgccgttcatagagctgcatatccgaagctccttcgggagttgccatcttcgcttctacgatagcaatcgcggattcggtttcctctattgaggcttcgcagtccgccacctggcgttcgagtttcttaatcttcttattaagttctttctgggcttcgtaagagagcttattctccgaaggctgaccggtttcaggttcattacctttagctgaagccgtaggagaagccgacagtcccgctcctttctgaagctcgttcaagctatctatctttttcttttgcaagaattcatagatacctccaaggtgttcttttacaagtccaccaccaaactcatatactttagtcgcaagtccatccagaaaatcacggtcgtggctgacaagaatcactgttccgtcaaattcgcggatagcttccttcaaaacatctttcgaacgcatatccaaatgattggtcggttcgtccagaatcagtagatttacgggttccagcagaagtttaatcatcgccaatcgcgtacgttctcctccggaaaggactttcacctttttatccgaagcttcgcctccaaacatgaaagctcccagtatatcacgtatcttcagacggatatctcctgtcgctacccggtcaatcgtatcgaatacagtcaggttctcatccaacatttgtgcctgattctgcgcaaaataaccgatttgtacattatgtccgatcgttagtttgccttcgaaatcaatttcgtccatgatacatttcaccaaggtagacttaccctctccgttctttccgacgaaagccactttctctcccctgttgatagtcaggttgacatcatggaaaacgacatgggtgccatacgctttgcgcacatcctcgcaaatcacgggatagtttccgctacgactggctggagggaattttaaacgcaaggcggaattatcttcctcgtccacttcgatgcgatctatcttttccagttgcttgatacggctttgcacctgtacggccttcgttgctttataacggaagcgttcaataaaatcttccgtatcttgtatttgtttctgctgattttcgtaagcacggagctgttgctcacggcgttctttacgcaagactacaaattcatcgtacttcactttgtagtcgtaaatctgaccgcaagtgatttcgatggtgcgggtagttacgttattcaggaaagcacggtcatggctgactaatacgactgcattggcacgtgtagacaaaaagttttccaaccattggatactttcaatatcaaggtgattggtcggctcatcgagcaaaagcacgtccgggcgtcgtaaaagcagttttgccaattcgatacgcatacgccatccaccggaaaactccgaagtaggacgttcaaaatcttcccggctgaatcccaatccaagaagtgtccgttcgatttccgcctgaaagttcgtaccgcccatcatcaggaagcggtcgttttcatgcgtgaaacggtctatcaactgatgatattcttccgaatcgtagtctgtccgttccgccagttcctgattcatccgttccaacttcgcctgaagctcaaatatatgttcgaatgccaattctgcttctcccatcaccgtccggttgtcagaaagaatcatgacctgtggtaaatatccgatggttacatctttcggagtagctacaatgccatgtgtcggcgactgcaagccggctaatattttcagcatggtcgatttgccggcaccgttcttgccaaccaacgcaatgcggtctttcttattaattacatagctgacgtcctcaaaaagcggcgtcgcattaaattctactgataatccttctactgaaatcacttctgcttctgatttataacattttggactgcaaagatactgaatatttattagatactacttagtatgatacgttatgaaaaacaaaaaaagcagtcattcttatgaatgactgctctctatcttaatcaatggctcttctttagaacaacttagcaggatattcaccggcatctaccaatgcctgaatcttgtctactacgctctgacggtcttccggataagtgacgccaaaccatttgctggtagtatccagtacttcaacagtagcagttccgtcattaattaatttatctaccatcaatgggatgaagaactcgctcttcagattttccatattcttcggatcgcttaggaaagtcttgaagaattcctggctgtaagcgaagtaatcaggagtgaatccccagaagttcatacttaccggagtcgtgtcgggagtagccgtccattcgccatcatcaccgatatatttcacttcaccgtccagacgttgaatcttcgtacgttctactacagatgtcaacaatcctttagcatctgtactacagataccacgagataccgtaccgctttcgctcaatgtatttcctacacggaaacctaccattgaataaacgttctttgaattttcaggaagagcagaaaggaatttacccatcacttggaaagaatcacgaccatagaagtcatcgcagttaatcactgcaaacggttctttaatcacatcagcacccatcattactgcatggttagtaccccaaggtttggtacggtctgccgggcaagtaaagccttccggaagatcgtcgattgattgaaataccagttcgcaaggaatgtgaccttcgtatttggaaataattttatcacggaaatcttgttcaaaatctttgcggattacaaatacaagtttgccaaatccggcattgatagcatcatagattgagtaatccataatagtttcgccattaggacccagtccgtctaattgcttcaagcctccataacggctacccataccggctgccaataagaataaagttggtttcataaattgtgtaatattaaaaggttagtgatgtcaacggcatcagatttcgttgcaaatttacaaaaactttctttcttttgtcttgaaacaaaagaaagaaacaaagaaaaattcaagactgacttttttctcctactcacacccttcactacgctaaagggcagaaactcgcttcgctcaaacaatctgccctttttaacgcttcgttacgggtgttcgcttaacggaaaaaaagtaggtcggaaaacctttcggcatgtaaacctatgcagaatcaaaagtacatcaatgacaaatcaagaaatccggtaattcattaacctatgcagcaaacacgccgaaaggggatcggcctcgtttttccggcgttaagcgcaggcgttttctccagcgttaaaaagggcagactgtttgagcgaagcgagtttctgccctttagccggagagaacaccggagtagccggaaaaacgcagccttgaattttctttggttctttctttgtttcaagacaaagaaagaatgttagaagggataaccgatagcaaaatgtattcccagattcttcataaaggatcctgtgacattgtaatatccgcttcgttctgtatcgtaaggcagatgcaaaggaataccgaaatcaagacggaacacaagaatatccatatcataacgaataccgacaccggtgcccaaagcgatctgtttcgggaacgttttcagttcgagttgtgaattgggacgggcctcatccttgcgcatcaaccagacgtttcccgcatccaggaaagtggctccccaaatgctcttaaagatacggaaacgatattctacatttgcctcaaaacggaaagtacccgtctggtcgaggtaagagtagcggctttccgccggatggtatccgcccggaccgatgctacgtaccgtaaaagcgcggatgctgttggcaccacccacatagaattgttcgctgtaaggggctatcgttgcattaccgtaggcgaagagagcacccaaagctacacgggaagcaatcttattattcttgtccatattccacaaatggcggaattccgtattcagtttcacaaactgcgcgaaagggacgttcagcaaacgtttgtcctctttgctgaaagactgaccgaaagcacggtaaatcaccgaggtcaggttaccggcagaggttacagtcgattgccaccaaatcggatttttaataccacgcgcggaggcattatcatacgtataggtatattccatagcaggaataaactggtctttcaaactaatatataatgcaggattggcatcggcaatttccctgaactcttccgattggtgttgcaggacgttgaatgtcagtttgaaaggggtgatactatgccggcttgtacgtgtcggttggaaatcgtaggtagcatttccgccgaatgacaacagtttataatacctggcacggttcaactggtcgatgtataaacggaatgtagtggtagccgggaagtcaaactcccttttcccccaatgcgggaaaaccacgcgcgggaaagtcaaagaggtagaaactcccatctcccagctgttcattaaagagcttttttctcctccgccggtttgccattcataagagcctttcagcttcacgttccagctttcgccacctccgaatacattgttccgggtgacaccgaatgatgctccgggaccggtttggtcgttacttttggttacgacattcaattccagttcggcgtccagcggcttggcaaacgtggcctgcatggttacgttcagcgtatcacaaacggctgtcgtatctttcggagcatattgtaaatccagataactgaagattcccaactggctaagtttctcctgcacctgctcctgtcgatactgactgtaaagacgagtgcgattggaagcccgcatctgtgcattccgcacaaactgttgatagttcaaccaacgataaagcatattcggacgtacctgcaatttcttataataatgtatattcagattcttatacatcatgctgtcattgggcgcctcaccattcttgccaaacaggtaaacagaggcatctcctacatagtaaggacgttgtgccgcagcgggtaatcccggaacgggaatcagacgaaggctgatatgtccaccgggaaccaatgtcgtatctgcctgataagtcatataatcgggacggaagtaaaaatatccccggttacgcaacagcgtactgatacgggtacgctcttcatccagatcgaccacgttgaactgctcgccgggacttatataagacattcgacgtccccgttccataatgcgcaacgtttggggagtgaaacgctgataatagaccgtatctataaaataaggattcttcatgtctaccgtataaagaatacttgctttcaggctgtctttcttatcgaccaatgtttcataagtcactttcccattgaagtaaccataatcacggagcaagtttgtagccaccttgatgcggacctccggattgacagtggaaataaataccggagggttagcagccaaacggttgaacatccactttccaaatccttttttatatttcacaaagtcattgtacatccacatcttaaaaggaataggcagaagccctcccaacatcttcgtactgggagttttatcaagggccgcctcaatctctgtcagggccgtccctcctaccggtgttgtcgacttattctgtatgacagtttttcctcctgtataaagtacctccccttcgggcagatgctttgtcaccgaacaacccgaaaataagatgatacccatcaggcaacttattaatatgttactatatatacctttcatgtttacttctttttcttaaagatgaacagttcgctaagtttatccagcttcttgcgaagtaccagaccgactccggtttccgtaatctcgccttcgagtacactctcgtagtttttatcgtagaacagacggacataacgggttccggttctatccaagcgatattccagagagatgttatcgatgaaagattccgcatcattcgtcgcattctcacccgtagaaactttacctccgattacaatctggaaacggttattgaagagacgttgtgaataacggaaactgtaatccgtacgcttaccacccgtatccgacaaatcgtgatcttcgataccgacagaaacgctggcatttttcaggttccccatcaatgagttgatttggctacttaatacggagttcaatgcagaacccatattcagtttacccagtccaccacctccgccaccaatcggtccggtgccaaggtaggttttcataaccatgatatatagagcctgtttacctctctcttccgctcccatagccgtcaattcattttgtatggttgcgtcttcgggggcagatacgtcaaaggcgaaagacagattatccagtcggttcttgacgacgatggacacatcgaaattaaccatacgtgttccgccattctctccttcggagacagaagcgcggatacggtcggttgctttgaagttcagcatcgggtccataggatttcccgtccattccacatagctgccgttgtcgatagcaaattctttggcagcgatgacaggcaaagcatatttcatcaaaccaccgctcaacgtatagcgtccggtcaatgtcagatctccttgcggagtatatttcattgagaggtcacctcctccctccagctcaacacgattgtcattgcttgcgtccaaatcgactttcaaacgaacggacgggtcgatgtgtaccatcatcaccatatccagcccgcctaaagaaacggtcggcacttcttgctgaacaaccgtcgtggtgtcactaaatgaagtaaaggttaccaaacttcccaaacggtcctgcacagtcaacggtgaatcggtcaatatataagaaacatctgtattgcccaacaagctcatgtttccacgcatgttcaatccgtctaacgggcctttcaccgttgcccggaaatcagcatatacttttccgtaaaccagactttcacgggtacgtttggcatccagaagcgtatagttctgcgccagcagattcagatttgccatcggccgggacatatctctgaaatcaacagatccgtcaatcgtaaatggattctttcctgttgtataaatagcgaacttatcaaattccaaacgattattctttatctgcaccgggcggttgtcgaaccggaagttagccccatactgccgggaaaggacagtaacactatccaatatcagttcgccattaatcaaaggttgttcggtgctaccggtaatgttcagattaccatccatatcaccggctaatgtaaccatctgatcgggaatgaatacgttcgctacacggagcgggaagtgctccagagtggcatttacttccaaactatcttttcctgtccgggttggaaccaatttgccatctgccaccatcacttccacattgtcatgattcagataagcgttaagatattgttttccttgttcacccggcaaccaggtagctcctaatgtcacatcaccaattcgttgacgttcataagtcagctcgtcaatagatgattcaaccgagagttgaaggtctttttcagtctgtacgtagtgtgcttccgcagagaataaaccggttatttccgggaagtaaggtagtactttacttaattcggctaaactgattcttcggatttcgacatcaatattctgtaaagaaacagtgtccccctgcaccgaatgtacacggaatcccattccttcatcatcccacatatctacattagcgtatacacgcatattcttatgcacataaatccagttgtgattctcattaaaatggaatttctggaaggcgataatcggttcttccgggattaatgtgaaagctaatccatcgccttttccttgcccttcaaacaaaggacgtgcattgacaccgagcagtacgcccgtttctccttttccattcttaaaatctaccagtagttccgcatcccggtcacgaatctctcccgtcagtgtagtagagaaggagaattgcggattctttggtccgttaataacaccggcacgcaatttcatgagtgtagtgtcttgtttgactgtaaagaaaatcgtgtctagttgcaaggtatctactttcaaagcatgaatagcggcttttccattaattccccaattaggagctgttccgaatttcacagaagcatcatggtaagctatctttttagtagccagaaaatatgccaaagggttttcttgtcctgcagagaaagagaaaactgccgtcggtaacgccttacgcagttcggcgtgattcaatgctttctcatcaatctgcttcatcaatacatccacaaagtgagtagattggcgaattaaaggattaacaccggaacgtgcgctcaagtcgagtttcatatctccggagacgaaatgtgccgagactaaatcccgacgagcttcggcagctaaattaaaagtaagcggacgcttcattggctgtggcatgattcctaattcatgtaaatccagttgagtgacatcaatcgttattttaccgtcggggtaactgtgtgccagattatattcagcatctgttatcattttcaataaagcattatcgcttgtcagatgtgcagtgaccaatgcgcctttaagttctcccgtcagatcaagatcggaaagatggtatttagcataatgaagttgatctaatgcaagattcaatttggcaaatgaatggtaggacatgacatctaatccacgaccattagctgcagccgagagagaaagttcatagatagagtctttcgggaggaaactatgaagttgcagattgtctattttcagatcagccttatagacttcggtagcggtatttaaggccgcattcacatccatagctccttgtccttctttcaaacggagatttgctttatattcaggacctttgatatccactttcgccaccagattcatactgtcaggaataacaagcgtgccattaggggcttctcccgacagagcggtcaggaagtttaggttttgagtggtcattttcagaccgatggttccggtgcgtgtgaggctgtcggcgaggttttccaaaagaccaccgccctccaatgcaaaagcccctggcaggtctactgtaaagcgggaaatctgcatttctttcagattgccatccgtaccggcacggatgacgagcgggcggaatggataggcttctttgaagctttcaggtagagcaccggcaaatagcatgacgtcttctttgccaatataggcattgagacgggcagataagcggcccgtagtcgggatgttgaccagttcccaataggtatgtgcagataaatcgatttcagaatgtggagtgttcagtttcaaactgggaacacagataacagaatcattggagtaggctctacccgtcagggcagtgacgctcaatccggagcgttcgttcatggtaaattcacgaatgactgcgttcatatccctccctttatacagcaaggaatccagagcgatgcgaatatcccgaacggcaatatgagaagcgtcgaagccctctgtcggttgagcagttccggtatcatagctggcggaggttcccgataataagaacttcttcaagtcgtagtattgattcttcaaatctgcttgagcattattgatggccgcttctccaatatgggccgtcatacgcatggaatcagcaggaagttgcatgccgaacgatacatttttcaatttcaactgatgaagagctactttccagttgatcggagcagaagctgtggtatctttgggcgtagttgtggtatcattcatcagtagctgcatgtgagtgtcggatagttcgacctgattgattaccgctagttcattagacagatcgacgccatgactttgcaggaagaaacgtcccaaaacgcctttaatcttcattccctccatcaaatcggctgaattaacggctacccggctcaaagtcacttcatccacttcaacttttccttttatcaacggccatgcctgtacacggacattgaggctttctaaagacaaaagggtgtccggctgttgaatgacctccacgccacgtaccaacagattaagtgggaaacgaaggtctatccgctccacctgaatctgcatgccggttactttagaggcgtatgcagtaacctcccgacgcaaaagattctgaacgggaggaacataaagcaataccattagtattacaaagagtattataggagtaagcagtatccagcttacccaacgtatccattttcgtttcatgtaaaatgtgtcagtgtaaataaggtgacacaaagtaaacaaattattccgaaaaaaggttgacgacaggagcaaaatgttctgcaacaaaagaaatataagtattctgttttttctgacttcaccaaaagcagcgacttatattgcttcatttatatcataataaaaaagatgaagttacttgttagtcatattacccaatgtatccgattgtctaataagacagatattggctctatttacagatatacagaattccttaaaaaatactatctttgataataaaagcagcgttcgccactagctttaaatccccattgatcagaagcttcaacagcgatcaaatgaacaccttcgcagcactctttaggtaattgtagtccccagatttgaggagaaaattgccttctgaacggatttctacgattgaaacgagttggatatatttttagctgattccaacttctcacccttgctacattcacatcaagttcttctttcctctcacataataaccattcaccattatccaaacgacaacgtactattgtactatctgaagctccataaacagttacaagcatttctccctggtgtttgtttctcaattcatcgatataaacatctgtcgagtcaatacctgcaatccaaatattcatctgtcgggaagcatccatccctatgcccttataccggaaagaatagtctttctctgtaaaatcaaaaacaaaataattacgaggagtaccacattgcatcaaagcagacggaataccttcccaatccttttctcccacccaccagaaaccacaagaagcccctgttactaattcatgtacacaaacatcctgaccatgtaaaaaattcctctccacctgatgcatgtgcccagtcaaagctaaaacattccctcgtccttctaatatttcaatcaatgcggatgaattagtagtatgtactaatggaatatgcatacaaagtacgatctgagcatttttaggtacaagtttcagatcatttgagacaaagcgcaattgactatcagaaatcttccctacataagaacgtgttcctttaccatagacattatttagaacaataaaatgtacgtttccttcgttaaaagcataagtcgctgatccaaaagctgtattatatgaaaaggtttgattaatccttatagaatcagcatcccgatcgtgattacctataactgtccatgattgtacaggcaatagttccatcatctgtttgatagcgggaaataaatttaaattgttattcactaaatcacctaaaaatatattgaacgaagacgaatctgcttgcaaaagttctggccataaagaacgggaagcataatccaactcctgagaattaccgacttgtacatctcctattgcgtttattgagaaatgcttatttacctttttcttattcaatccaaaattgatttgttgcgtctcggtatccccatgactattccaataataaaatcctgaatttactatttgattagacaatagtgtccaattattcggaagaatcgggaagatactgtttcccttagaaagtctgattctgaaatgtccctgtttatctgcaagtagaacagtatctccattagatatggctattcccgaaatacctttttctcctttgtcctgaatcccattttgattaccatcttcatagacacaaccttctatccaagcaacatcttgagccaaacattttgtggaaacaaaactgcctaataagaagaatatatatataatcatgaactttttcattttttcatcttattaatataaaaacaaggaaggatatattaagataaaaaccatctatacccttcctcgcatttacattattttattaaaagcataacgtttacttatctgtatatttaaaaactatagcatggttattgtcatctgtaaatgaaatatatccaactcctgtggaggagaaagctatattcaaattactagaagcaatatctgctaatttatgaggatctgaccattgcttagtttcattatccaaataaataacctttggataatcttgatcttgttcatctctgtaggcaacaaaaggagtaccatcaggagctattgatatggccactgaagttgaagttgaggttttaaaatccaaaggcaatggatttcctcctactgtggaccattgttttgttaccggatcatatttctttagtctcaagttatacacacctgatgtcactgcatcatcacttgttaagatataaagtgtaccattttcttctgcttcaatatccaatccaacaataccagtctgagtagcatttggttctacatagttatttaatagaatactccatgttccatttttatattcatatactgaatgaccataatttacgcctgctactgccccacggttaaccaccaacagataggcagcatgctctgtcttagcaagattacaattatagattggagtcccggaagccaaaagtggtaattcactactcgcccaactgttctgataaatagacataactaacactcgccttggaaaagaaactttgttgctattgttcacttgtgaaacaatagtctctccattatctaatactcttaaatgtaattgctgagattgagcatttacaaatccttgattacctacataattccaggtagtcccattccatttcattaaagacgcagcacctgcaactgtggtagcactgttatcagaataaacgacataaggaattccatccttgtcaatatcaaaatcataatttgacaaactaacttctcctccaaagccttctaaagaaccaactgctgtccaagttgtaccatcaacaagttttatgacagccattttctcttcttcttttagtttaaaaccaagatatggaacttgatccaccgggtttatttttaaaacagatccactgaaaactgatgtcgctgtaaagtccggcattcttacccaagccatattagaagacttagcaactgttatcgtatactttacattctgttttccattactaacaatgtaatctacaggagctgtaaaatcattggcagtagcaccactaacttgtgtaactccatctaccaagacgatattaccatcgttcgtcgtaaagcgagcgacaagtgcacttttatctataaatgcaggcatagtaaccttagctgttgtggaagatagggtagctatataatcatctgataatatacttgaattatcttcagcataaaacccaaaggttaacagcttagcttcaactccttcatctgtcccatcattcttgtcatccgaacaagatgaaaacgcagcaaacaaaacaattactgccatccaaaataaatctttcattctattcataccataaatatttgtggaccggagtcctgttatacaatcatattattactaatttttagggtaaagcacagcttttatcatgggagtagtgctcaataaagattttgcaaaagaagaaatatcttttgctgttatactatttactgtttgtgcataattattcagatatttccaatcctcctgttgattgaatatggaattgcgaatccaagaagtccaaaaagagtttttttgtttatccaattcaaaatctttcaaaagattacgtttaacatccgttaatataccgtcaaatgattccggatattcataaagtctttgtaattcttcttgtgtagcattaaccaaactatcaacatcctctggcaagcagacaaatccaatcatcgttcgtgataagaaagaaggatataaacccgcactcgaagctacgcttacactatagacttttcccatttcctcacgcaaacggttaagtaaacaagtgcgcaacatcgctttcatcacattcgatttcaatgtgaatgagctaaactcctctaacaaactgtcttgctggaaaatcaatgaaactgatgctttaggagaatcccccgtgtgacgtatcaatgaacaggatttataaggtatattacgttctgtataacaccaatccgtatcattcgatcctttaggtaatccaccgatatatgtagtgattaacggctttatatcctgtatagtacagtctcccaaaataacaaatgtgtaatctttcgctgcaccataaaaacgattgaatagaggaagcatatcctcttgctttacatatcgtgttattaaagaatcagaaagtattgtatttgtgtaatttcgtccgttcaaaagccacattagttcttcctgaaaaaactccgtcggacttttttgcttgacacgataattttcttttgtcttctctattgtttgtttacaaattgctgtatccaactgggggtacatccatttggtatagagtagttgaaacattgtttccatatcctttacctgcgatactccagctagcccagtacgtgtcttatcaacaagtagacgcatagaagcagagtttcctgccagaaaatagttcaatgcatcccttgaaaaatttccggctccagaaagtgaaataatactgggagcgaatagacctgtataataatgtaaagaatctaaagaataaagccctcctttccgaaaaccagtcaacaacaccttccccttatcgagttctgaagacttaaatataatgcgcgtgccattatttagccaaagagacacagctcctatctctggtatattttcttctctgacaatatgtccccccgacggtaattggcataattcatccggtacagaaaaatatttattataccgtttcgaagattgttttctggcttcttttataattgacatcaaagtcgcatctccattcacttccttattagctttttcatttgctcgcaatagataatgcatcttttggggtgaatatacttttgccaaattcctaaccaaagcaacagagtctagttctggaaaatatcgttgaactaatcgatactcttcttgtaatgaggtaaatctgtttcctacataaaaatcggcataaatatcgttcattaattcaacggaagcaggattttgctgattttgaagtttattctccaagttattataaataacctttttggcacgttctatttctgtctcagtaaacccataacgaaagatttgctgttgctgtgcaataaactccgaaatacctttttccattttcccaggtagtagttctaccgaacatagcaatactccagttgcattcagaaaacttgagtactgaatactggctttcctataagaaggattttcaaaagcccaagcattcattcgcatcttaaaaaggcgattcaataatgttcgggtcaaataagccttataatcctttgctgtctgaaccggttttgaaagtggcagcaactgaatc

SEQ ID NO: 8139 - DNA, 15222 bp, Unknown
  gut microbiota DNA sequence
aataactgtttaactaaactatatatttaaagaatggcagaaccttttaaaaacatgtttaacgagcaatttttcgatctgtttacgaaagatttgaaacttgttatcgacgattttgatgcttgcgagtttgtatctcaagtgatggacgatgaatgggaaggcagggaacttaaacaacgctgcatgcacatcacaacggtgctcagaaagtttttaccggcagattacaaagaggcgatcgctaagatacttgaattgttggatcatataaaaaagacacggcctgatttctcggtgatagacgacacgaagtttggtttgactttagagtatggggggattctggataattatgtcgaacaatatggactggacgattacgaaacttctgtcaaggcgatagagaaaatcacgcagttcacaagttgcgagtttgtggctcattcttttattatcaaatatccggatcagatgatgaaacagatgttggtttggtcgaaacacgaacattggggagtcaggcggcttgcgtcagaaggctgtcgtccgcgtcttccctgggcgatggcgttgccgaacctgaaagagaatcctgcgcctatcattcctattctggaaaatctaaaaaatgatccggcaagatttgtgcgattgagcgttgccaataatttgaatgatattgcgaaagataatcccgaaatcgttattgatttagtgaagaaatggaagggagaatcgaaagaggtggattggattattaaacacggttgccggacgctcttaaaacaaggcaatccggaagtgatggagttgtttggcttcaactctactatcagcaatatctgtgtggaggatttccaaatttcaagcccggaagtgaaagtcggggattcgttggaggttagttttaaactgttgaacaagaacgatcaaacaaccaagatacgactcgaatatggaatctattaccaaaaagcaaatggaacgttgacgaagaaagtgcataaaatcagcgagaaagaatatgtcaggaactcaaccacgcgaatcacccgaaaacattctttccgggtggttacaacgaggaagctccatctcggacttcatcaaattgctatgattatcaacgggaatgaatttgaaaaatatagttttgagttgattgaataataactgctgttaataccccggattctgcttcaacttcgtattcatcacccgtattttctccggtatagggaacacggtagtatatccgtttccctcatccggcaattgcggacggctactgtaagctcttgtaaacttcccgaagcgaaccaaatcttgacgtctccaaccttcccaagccagttccagttggcgttcggcaaggatattctctaaagtggcagtgcgaaaggaggcattgacgcggctacggacttcattcagttcttcatctccactggctccattgcgcactttcgcttcactcttcatcaacagagcatccgcgtagcggaacaatacaatatcattctccatcaacttaccgtcttttgtggcagtcgggtcaacttcgtacttcttcatacgggctcctgctgtttgttcatacggggtatctgtaatatccagagctactttccagggcagatactccaatacggtgccatcatccagcttgatgatgtttcctttcaggtcgcgcactactcccgcaaaatagcaaatatcaaagcggggatcttgttcggctgtttcataaccgaaggtttggagggcttcaatagttgcactggggccgttctcaccgcttaggccgtacgccttggcatggttgtagtggcgggagcggaatagatattgcatttgattggtgtacaaggttttattcatcggaatggtaaaaatattctctatcgatgattcattaaaaatggagaaattggtttcgtattttggttccaattcattgtagcccatcgcctttagctggtcacagtagtagatgactgtttcccacgcattgagttcgttgccgttcactgtaaactttatgttttttccgtccggacgttgtccgtctgtccaatcattatccgtatagacttcggaattcagagccagtttagccaataggaaagtgactaccggacgggtgatacggccataataaggaccggactggttactgtgcgcatcgctcaacagaggagccgcttcctgcaattccttgaatacaaactcaaaaaccgttttccgttcactctggacaacatctttcattgccactgaagaggattgaaccaacgggatgcgtccgaacaaatccatcagataataataatacatggctcgcatggcctgcacttccgcccggtatgccggaagtacagcatcggaatgggtttcggcaaacttgtctatccgttcgagcgatttgttgcttagcatgacgactttgtaaagatattcccatgtagcttggatagcgtcattctctactccccaatcgtgcaggtaaagtccttgccaaaagccgccatcgtaccagtcgcctccacgggtggggatgatggcttcgtcggaagtgaaagtgttcaggtcgtagactcccctacccgttccctgcaatccctgactgtcgctataaccgcctatgtaagtataaagtgaagctaccgcattgagatatacttccgagatcgtattgtagacatcctcttccggtagtttgtctttcggattttcctgtaagaacttatcacaggaaaataaggtcagactcgtcaccagaaaaaataataatattcttgaagggtagattatttgctttgagatctgcaaaaactgatttctatttttcatatatcgtttcatcctctcctcctccattaaaagttaatactcaatcctaaggtgtacgtccgtgccaacggatacccccgtttatcgtccacgcccaacgtcgagttcaccgtggaactgttaatcatgggcgaaagtcccgaataaccggagatggttgccagattgttgacagtaaatgctaagcgcagggaacggacgtatttctttagtttctgcaccttctcaatcggcacgttccagcccagcgtcacatagtcgaagttgacgtaatctcccttttccagccaatagtcggtggcagtctgatccttgatgttctgttgcggagctttcttcattacattgtagtcggggaagatattcatgttcatataggtcagggaagttccgttgtagattttatgtccgaaagctccgttgatttgcaaagacaggtcgaaacgcttgtaacggaaactgatgttagatcccagaatcgttttgggtacggcttgtcctgccacgtagcggtcttcaccatcttccagactgacgcctccgccattcaggtcggcaatgccataggtatatccaccgtttccgtcggactccagtccggtgctgtgagggagatagaacacgcccaacggttgccccaccatctgataaacgatgtggttgtagccgccgtggaagccggctccatcaaggctggcaagacttttatattcggaagcggaaagcatttcgccgttatacataccgctcaatgaaagcagtttgttgcgctgaaaggtgatgttggcattgatattcagttccatgtccttcgttttcaaaggggtgataccgatggcgatttccgtaccccagttgcgcatggagccgatattggcaagcaaggtgttataggtgaaagggggcacgcttacgttgtaaaggtaaagcatatccgtggtgcgggagttgtaatagttggcggaaagcaacaggcggttgccgaataaagcgatgtcgaaaccggtattaaaggtatgtttcacttcccatttcagatcgggattcgtattccggagatctcccaaagatacaatggcggagtttccgacggggacgacaccgttcggcttgacaagattcagtgttgtgtatgagtcaatcccgctttggttacctgccagaccgtaaccgatacggaatttcagattgtctatcacggggaattgcttcataaattcttcttcactaatcacccatgccgcggatgcagaggggaaaaagccccatttatggttggctccgaatttggaggaagcatctgtacgggcgttcaacgtcagtacgtagcggtcggcgtatgtataattgaagcgtcccatgaaagatgccaggcgcggttgctcgtagtaggaattagtgccttcccacaaacggagcgctcctgcctgaaggttattatacccgaacttatcggtactgaaattgctgactgtggtataatagccggtataagtctctttctgaagttcggcaagtgccagtacgtcaaagaaatgctttttccagtttttcttataggtcagcatcatgtttcccaataaagattcgcgctttttggttcctttgtatgcctgaccgttcgcccagacggaagtggggaggtattgcgaattttctacgatattgtaagtataagctccgaacaggcttagtttcagtccttccatcagattgaaagtgagacgggcgtgcgtactgatgtgcgaagtggcatcatcgtcctgcacttccatccatgccaatggattggtgatttggctggcggtcgttattccgtcccacgaattggtgacggggtctttatgattgggataggtaggattgaacgtagctgccgaatagaacgttttctgataatctaccaggttatggttcttctgaatggaaccaaacattcccagttcgcagttcaggaagccgtcgaacattttctgattcatgttcatatttgaagtgaaattcttcatgtcttcattcagaatcactccctgacgatccataaaaccgagggaaacacgataactggactcactggaaccgccataaaaggcgatgtgatgattctgttgcagtcctgtctgctcaatctctttctggaaatcggtattgttccctttgtccagaatggaaatgcctcgttccgatgctacgcggcggaattcatcaccggacagcattttcaaattcttgtagacggtggaaatcccgaagctaccgttgtaagctacctgtgtcctgccgctcatcccttttttggtggtgacttctatcacaccggatgcacctcgcgaaccgtactgtgcggtttcggaagcgtctttcaggatggtaaaactctcaatatccgtagggtaaatggaggtaagcatactcaagtcgccaaatactccgtcgacgataatcaaagggtcgttgccgctggtcagtgaggtagttccccgcaggcgtaccgcatccagagccgccggtccgttggagccccgctggatggtcaaacccggcacacgtccacggattgcttccaaagggttcgttatctggtctttgttcatctgtgtctccgtgattttctctacggaaccggacagggttttcaaacttccggtggcatatcctacggtaatcaatgagtctatgggcgcgacgggaatcttctgtgccaacgtgccctcgcacgggattaccagaagaagaaggctgtagaaaatgagtctagcgtgttgtaccatattcttagtttttaaggtaataatacaaatataacaaaaaaagagggaatctggttgagtagattccctcttttatttaaatgatattgacaggttgaaatcagcaagtccggatgatacggattacacggttgctttaggccggaataatcctaaaaaaacgcatcatacgtattatccttatgcctgcaatatttatttcacaataatctcatccgtaaatatccagcctccgaattcacttccggcctgtgcctgatagcgtacgtatcttcctttggcttcgccctgccatgaaatatccgtaaagcggatgggtgtttctttgctcacttcaaagtgttgtttgcgcaactcggtgaaatgggttccgtcatcggaaatagaaatcaccacagtctccggcaggaatacttccgcgcctaccacctgcataaaggcggcagtgacggaatggatggaagtttctttttccatatcaatcgtcacatcgaggcggttgtccgagatgaatccttgccacgagccatcaccataggtccaatcgccacgtatgccgtccgtcagagcggtgtttccttgtgccagataatgggagctgtaaggtgaattataaatcacctttttacccaatgccagatggctgaccggttgaagcgactcgggacggctgccgatttcttttttcaaatcgaaaggatggtatccttttgcctgcaaatcggccactgccgacaatgcacgggtatggaaatccggccatgacttacgttccggagccgaccaggctgtttccgccaatgccaggattcgggggtaaatcatatactccacgtgttcgggagtgggaatgtattccacccataggttgccttgcacaccgtagaccaacttcgcctgttccgcagttaaagaagcgggaacgggattgtaagaatatactttcttcaacggcaggtatccaccgatggcttccggctgcgaatatggggcatcctgataactgtccagatagcagtaggcacccggcgtcatgatggcacgatggccggaggttacggcagcgatgccaccctcttctccacgccatgacatgacggttgcgttgggggcaatgcctccttgcagaatctcgtcccatcccagcagatgacgtccatgattgtttaggaacttctcaatgcggtgtatcaggtagctttgcagctcgtctacattggcaagatgctcgtccgtcattctcttctgacatttcgggcaagtcttccaagccgacttgccggcctcatcgccaccgatatgaatgtattcggaagggaaaagttccatgacttccgtcaacacattttccagaaacgtgaaggtttcttcattgccgacacagaaatcggagttcttgtaaggttcgcccgaacaggataactgcgggtaggctgccagcacttcttccgaatgggagggcatctcaatctcgggaatcaccgtgatataatgctgacgggcatattccaagatttcacgaatatcatcctgggtgtaataaccgccgtaagctccgggagcatcgaaacggacatatttacgtccgccgttccaccattgcttccaggtgggatctgtacgccaggccgcaaattcggtcagcaaagggtatttcttgatttctagccgccagcctgccgcatcggtcagatgcaggtgcagacggttgattttgtaatacgccagtgcgtctatctgtttctttataaactctttggtagaaaagtggcgggacacatccagcatcaatccccggtaagcgaaacggggagtatcttctatctcgacagaggctatggaatagctgcctgcccccgaaggttgtgccaactgcaacagggtttgcataccatagaataatccggctcccgaagtggcgcgtatcagaatttgttgcggagtgacggaaagggtatagctttccggcgatggcaactggtggttcttgggggttatcaataagagaagcatctgtttcctgtctttctttctcgcttcctttaattgaacgggtaatgccttcaggtatttctcccagagcttcgcttctccaccttgtaggtttgtataaagtcttgtcttttctgacagtaaaaaagagcccgtccccttctccatttttaatgggacaggtatgacggactgtgccagaatgggatgtgcatgaaagcacatccccagtatacataagaaaagacaaactttagtgtattcttttcttatattcattaatcaattttgatttcgtctacaaataaaaatgcgtttttgccttttccaccatgccattccggaagcgttttctccggtgaagcaatgactctcacgtatcgggtagtcacaggagcaaatgtaagttgatggtcaacaactccgtctttgtctatttctttcattgccggatattcttcggaagcaatctttttgaaggtctttccgtcatctgaaacttctacggacaggtttctggcgtcaaacacccagtcgccctttgcaatattgacagagatggccacactcgaaatttcagtgggttgctgaaggtcgatcgtcatgtccatgtcgtttccgttgaaggcgatccaacggcctgaccggtaactgctatttcctttcaaaccatcgtttaacgtggaagctcctttgaagaggtattgttcattgataggttgattggcaacaatcggcttcatgctggatttgctgaaatcaatcttctctgtcaatgtctggctctcgccggtaggacgaatggctttggcggacagagtggcattttctttaattttcaacactccttcgtaaacgggagaagcagtagtgggttctgtgccgtccaaagtgtagtggacaggggcattgtcgatagtagacaaagtaacgtccatcgttccttctgccggattcggttcaaactcggcttgtacgccgaacgcgtgtttagcgtagttgtatccttcggcatcataccacttaatcagttgaggaagacgagacaggaagtcggcatagtttttcttttcagggctggaccactgaatttcacacaatgcagcccaacgaggcaataccatgtactgcgcgtgagggaaagtagcgatgtattctgtccagaggttggcttgcacacccttgatatatttctgttcttccggagtcagagaagccggcatcggttcgtagctgtacactctttccaacggcaggtaaccaccgataccaaatggttcgttatctacgtctttagcttggtaatagtcgaaatacaggtatgtgttcggtgtcataatgacatcgtgtttctgtttcgcagcttcgataccgcccttttcaccacgccatgacataacagttgcgttaggagcaagtccgccttcgaggatttcatcccaaccgatgatctgacgtccgtggtcgttgaggaatttttcgatatggttgattacgaagctctgcagacgttcttccttgctatgcttatcatccgatttcaagcccagcgccttgatacgtgcctgacatttcggacatttttcccaacgtactttcggacattcgtcaccacctacatgaatatattctgaagggaagatttcaatcagttcgctatatacatcttcgaggaatttcaagacttgatcgtttccggcacaaagcacatcttcagatactccccattgtctccatacttcgtacgggccaccggtacatcccaattcgggataagcggcaagggcagcttgcatgtgtcccggaagatcgatttcgggaataactgtgatataacgttcggcagcataagctactatttctttcgcctgctcctgggtatagaagccaccgtaaggtttgccgtcgtattcaccggagttacgtccgatgactgtttctgttctcttggaacctatttctgtcagcttcggatatttcttgatttccagacgccaaccttggtcttcggtaatatgccagtgaaaacgattcatattgtgtaaagccatcatatcaatataagttttcacttcatctactgtaaagaaatgacggctggtgtcgaagtgggcgccacgatagccaaagcggggagcgtcattgatttctacagcgggcatggaaatgtctgcaccgacagccacaggcaatgatttgcgcagggactggatgccatagaatacgccggcctcggtaggaccagtaatcgtgattccgtcaccggttactttcaactgataggattccggattttcgtttgccgtgcccaatgtcagtacgattgcattcttaccttccgttccggcttcgatagcgaaatcttttccggtagcggttttcagatagtcggccaggaattgtgcgttgcgttgcatcttctcgtttccttccggataaaggattttcacaccgctcttcagaatgaagggatttccttgagctgttacaatttcttgtggcatggggatgatctggtagttggcgtcctgttgcgccgattggcaagaggcaaaaagtcctgctagtgccagacatccggttaactttaagagttgtttcataaactaaaaaattaagtgttaagttattaataaattaattataggtttcacgaatatgtttgattgtcaaatggatctcctctcctttctttatttggggagaagtgataacaactgtcttacgctctccgggaaggaggtcgaaaaagttgtcactgaaacgggctccctgcaaagggatttcaataaagacgtcttttgcaagagcgggagaaagcagagtcagttcgcacacgccgtctttctgttttatcttgcaggaaacggttgtcttgggcagaagcaggtctttcgtctttctaaagaagtggactgtttcggctaccgtatgcccggacttgtctttcaaggtcagttgcatgaagcaatggcgcaggtcatccgcaagcgggcgctttgcaggaaaaaacaaagtggtgagcgaagtgcgatatacacattgggaagtgttggccggaagagtcaaagaaggaaggacaaccgttcttccgactttctttcctgcaaaattcgtcagtctcatttccagcgtcagtttctcccgggtgtcaagatgatcggaaagcaggtaaacacacaggttgtcaccttccagcaaagggttgatatgaacgggggcaaatgcacgctttgcctgataatgcaaggctttccagttaccgtagtaatcaatacccgaccatgacactaccggccaactgtcattcaattgccaatataatgtacccatacaatagggacggttgcggcggtgcgcttccagaccgtgacgtatgccatgtccctgcaatactagtccgacatagacaaagtcttcgaatttttcgggaatgatatagtcacgttccatataggtgcgaatcagggcattgccgatgctgcttttctgatgggcattcatcacctccgattcgatttgataatcttcaggagccgcaaaggtggcaatagtcttcatctccgggaaggactggaaaccgaattcgctcatgaaacgaggaagatctgtatctagtgattcgaaagttttttggccataccatactccccagttgtggctgtctcctatcccccatgattcgggacgtccccaattggctaaatatggggagctgtgtatataaaaacggtcggcatccagctcttttaccttggtaggaaggagttggtggaacagtttgtcatagccttggaacatttcctgatagatttccggcgtgaatttcttgtcgaatccccaatatttcaaggcttccagtatttcattattgccacaccacatcgccagggaagcatgattgcgaagacggcgaatgttgtagcaggcttctgcttctactcttttcaggaaggttggatcggacggatagggagtgcaggcaaacataaagtcctgccatatcagtattccattttcatctgccaggtcatagaaacggtcgtcttcgtaggttccgcctccccacacacgaatgacattcatgttggcttctttgatgtcccggaataaggtttggtagcgttcggtagtgacgttggtcaatagggcgtcctggggaatatagttggctcctttagcaaacatcggaacgccgtttacttcaaaatagaaggattctccgtcctgatctttttcattgacgagacgaacggtgcgcagtcctatccggtgggattgttgggctacgactttatcttctacgattatttgagcggagaaatcatacaaggcgggctttccccagccattcggcatccaacgtaccggagacagcacttcggaaggaatagatatatgattgattccgggctgtagggtgattgcctgactaatgcctttttctgtgtttccttcgaaggaggtattgattctcacctctgcttgaagtgctcgaggaaggatattatttatttccaattcattggatagttttgcctgctggtcggtcagcgagagttgctttacgtggtaatcgctgatagaggctgcgtcataaaaacggatggtcaccggacgccagataccactggtcaccatgcggattccccagtcccaaccataactgtaaggggctttacgggagaatacgcttacatgtttttcatgatggtcgttgtctgccggatagttgaatccgttagagttatattgaggcattgtctgccggatgggtgaatgaaaatagatgtgaagaaggttttctccgagacggagttgcgacttgacgggtatcgtataaccgacgaacatgttatcggctttcaacaacagtgctccgttgagatatacatcggcgtatgtatcaagaccttcaaagactaattgggcgtcgtcccgtttcagttgctcgggggtaactgtaaaagcagtccggtactcccagtcttcattttccacccactgaatcttctgttcattgataccgtaaaaaggatcgggaatttgtttatgatagataagatcctgatgaacggtgccgggaacctgtgccggtcgccatagctccgtgcctgcctgggaaaattcccaacctgcatttaaaaccacaacttcggaattgtcattgctctgcgcatatgccatactgcaacagcatagtagtccacatgctatttgagtcttttttccgattaaattaatcatcatagtgggggcattagatattaacggtttcaaagatattactttttcagcaaatttcactgataatttaacaaaatatgttgttttagcgtgagctgtccagaaagccacaattaaatcgcctaaaatttcagcttataattagttaaataaagagtagtattctgtcctcaaatgtatgctaaaatggcgttttttttattataacgatattctttttcattatagctaaatctttctacctataaatcgtaagcatagatttaaatcttcggactttcgggacagactctttattcctttattatatctgtcaattttatcgcttgaaaggttatatgtgcgacgctactctcatatagtataccaattgtctctttatcaatcattgtcagacaactatacccccatccttctgcctcgtcgagcattaattgatgttccggcaaccaggtaagtcctttgtccagacttgcttttattgttatatgattacgtcctttggtcgtattcgggttcgaaaacagcaggatatctttatttaatatgttgtctttggcatctacatgaatcagactagccatgcataccggttcctgaagtgcttggcgggaagatgggtgttctgtccatgtttctcccaaatctttcgttatggcaatagcccggcttcctcctctattatcacgcatattcagcatcaatactcccggttctatttccgccacttgcgcttccgttgtattggttcgtgccatattgtgcattttccatgttttcccccggtctttactatacatgattcctgcattcggaacacgggtagagtctataaattgcgttggaaataccaatgtgccatcactcatcgttattccacgtccgggaccttgaagcaggaagtaccaggaaggatctttcacctgctctgttatattgataggcttcgaccaggttttaccatcgtctgtgcttttagccaatactaactgtgccgtatgattcagatccattcccggatgggaactccaccaggcgcgttgattacccataccatgtgtccatgcggcaaccacccagacggtattcgtcttagtatctactaaaatagaagggtctcctaccccattctgtgctttaggcagaccaccatactcgccaaatgaaagcggaagacgcatcttctcccaattctttcctccatcgatgctacggctcaaacccacgtcaacatattcctgtaaatcgacactactgttgtatcgaacatcatacacgcctaataaggttcctttattggtagtcaccaacccgggaatacggaaagaagcagaaccgtcatcaccggcatgacgaactccaactgccatccggtgaacaatattctttggagaaatagatttacaacatagttctttcccatctactttaacggcacacaattcagagagtatcttagtctgcaaagaggcatcttttttcatctgcaaactaatccaaaaatagtttacacccggaaataaattgtaattaccttttaatacaactttttctgatgatcccacctctgcacatttgatcgaataggaaggaatagccgccaatgtcccacccggacggtggctggatatgtactctactggagcaaagcgatttttgtctttgtcctgcaacgcctctgttcctccataatagagtttgattgcctgaatatcagtcagattcgtacttttactaaaatctaaaatgatttcatcgagcttcttactttcttttgcatccaaacgaagatagaacagaacattgtcttgccgctctatcaaaaccgggatttgtgtttcatggataaatactgtgtctgaagcttttacgtcaaaagaatatcctaaaaggataaggaaaagtaaataataaattcttctcataatgggggtattagttagtttaacgcgataaagataaaacttttctactataatattactatgcaaacagtaaactttgattttaccaagttctggtaggactagtcaatactttgaccacggttctggctcttgtcatcatcgataaggtgggccgcaagaagctggtttattatggagtttcgggtatggttgtttctctgattctcatcggcctgtacttcctcttcggagattccctgggagtatccagcctcttcctgcttatttttttcctgttctatgtattctgctgtgccgtttctatctgtgccgtggtgttcgtgctcctctctgagatgtatcccaccaaggttcgcggactggccatgtcgatagcaggattcgctctgtggatcggaacgtacctgatcggacagttaaccccctgg

SEQ ID NO: 8140 - DNA, 43241 bp, Unknown
  gut microbiota DNA sequence
tgtgggatctgctatctggaagaatttgcaggataaaggatacaccaatctgataggccgcacgcacaaagagcttgacctgctggatggaatggctgtccgtaaattcttcgatgaagaacaaccggaatatgtattccttgccgctgcctttgtgggtggtatcatggcgaacagcatctaccgtgccgactttatatacaagaatctgcagattcaacagaacattatcggagagagtttccgtcacaacgtgaaaaagttgctcttcctcggtagtacgtgtatttatccacgcgatgccgaacagccgatgaaggaagatgtattgcttacttcaccgttggaatataccaacgagccgtatgcaatcgccaaaattgccggactgaaaatgtgcgagagcttcaacctgcaatatggaacgaactacatcgccgtgatgccgacaaacctttacggcccgaatgataatttcgatttggaacgcagccatgtattgcctgccatgattcgcaagattcatttggcacactgtctgaaagaaggaaactgggaagctgtacgcaaggatatgaaccaacgtccggtggaaggtgtcaatggcgacagctcgaaagaggacattctggctattctgagaaaatacggaatcaacgaaacagaggtcactctctggggtacgggtactcctctccgcgaattcctctggagcgaagaaatggcggatgccagtgtcttcgttatggagcatgtggactttaaagatacctataaagaaggtagcaaagatatccgcaactgccatatcaacatcggaaccggtaaggaaatcaccatccgccaactggccgaacggatcgttgaaacagtaggttatcaaggtaaactgaccttcgacagcagcaaaccggacggcacaatgcgcaagctaaccgatccttcaaaactgcatgcactgggctggcaccacaaaattgaaatcgaggaaggcgtacaaagaatgtacgaatggtacttgaaataagaaatgaagttactgtaaatatgctattagctgaatgtttttttgctaatagcatattttttttagctataatgataattaaattagctataatgataatcagttttgctataatgataatccaattagctataagcataatctgttgagctatgagcataatctttttttatactacaagtcaatctattttattataagttaatcccttttgtgataagccttcatccaactaagcatcatttatccaaccataaacaccattcattcaattataagcctcatccattgtatttataacgtatcgccacacaaattcccccactactctctcccccatttccaaaaattcttcactcttaattcttcattcttaatataattgctatatttgcacaatttaataccaaatgtgcaaaaaacaatggaacaaagttttatagcctatattgagaatagtatcaagaataattgggatttggatgccctgaccgattataaaggtgcaactttacagtataaagacgtagctcgcaaaatcgagaaactccatatcatctttgaagaaagcggaatccgcaagggagacaagattgccgtttgtggaagaaacagctctcactggggagttactttccttgccacactgacgtatggagccgtcattgtacctattctccatgaatttaaagcagataacgtgcataatatcgtcaaccactccgaagctaaattactgcttgtaggagatatggtatgggaaaacctgaacgagtcggcaatgccgctactggaaggtatcctgatgatgaatgacttcaccctattagtgtcacgcagcgaacggctcacgtatgcacgcgaacatctgaacgaaatgttcggcaaaaaatatccgaagaatttccgtaaagagcatgtcgcttatcacaaagacgaaccggaagaactggcagttatcaattatacttcgggaacaacgagttattccaaaggagtaatgctcccctaccgcagtctgtggtcgaataccaaatttgcttttgaagtgttggaactggaagccggagataaaatcgtttccatgcttcctatggcacacatgtacggattagcttttgaattcctttatgagttctccgtaggttgccacatctatttcctcacccgtatgccaagccctaagattatcttccaggcttttgaagaagtgaaacccagtctgattgttgccgtaccactcatcatcgaaaagataatcaagaaaagcgtgcttccgaagttagaaactccggcgatgaagatattgctgaaagtgcctattatcaatgacaagataaaggcaacagtgcgcgaagagatgattaaggcattcggcggaaacttcaaggcagtcatcgtaggaggtgcagcgttcaatcaggaagtggaacagttcttgaaaatgattgatttcccttatacggttggatatggaatgacggaatgtggcccgattatctgctacgaagattggagaaagttcaaaccgggttcttgcggaaaggctgtaccacgcatggatgtacgagtattgtcatctgatcccgaaaatatcgttggtgaaatcgtatgtaagggcccgaatgtgatgctgggctattacaaaaacgaagaagccactcaagaagtcatcgacaaggacggctggttgcataccggcgacttggctttgatggatgaagaaggtaatgttacaatcaaaggacgcagcaagaacctgttattgagctccagcggacagaatatctatccggaagaaattgaggataagttgaacaacctgccatacgtggctgaaagcattatcgttcagcaaaacgagaaacttgtcggacttgtttatcccgactttgacgatgcgttcgctcacggcctgaagactgaagacatcgaacaagtaatggaagaaaaccgcgtgacactgaacactatgttaccggcatacagccaaatatccaagatgaaaatctatccggaagaatttgaaaagacaccgaagaagagcatcaagcgttatttgtatcaggaagcaaaaggctgatagattatcagctgcatagagaaagatataacttaaaccgaaaaagagaaagaaatgaagataaagaaaacaatacttacggcagctatactaatggctgccgtttctttaccggcacagaacaagagtgcagggatcaatatatccatctggaaagatatatgcacgcaaccgcatgacagtacacagacgacatacataaacatcggcctcctgtctaccatgaaccgtctgaacggtgtgggtatcaatgcgttgggaagcgtggttcatggtgacatgaacggagtacaaatcaccggattagccaacttggcagggggtactatgcgaggcgttcagctggctggtatcagtaatatcagcggcgataacaccgtagggctttctgctgccggattggtaaatatcactggcgacagagcacagggagtagtcatatccgggctaacgagcatcggaggagacaacaactcgggcttaatgattagtggtttcatgaatgtgacgggcaatatggcttcgggcttacacttttctggagtagcaaatatcaccggacagagcttcggtggtctgatggcttcgggacttttaaatgtagtaggcgaacacatgaacggtttgcagatagcaggaattgccaatataaccgcatcaaagctgaatggagtgcaagtagcattatgcaactacgcaacgaaagcgcgcggacttcaaattggtcttgtcaattattacaaagaagatatgaaaggtttccaacttggtttggtgaatgcaaatcctgatacaaaagtgcaaatgatggtatacggtggaaatgcaacgcctgccaatatcggggtacgattcaagaaccagttgttttatacaatattgggagtgggttccatgtatcagggattgaatgataagttttcggccagcgcatcctatcgtgccggtctgtctttccccctctacaaagggttatccatcagcggagacctcggataccagcatatcgaggcttttgacaacaaagatgaggtcatcccgaaacgcctgtacgcattgcaggcacgtgcaaatctggaatatcaatttaccaagaagttcggcatctttgcaacaggtggatatggggtaaccagattctataataaatcgagcaattacgataagggagctattatcgaagcgggtattgttcttttctaaacttattcaccacagaggacacggaggacacagaggtttactattttttattcactatagagtaacacagagtctcatgtatttagaatcgtatttatcgctctgttttacttgcagaaagaaaaaaactctgtgtcctctgcgtcctctgtggtgaataaattcagaaacgtgcaactttgagcatactgattacttattataccttttctttaatcaaaccagtacgataagcaacgagcaatttcttcaaatcctgtatttgagtcaccagttcttttcctttatcggtatctttcaccatcatccgttgcgaattgaattccaagacaaagttggtagatttgatatcaagtccctcttctatggctttctgacgagactggaacggctcgtgctgcacaagctgcataccatgagagtgataaacaagcgtatatcccgcaattcccgtttccggctgataagcttttgagaatccgccatcaataacgaaaagcttgccattggctttcattggctgttctccctgaattgttttcacaggcacatgcccgttgatgatatgcgagtgagggccggaagctccaaactctgccaaaatctgatcgcagacatcttcccggttacgcaatgtataataataacctttcttctctttatgcaattctttatcttctacgaaataacgctcaaaggtcgccatcttatccttatcgaacaagggagcttccggaccacaccacatataccaaatgtaatccatagcaaattccttatcttcctccccttcttcatcgaagtacgcagtacgaatcagttgatcggctttatccagcaatttacgcccccaatattccttaccacgtattttgacatgcttaaagctgccatcctcattcagaggaacagaagcgtgataaagaagattcgaatttgaaaccagatacattccgccgtatgtaaacaggcaacgcatgtgtttcttcagcttttcactattcataaatgaataatgaatcttttctaccaattcgcgttcttcttccgtcaaccggtaaggatcggcaggatctacggtcgggaagttggtatcgcgcaaagcgtattcttttccttcgtatacaaagacgccacgttcaaaatcaatcttttccagcagtttacggttggtcatcccaaactccggacgacggtcgataatttcggcttccagcttaaactggataatggtaatggctttatgcatttgagtgatcaagcgcagagtcttctcattataatgagcgtcggcaaaattcatcttcggcatgaagatggtgcaaggatcatcggcatacgtatccattgcaaaagtagccaatggaagcagattgattccgtatccgtcttcaagcgtgcccaggttgccgtagcgcatggacatacgtatcacgttggcaatacagctgtcgttaccggaagctgcccccatccagagaatatcatgatttccccattgaatatcgaagttatggtaattgcacaacgtatccatgatgatatgcgcgccagggccacggtcgtaaatatcgcctacgatatgaagagagtcaatagtcagacgctgaatcagattgcacatagcgataatgaaatcgtcggcacgcttggtagtgataatcgtgctgataattacattgatataagcatgcttgttcggctcgatggaagattcgtgcaataattcctgaataatatatgagaactcggcaggcagcgatttacgaaccttcgaacgggtatatttggaagatacattctgacagaccttcaccagttggttcaaggtaatcagataccaatcatccaaatccttttcacgggctttcactaattgaagtttctcttcgggatagtaaatcaacgtgcagatttctttcttttcagcctcgcggagagtgttgccgaatatttcatttactttacgttttaccgcacctgaagcgtttttcagtacgtgctgaaaagcttcgtattctccatgaatgtcagtcaggaaatgctctgtccctttaggtagatttaagatagcctccagattgattatttccgtactagcatcggcaatcgtaggaaaacttcgggaaagcagttgcaggtaacggagatcgcccacaatgctttcaggagttatgttactttgagcagtcattttatttactattttactatttacaatttactagttactaattacgatccagcaatatactattctcaatttaacaagaacatcaacaacacttgggcgataattacccgcaggaacatacatagcggataaacagtcgcataggctacggatgggttgtcgccggggattgtatcgtttacatagttcagtgccatcggatttgccatacttccgcacaacataccggatacagaaccgaaatcgatcttcatcatcttgaaggccacgaatccaaccaacactgttggaatgatagtcaatccggctcccaaaccaatccataataagccttccggacggaatacggtatcgaaaaagtgagctccggcatccagtcccagacaggcaaggtacatggaaagtcccaaggcacgcaacatcaggttcgcgctacgggtggtataggtaatcatgtgtatccgtggtccaaaagtccccagaaggataccgacaatgatcggtccgcccgctaatcccaacttcacaggagtactgacacccggaaaagagaaaggaatagcccccagtgccaaaccaagcacgataccgataaatataacaaccagattgggttctttcaggcttttcacggcatttcccaatactttctccacattctggatagcagcagcctcgcccaccactgtcaggcggtcgcccagctgaagtatcaatcccggagtagcaagcagttgcacccccgaccggtaaacacggctgatattaattccgtaatggtttctcaaccggagtgcaccgagtttcttaccattcagttcgggacgggtgacaacgatacgctgcgagatcaattcgctgtcaatcgcattccagtcaatgtcctctttattccaatccgtattttcctgttcaccaaaaagcactgtcagggccaaagcgtctttttccgcagttaccaccagcagacggtcgccttctttcagaatcttgtctgaagtcggaatactgacatgtccgtcacgccacaaacgggatatgacaaacttcgggtaactcatacgagctatatccttgatacttttattgaaaatagcaggattgtgtacttgaaacgctgcaatataagttttgttcgcatcgtctttctcttttatctccaaatcttctttgcgaaccaatactttacggattaataaaacggcaaggattacgccgactactcccatcggataggccaccgcacatcctaaagcaggcgtactgctgtttattcccatctgtttcagagtttgttgcgcagctcccaatgccggagtgtttgtcgttgctccacaaaggatgcccaccatatcaggaagagagacacccgttgcataactagccaccaccgtcaacaacgttcccagcagaacgactcccaacgccaacatattcagcgttaccccacctttacggaaagagctaaaaaaaccgggaccgacttgtagcccgagggaataaacgaaaatgaccagtccgaaactttctgcgtagtttaacatctgcggatcgaccgaaagcccgagatggccggccaggatacccgcaaaaaaaacaaaagtgactcccagggaaactccccagaaatgcactcttcccaagcccaaaccaatggcagaaatcagtgaaagtaccacaacagcctgtaaggcagaatgttcgatgaatagactatataaccactccatgtatataaaaactaatagggcgcaaagataaaaactatttagtccggttcaaaacttttaagctttcatttcgcgccccaattataccctgattcatatatcctgaaatcttattgattacccttttacactgttacctgttattttgtttctaatatctgttatatttctatcttaacaatcttatcctttctctttttacccgcatcgtgttatccttccaaagatgcttttttacctgtttcttccttacgcttacctatctctttatctttttctaatttctttatctctcctaatttcttaaccttttcttatttcttcctgcttcacgtttcttcctgctttacgcttcatcttgtttcacgtctcatcttttcccttgaaactccacaaagttatttcgtccgtccagataaccgctcaatctgtttccaccgatatatacatcatccaggtatgaaacatcattcggtccgtatgacatacgaatggaagtctgtgcataattttcccaactccaacggaaattatattcatattgatcgactgttccattaggatattccacccgtatatagtcgattccggtacggtctaaaaagaaatccagttcctgacggcaatagttaccgtccatgtcgcggtagaaactaacccaggttcggctacataaatcagccgaacggttatagtaccctgcaccattattatcatcatcatagaaactgtctatttccacttcgcaagaggtaaaacttaccatcaatatagccatcaacgccaaaccgaagtatttaaatgtgctcgttttcatattcctttatttttaatggttctctaattattatatatcatttatctttcgatagaacaaaagtagagaatgaattttccccatgaaactgaaaactcctacttatcaggaggaaattgcctaaatctaggagtaaatccctccggcgaagtctatttcaaagaattcttgtatctttgcctcttgctaacaacacatgaaattatccgtcgcatgaagtctatcaaatcacatatcacccaattattgaagtctctcaatgagggagtattcgaaaaagagcataccatcgcactgtctctgctatccgccatggcaggggaaagtatctttctgctgggccctccgggagtagctaaaagtttggtagcacgcaggctaaaactggcatttaaaggcgcagatgcttttgagtatctgatgtcccgcttcagtacaccggacgaaatattcggccccgtctccatttcaaaattgaaggatgaagatacgtacgaacgcatcacaaaaggatacctgccgacagcatcaattgtctttctggatgaaatatggaaggccggccctgctatccaaaattcccttttgacggtaatcaatgaaaagatataccgcaacggacaatttacggtgcgtgtacccctgaaagcattaattgccgcttccaacgaactgccggcaaaaggtgaaggactggaagccttatacgaccgtttcctgatccgtcagtttgtcggatgtatcgaacaggaatatgcgttcgatcagatgatttcttctacgcgggaaatagaacctgaaatccctgaaaagctccaggtgaacgatgaattatacaaccagatacaagctgaaagcgaaaaagtaggtattcactataccatttttgagctgattcacaatatcaaacgagaaattgaacaatacaacacaggacgggatgaaaacacccctcccatctatgtatccgaccgccgctggaagaaaatagtaggtctactccgcacatcagcctatctgaatgaatctccgggaattcatttctccgactgcctattgatgagcgcctgcctatgggatgaaatttcgcagctccccattatcgaagagattgtagaacagtcgatagcacgaggcatcaacacctatctgttaggagaaaaacgactggagcaaaaactggacacactgaaagaaaacatgaagtccgaacacagcctacgtgaacttagcgatccgggaatccaagtcgtagacaccttctatcatcgcatagaaggttatcacattgccggaaatctactcatttttgcttccgattaccagtctttgaagaaagacagcaaccgactgttttatatccaacaagataaattccgtccggtcaacaaaatcctaaaagcctacgattttgtaaaaaacagaaatatcgcgcaaaagaatatctattccctccgaaaaggaagacggtctgttttcgtcaacaatcaggaatatccgttactatgttatgacaattgtgatcctttgcctgcacaacaggatggcaacactccgttcgaatttacattgcaggaagtgatcgacttgctgcatcaaatggaagtggaatataaaacaatctccgagcgggaaacagcatatacaaaggagcatcttttcttaagctcatcgcaaaaaagcaagatcaaacgaattttaggagagactgcacatatcatagagaattaccgaaacgaactccgcatcatcgctcacgcccatgaacaagagaacagagagtattaggctcaaacacctgcaagacatttattacgaaaaattgcagggaatagcctacgatgtgtacgacgaacaactgcacaacctggttatccgtcccgaagaactggatgcggacattcaccggtattttcgtcacacgcaaccctccctgcaagatttctactcccactacgcgtcgcaatgggaatactttcatgaaatgaatgaagcatccgacaccaagtttctccatttcctgaaaaacagcgcctacacgttctcaatgaaatatcacctggtagacctcaacgtaaaatactacctccagcgttttgacgcaatcagcccacgctctaaagaatggaaagcgttgcggactctcttcttcgacaaatggcacacactgctctcgaacaacgagttcaactatcagatggaacatatcgagcggctttgtgatgatttctaccgtcttcagctatcacttgccaaaaatcttccggtacgtggcggctcacgcctcgtctggttactccgcaaccataaacagatagcagaacagattttagaatacgaagaaacgatcaaacgaaatcccgttatccgtgaactggtagaaatcttgggcaagaaacaccaaagcagccggaaacgtttcaaaatgactgccggtattcatcgggaacaaattatatctcatgccacccgaagtgatattgctggtatttgcgaaggaaacgacttaaacagccttcttcccttggaatattgttatctggccgaaaaaagcctgcaacccattttctttgagcgtttcattgagaagagattgcaaatcatcgactatcaatcacatgaaaagcaaaccatcaacgacaagaaaacaatagggaacgaagtttccgaagaagccgaaggtcctttcattgtttgtctggacacttccggttccatggcaggcgaacgggaaagaatcgcgaaatccaccctacttgccattgccgaactgacggaagtgcaacatcggaaatgttacgtcatcctgttttccgatgatatcgagtgcattgaaatcacagatttaggcagcagtttcgatcgcctggtcgatttcttatgtcaatcctttcatggcggaaccgatatggaacctgtcatcacgcatgctttgcgaaagatcagcgaagaaggatatatggaagcggacattatcaccgtatcggactttgagatgcgtcctgtcgaacaactactatcccgaaccatcgaacacgcaaaagcgaaacagacaaagatgtacgctatttctttaggtggcaagagtgccgagaccagctatctgaaattatgtgacaaatattgggaatatagcattcaaaacgccgaaagtcttaataaaaatagaattgaggaatcaaatatttaatcaatgttataaaacatctcttttttcttgttttatttgcaaagttgacagaagtccgtatatttgtactgtgtttttcatagtattagatttaaggttaacaaaaagattggctgtctgggatagatagcctttttttatgtccttttcttacgtcaaatataccgtcactatcccatccggatgtttaccctatcccatgaagataccgtcactataataagcggatagcgtcaatatgtttcaagttcccattccatcgataaaaattaaaagctttcgaaaaaaaaattcttccgtttaacatttgaaacatagcaggttatctcattttacaaaaaacaggtaaaaaaaatcttgctaaaagatttgcgtagtccaaaagttccccctatatttgcaccgcatttgagagagaatgcgggttcaaggaagtttgggtgagtggctgaaaccaccagtttgctaaactgacgtactcgtaagggtaccgggggttcgaatcccccagcttccgcaaaaaatctcaatataaaaaagagctaagttttaaagacttggctctttttaatctatcaaactccggtgggttcgtctaacggttaggacacatgcctctcacgcatgtaatacgagttcgattctcgtacccactactatctgattatcagcctcttactagcaagtaagaggcttttttattgccctatatctatatcaaagtatcgtttttaggcgttataaagaagtattttcaaaagaaaaatgcaaatttaatgcaaatattcatcttgaattattatcgtgctatcccattaatgtacctacctataaagaaaaagaggaaatgcagttaaactacatttcctctttttctttatagatctcaaagcaagattctttatctattctcaaccggactctttcttccctcctctgcccggccaggtttacgaacaagttgaaatacagttggctgaaagaaaggttggaacgatcataggttatatcaaatgtccaagttctacggaaagaatcgaaagtagcgaatggttgctcacctcctttacacataaacacttccgggaaagacgtaggcggataaggctggaataagcccgctaattgggcatacacatagtcaatcatccattcgtctcccgtcaaggtcaattcccctttcaagcggagtttgattgcataactggcagtcacatcagacgaggtataaacagggacttgactttctaccggatagttaccgtctttatatccaaggctcatcgttagtttagaccggccgacgccattaaatccatctacttcctgatccgccaactgatttttcaggttaatcataaatgtcagtttaccgagagtcgggtcacccggatactgcgcaagcgtgtccaacacataatcttcggtattataacttcgggctatcaaatctccctttcctgcctccaaagccggaccgcctctttccacatccacgttgccaaccggataataaatagcatcattatcccttacgcagccactcaaacaaaacagcaacactgccaagcctattatcttattcataatcaccttacttcttgattttgcggacaaatatacatcttttttataccacccttgatttatgtcaaccgtttttagtatttttgcacacatcaagacagaaaagacatggatacactattaagagagactgtaaatgctgttgtcaattcccgctttccggagatgagtatagaaggaagacggcagatagaaagcatactgattcgtgaagaattccccaaaggagccatagcgctcaacgaaggagaagtagcccacgaacttgtttttgtaggaaaaggcatgcttaggcagtactattacaaaaacgggaaagacgtgaccgaacatttctcatacgaaggatgtatcgtgatgtgcattgaaagttttctgaaacaagtacccacccggctaatcgtagaaactcttgaaccttccattatttacttattcccccgcgacatgatacaaaaattagcgagggagaactgggaaatcaacatgttctatcaaaagatattggaatactctttaattgtatcacaggttaaagcagactcctggcgtttcgaatccgctcgcgaacgctataacctcctgctcgaaacacatccggaaatcatcaaacgcgcgcctctggcacacatcgcttcctatcttctgatgacaccggagacactaagccgtgtacgctccggtgtcctatgattttagcggcttttccggtattcttttggagacataccggtgtaatgcttgaagtatttcccgaagaaagattggtttgcaaaattcagccggtcggcaatctcctgtatattcatacttgaagaattcaggagggctttcgcttccagaatcaccaactcgtcaatccactctcccaccgtttttccgctgacttctttcacgactcccgaaagatgtttcggtgtcagacacagttggtcggcatagtattttacgctgcgttcagactggtaagactccaccagagactcataaaagcgttcgaagatgtactctttccggcttttagtcttcatcgtagtagcgtttgcgggtgcatgattagtgaaaatagtgcaaagctcgaaaaagaacccctgcatcagtcccattaccacctccctacggtataaagcctccttattcctcaaccgtttcctgataaacgcgtgatactccttcaccacctcctgctcgtgcggagtgaggtcgaaacacggataatctttcagatagaaaaacaaagaaagcacatttccgatcttaggcaacgtctccagcaagttcttcgacacagcaaagaaaatgcctttaaaatcgtgactgaaataccgctgctcgataatctgattaggcagtgctatcaccatcagtccgggacacaattgaaattcacgcaaactaatcttaaaagtaccggtaccctccagacaaagccccaccgtcaacacttccagtttggtaggcccgttatacaacgatataacgctctccgtatcgaaaagcgctatatcattatcaacaacatcaatgttgtcggcatctatatgtttagaatgaactaccgaagaaatacctactttcggaacactttgaatatccatactctctctttttttggcgacaaatataccagcatttaatcagatatacaagccaatcgggagcattatcggacataatgaacacttttagatacttatcgaacagaccggaacagatattcataatcacgtttggcagccggcaccgtccacttttccgggacaaacttccactgattgagcgctttcgggtccatcgttcctttctcctcaatgtaattcatcaggtagaaacggagatccttatccgtagagaaaataatgcggtctttcaacttctcctgcgggatgcccgcccctttcgtcagcaattctccgccaccattgccacggtaagaattcaaggccaccttatatatcttatccatgcggaaaggagaaccatcagccatgcttttgatcgttatcttctcgccctgcggtttagtgacatccaccgtataaataatgcccgaagccgagtcgaaattaaagctataattctggaaagacgctctatcctccgcaccttcacgacgcttctccttaaaccagagcagatgatcttccggtgatttcatccggttcgtccacatataataagacatctccaagaaatccttaatctcctttccggacagagtcatcacatacagcatgttctcatacttatataaattgaacatatcactcacaaatacatcccccttctttatttccgagtcaaacgaaagcggagcggcaaacgagatgtcggcaccggtgatgtcgagctgcaaggtatgtatcaggtcgataaaggcagaagggccgaagaaagcaggatgagtggagatactttcggtaaaagtgccgatcttcttcgaaacgaacttctgcaccgtttcatattgcggggcaaaacgcttcataaactcctcgctgattccgtaagcctccgtttccgtcaagacacccttgatatccttgctctgcacctttccatctttcagtttcaaggtcacatctacattagacaaaacaatcccattgctggccggatcgataatcaacaccgagtctccggcaacattcatcaccttcttacattcgcgggaatgatcgtgccccatcaatacgatatcgaatcccggcacattcttcgctacgttgagagaagcgttctcgttgtatttgcccgacattttgaaagcctcctgtccggcatggaacaagccgatcaccaaatccgggttctctttttcacggataaccttcatccatttgcgtgccgtctcttccatatcatcgaaacgcaatcctttccacaggttttcggagagccatgcagggatggcaggggtaatcattcccaataccacgatcttcacgccctcacgttccaacactttgtaaggagccagatggggctgtcccgtagacgtatctatgatgttggcacccaacacagggaaatcacaagtggcgatccaacggtcgaaaacggcacgtcccgtttccacgtcatggttacccatgttgccggcatcatacttcatgtaattcatcatttccgagcaaagatggggagacaccgtatctatataattatagtaataggcagtgggctgtccctgcaaaatatcgccgttatccagcaatatcagattctccttatattgctcgcgctctttctgcacgaaagaataaatccgtgcgagactccccttccactcgtggcgggttataaaattataaggataataattgccgtgtacgtcacttgtttctacaatcttcagtttcaccaccttctcctgcgccgcaacagacagagcgaggcagaaaagcaagccataaattaatacgattcgtttcattctttttctatatttagatttaacggatgagagaatacaaaccgcgccccaccggtatagtcagggtcgatccatatacttcctttccatttgtgcacaatcaatttacagatagacaatcccagtccggtaccctgggcatattcattcagtttctcaaaacgctcgaacacaagtccttgtttttctttcgggataccgcatccggtgtccgtcaccgagaagacagccatttgcgtttcctcgttcacagaaaagtccaatgtgatcttaccgcattttgtaaacttgttggcgttggacagcaggttaatcatcacttgctgcatacgctgcacatccgtcaccatccggaaagattcgaaagaagtggtaaacaagaactggttttccgacgactgccgcgaaaaactaacagacgccaccacctggctgcacaactgcaccacgtcacattcctcccaagtcagcgtcacccggttggcctccagacgtgaaaggtcgagaatatcgttaatcagccgaagcaacaaatccgaattggttttgataatctgataataagactgctgttcctcctccgtgctaccgccaacggccaatacatccgaaaatcctacaatcgaattcaacggtgtgcgtatctcatggctcatattggcaaggaaagcactcttcagacggttggactcttccgccctgtcttttgctacgcgcaagtccttctccgatttcagcagctcatctttcaggcgtttcgtacggaaataatagaagagagagatgcacaagccgagcaccagtatcacaaacaaagcacaggcagaccatatctgataagtatattgctgatagaacgaaaccggctggttgacaagctgcactttaaaaggcaataccgccgggtccagcccccattccttcaccttccggctatccaataccgctttgcagccgattaccgaaagatgtttcgccgtatcctgcgggtgcgtatccatccgtacagactccatagccatttctccacccactttccggtagtcgggcaacacccctcctatcgcccaatgaccgagactcaccgatgaaggggtaaaagtcggaatggtaggggtaacttccatcatggcatacgtggcatttctcatgaaatacccctcgttcatatccacccgccacgttcctaccaggatcaccgtgttttcgggcagttgcctcaactcctcaacgatggtataaatagaatgtttccgtccatccatcagaatcaaatccagatcggggaatttcttcatttcttttcgcaccaatgcttgcatggtcactccgccatacgtgttgtccgaaataaaggcaatgtgtttcgttttcggatagaaggcttgaatcatctgaatattaccctctatatcatattggttgataaatcccgatttgagttcggggatattcagatggtcatcgaagagatcgacagattcgggcatccagctatccaggctttccacggtatcttccggcaatatcaccacgttgctactggccagactgcacatcacgggcactttcacctgcatttcatcccgctgcgacaaataagcggcccatgcttcctgacctaacaagataatctgcgccggatgcttttccccttgatatttagcaagaatctgtgtcatcattttgctccatagcggagcttccgagaagcttttacagttcatattctcgatgatgatgtcgcgctgtcctcccaacttactatattcatccatataatcggaaatagtgaccgatgtttggtgcgctgccggattataagaacagataatcagaataggtttcttatcgttagagacagccaagaccttcgatgactgcaggagccaaagaaaacagataaaaaaatatccaagacgtcccagcataataatgcagttttgatgtgttaattcattaattgagttgcaaatatagtaaaacttgtcgggtttaacagatttatatgtatttttgtcgctcatttactgtcaaaaaatacaaattatggaattatttcacaagatgatttccggatttctgggcataccggaaagacaaataagcagcacgctccatcttttgggcgaaggtgctacgattcctttcatcagccgataccgcaaagaagccactggcgggctggatgaggtgcaaatagagcagatcaaagagcaacacgataagttgtgcgacatagccaaacggaaagaaacgattctcggcaccatcaccgaacagggcaaactgactgcggaactggagaaacgcatcaacgacacctggaacccgacggaactggaagatatatacctcccttacaaacccaagcggaagacacgtgccgaagtggcccgccagaaagggctggagccgcttgccaccatcctgctgttgcaacgggaaaacaaccttagcgccaaagccgcttcctttgtgaaaggcgaagtgaaagatgtggaagacgcgctgaaaggtgcgcgtgacatcatcgcggaacaggtgaacgaagacgagcgtgcccgtaacgcggtacgtaaccagttcgggcgccaggcagagattacggcaaaactagtcaaaggaaaagaggaagaagcagcgaaataccgcgattatttcgatttctccgagccactgaaacgttgcacgtcccaccgtctgctcgccatccgccgggcagagtcggaagggttgctgaaagtgtctatcaatcccgacgacgaggcctgcatcgaacgtttggaacgccaattcgtacgtggcaacaacgaatgtagccggcaagtgggcgaagccacgacggatgcttacaaacggttgctcaagccttccatcgaaacagaatttgccgcccaatccaaagagaaagccgacgatgaagcaattcgcgtattcaccgaaaacctccgccaacttcttctcgctccgccattgggacaaaaacgggtgctcgccatcgaccccggattccgtaccggatgtaaggtggtttgtctcgatgcgcaaggcaatctgttgcataatgagaatatctatccgcatcctccgatcaacaagaccggcgaggctgcttcgaaacttcgcaagatgattgaggcctaccagatagaagccatctccatcggcaacggaacggcaagccgggagacggaagatttcatcaacagtcagagtttcgaccgtcagatacccgtgtttgtagtcagcgagcagggggcttccatttattcggcttccaaaattgctcgtgacgagtttccggattacgacgtaacggtgcgtggggcagtctccatcggacgccgcctgatggatccgttggcagagttggtgaagatagatccaaagtctatcggcgtgggccaataccagcacgatgtagaccagacgaagctgaagaaagcactcgatcagacggtagagaattgcgtgaatctggtcggggtaaatctgaatacggcaagcagtcatctgctcacttatatatccggtctgggcccccaactggcacagaacattgtcaattaccgggcggagaacggagctttcggttcgcggaaagaactgatgaaagtgccgcgcatgggcgccaaagccttcgagcaatgcgcaggatttcttcgcatccccggagctaaaaatccgttggatcataccgccgtgcatccggaaagttaccacatcgtagagcaaatggccaaagacctgaaatgcaccatcgacgagttgatagccgacaaggaacttcgccggaagatcaatatttccgactacatcactcctaccgtcggcctgcctaccttacaggacattctgcaggagctcgacaaaccgggacgtgacccgcgcaaggctatcaaagtcttcgagttcgacaagaatgtacgcaccatagccgatttgcgcgaagggatgattcttccgggcattgtaggcaatatcaccaatttcggggcgtttgtcgatataggaattaaggagaacggtcttgtgcacctttctcaattagcggaacggttcatttccgacccgacagaagtggtgtccatccatcagcacgtcatggtgagggtgatgaatgtagattatgaccggaaacggattcaacttagcatgatcggggtaccgcaagactgattgcttctcttttctctccccaccacacgatcagaatcgtaaatacaatcataagtactgtgcaaatgagcgagccttcaaaaccgaaggctccgccattcagtacgttttcttcgggcatacgcaaagtcagcatactggtggtgaagttgtttccgcttacctgataaccgaggatggggccttgaatccaattccagaaaagatgaagcgagataggaaaacacaggttccgcgtatatagataggaagctcccagcagcatacctgccagcaacaggttgagcataggcaggaaagcgatttcgggattgaagatatgcataaaggcgaataacgctgccgagacaaaaagtgccaggaatttattcatggtggtatgcaataggcgtccgaggatatagccgcgcatcagtatttcttcaaacaaggcgaccagcaggaaaaacacccacgagcccaacagatccaacggcttgaactggaaaccggtgacttctatctctcccaagacgaacgagattccgaagccgaacagatagagcaggattgccatcaggaagccataccacagtcccttgacgtgtccttttaaggagagccccaaatcagaaaacggacggcgttcgaagcggagcataggaatagcggcggtcagaacggcgagcagcatactggcttcgaggataatgtatcccatcactcccggatggcgggcttccacacccaacaccaacgacaaacatccgcgggccagcgtaccatacaatccaagaaggatgaaaagtatcacaataaacagcgggatacaagcccacacgggaagtcttttgggttctttgcccccagcaatgttgtctgcctccatttttacaatttgttaatccggctacaaaattagatataaaacataaaaaaacatcatgtattctctatttttcctatatttgtcagaacaaatctacaaaattatgaaaataaaactactattgataagtttcttattggccgctaatgcgttaggagcagccgcccaagtgagtaaaacgtattatgtgagtaagcccggtacgctgatttccatgatgactgaagaggaagccaacagtgtcacccatctcacactgaccggcaaactgaacgcggaggacttccgccatctccgtgacgaatttgataatctgaaagtattggatatttcgaacgctgaaatcaagatgtacagcggaaaagcgggcacttatcccaacgggaaattctatatttatatgccgaacttcattcctgcatacgcattctcgaatgtggtggacggagtgaccaaaggcaaagccacgctggagaaagtgattctttcggagaaaacaaagaatatcgaagatgccgccttcaaaggttgcgagaacctgaaaatctgccagatccgcaagaagacagctcccaacctgttgccggaagcgttggcagacagcgttaccgctatcttcgtccccctgggcagcagcgactcttaccgctacaaggacagatggcagaactttgcgtttatcgagggggaaccggtagagactaccctgcaagtgggcgccatgggcaaactggaagaagagatcctgaaagcgggactgcaacccagagacatcaacttcctgaccgttgagggcaagctggataacgccgacttcaaactgatccgcgattatatgccgaatctcgtctctgtcgatatttccagaacgaacgcaacggctatccccgacttcactttcgcacagaagaagtatctactgaatatgaaattacctcataatctgaaatctatcggacagcgtgtatttagcaactgcggtcgcctttgcggtacgttggagctgccggccagtgtgacggctatcgagttcggtgcttttatgggatgcgataatctccgctatgtgttggctaccggaaataagattacgacgctgggtgataatttgttcggggagggagttccgagtaagttggtttataagaaataaaaaatcccctgatatgaattaaaccgcttggttattcatatcaggggataaaattatcttagcgagtatgagattctttcttactgacttgcttctttttgctagcttcatccaatgaggatttattcgctctcactgctatcttatatccgagaaacattcccagtaaaagtaacattagataatcaaataatacagatacccgatctaaataaaaaattgcatacgctccaaaaacataacaatagacttgcattattattttatctgatttcaaataaaatgtccgaatgattccttctgctttcaatggtcgtttaggagtccgtatatagggaaataaataactcatcattccgcctattaatgtaatcgcccaaaaaattaagaatattatctgcacactagatgttagataaggaaccttatatatataaggcaaaaagatacgatatgcaatcagggtaatactacctaataaagctgttttttcatatattgctattaaaagatatctcatatttttataaattaaaagtttattttccaatcaaaatactcctcccatacagttggaccatatatttcttttttttctacttttttcgtatagacttcataggaatcttgtgacgggtcagggttggtaacgtctaatgtttccttcgagaatgttcctataaccccaagaatcatgcctaccattgttttctttcctccatcttttggatttcttttcggagccggatcaccattaggcatcacccccgacacgttagtatcaatactttccgccacattcgcctgattccggtccaatccttctttattcctcctgtctctttttctttgatgctcatattcaggactaatcgcattctttgcctgataaaataaaagagttccaaaggcataagacattttaggagcattatttataatctgccctaattccgcgaatttccctgatgtatgtctcattatctgttgatctgaaggcaatctataagattgcgtgttcgtcaaaggataatagaatggcagaggaagaggagttccattttcatagatcacattaccgcaataatcggtagtagttgtatttcctgcgatactatgaacaacacgtagttttgtgcctgctgcatcataaaggtaagaaatagaactgccatcttcgaactctatacggtccggtaaatttaggtaattatattgaatattgattatctttttattcaaatctttcaataaattgcccttgcatcataatagcactacacacactatttatttcttctttactccctaaacggggctaagtaagtaaagttatcaccaataaaagaaattaccctgatataaattgatgattagtcaacttatgtcagggtaagacaagataaatattctatatcaactattctttagaaaaataatcttctggcaaatttgttacaaattggatcatttgaatatctctatttagaagaaaagtatctaaagcacaacctagtttattcagatagatactttgttttattctgctttttgatggagaatatagctgatatcctctgtctctatcatatcttaagaggcatggttggaatttactccgctgcatagtatctgttacatatttattacgtatttcttttcttatgatataaaattcttcttcgtaatcaaaatctttactgcaataacccgaagaattataaaaataagtaaaaagagaacttttcttttttatcatttcacataaatcaaatttaaacttcatccattttttacctttccaaaaaacatccattgatttattctttatttcaaatgaaagattatccttatgcatggataaatattgcaacaaatcttcacgtcctgttctttttttattaatagacttttcaaaatcactaaatgatgaaaatgtgttatcattagcatcatctattattttccaacaaaaattcttcaattcctcgacagatggatatttcaagttggcgcgataataccattttacatgactatataagtcaaacttaaagtcatagtcaatagaattaccaccttctgaaggcagacttttgcagctatatataactagaaaaagtcctgtaattgcataaactaaaaatcttttcatttttctctattaaaaaacaatcggttatatttatcaactaatgtattggctgcagacttagaatattttagatgaagtatatcaaccccttttttattcataaatctaatatggaaagctttttgcccattctgccaacctccaatatctttcggcatatctctgtctccaacccaattttccatataccctttcattgctcctttaccacctaagacattatacaatccactactacttccttcatactctatattatattcatttctatgtgtatcaagacctaaatatctagattcttttgagtttattccttcaatagagaagtctgtagttggatttccagtatcttctcctccaaaagaattattcacatttttctctgcaatagcagatgttaaaattgcattatcaatcttctgatacacagcaccctcaaaagagtctgccacttttttacttccgaataaactataataaatattattttccgtatgtgtaactcctaaatacattccatttctcactactttatttaaatctttctgcgagtgaatatctgcgctataggaatatttccaaattccttcttcattttgaactttataccaatctttaccatctggatcaatatactttacaggattattcgcacaataattatatggacttactccataatacttttcacttgatggatccaccacatgccatcttcccaataccggatcatacatccgcgccccgtaatcataccaatccaatccaccttttctgtccagttcttttccgttatacttgtaaggctgcaccgaaccggtggatgaagccaagattcctccgaacggatagtaatgattcacctcttccgcttcacgatcttcattgtatacgacacgaacattacccaagtaatctttcaagaagaaatgataactataggaaacatcgtctgcgaaagaaacaaaaccttcaccatcgagaagaatcttgtcaagttttccgttttcatagatcgctttaccacaataatcagtggtggtgatagaatctcccatcgcatggattacctccagtttcgttccgtcggcactataaagataactaattgtacgtccgtcggtaaactctatcgcactcggcaaatttaagcaattataccggattcttgcaattcctttgtttaaatcttgaattaaattgccatttaaatcataagcatattctgctgacgatcggatgccgtctctaaagtttgtgctacttccatacacatcattcttcgcgtagtctgtcacattaagcaaatgattgccctgatatgacagatacaagctgtcaattactccgaaattttccgggccgatagctccacaacgacgcaagccgagaatattgccatttttatcaaatgaagtgacctgttcgtcataacggttcaggttgccggtcagattctctccctcaccatagcgggcgtcagtcatcctgttcatgctgtcataggcaaaacgataacctttactgatgccgtccgtatcatcttcctcactccgccatgctatgctactgatattgccattgtaacagggaacgccctgacttgcattataagaaatttcttcagagagaaaaaaacggcacatcgtttttgtcacctggtcacggacgtcatacgtatatatcgtataggcgcccaatcctcccacatctttcaaaaatacccgacgggcattgtcatacgtgtagtaaagtaaatgattggctctatacgcattatcgacgcggtgatatacatccctaagttctccatctgccagatattcataggtatattcttccatgtgccgctttccgttcccaatctgataggtatgtaatctggcaaataactttccagtatatgtatatgaataaaagtctgtgtcatacccgcccaaatgattttggcaacgtccctgtattattctgcctttatagtcataatataaggcacttgtcagatattgctctttatccaatacttttattttagtcccggtcagtctcccttgtgcggagataagggaggcttcgtgattgatatataaagaatcatactgcactttacctatcttctccaacccgaaagcgagttgggtgtccgttgtgaagttgtaatcatcataataattcacttgcaaaagagaagatagcgtataaggaaaatgctctacttcatacccggaatgaagcactccgtctttctccgcagtcgttcgataagcccttactatggaattatccaatgaaggaggatcattgaatgaacaaagtcctgttaatgaaagccttccctgattatcatagaaagtgaacgtccattcttttttctgtgactgatttccattctgtgacaatataaccctgtcggctttgtcataaacatagcgtattgcagcacagctaggtagtttcttcgaaatacagcgtccgaaactatcatacaagtattgatatgcgtacaaatcgagatttccagccgatatttcatcattaatcatgggtgggagaacatagcgtattcttccgaagcggtcgaatacaaaataggtgtccgcttgttgatttcctctacctatccgggtcagtagcgtacgtccctgcttgtcaacaaaggtgtaagtcggtctaccgtcttcatccgtggcctttgtcacctgcaattctcccgaccgataatctcctctgcgaatcaatgcatcgttattgtctatcaaatagagcgaacaacgcaatgaatcagccgggatattcgtcagatattccatgcgggcgggatgattcccccaagcatctcccactccatattgctctgtaatacgatttagaggggacgattcatagttagtttgcaaataacttcttttacctgcatcatgataatcccacaggataccattcttcaaatcttcaggagccatataggaaaaactagtaggcgccgttatccattgcttctctttccgtcccaaactatcatattctatcaggtgatggtcggctataaaaatagcagtacgattggctccataactttgcgcgaaatcgagttcacgcccaagcccgtcatagaatgttatttcatcatagtttttttcttcattctcctcaagcggtgtccgtacataaatataattatgttctcccggtatggaaggcagtgtatcttttacagcagtaaaagcacttgcactaacaggtcctgaaagcagagttagggcccatataaatgatatactttttttcatatttcttgttcttttaaaaggaatttacagaataccggtaatcataagcctttattgtccgcccataattatctttttgtctattgagccgctgtaagaggtcatattcataataactgaccactccgcacggatccgttatagaggtaactccggccatcggctgatatgtataggatgttatttgcgcctgtggcaaagaagctcttagacgcaccagtttcgcacgatccggagtatcagcttgcataaacgacacgatgtctcctcccatagctgttcggacttcactaatggtagccccctttatttccgctgccagatgcaaatagttataactccaaagataaactgtcttaccctcgtttctgacaacatataaaggatgtcccaaagcatcataatcaatgcaattgtacacttccttcaaagccccctcacctatcctttcccagacagaatagcaaggaaaaaaatgatcggatactccttttataggaacatattcatatttcacctgtttcagttgacggctggttccatcttcggaaataaagtattcctttttttcgacaatcggagacagtatatgcttttgcaccatttgagtatatatatccgaacttgactcacggatccttttataggtttgttttcttattcctccattggcactttctgaaattacttttatcaagccgtcgggatcatattcataatccgtctgcgtacttatcggaaaagagggattgtcgtataaagtatccttctcgcttttcagtctgtaatcatacaaatagaccttgtatgagcaaccatcggcataagttataaatgaggtcgggcaaatataatcaagagatgtcttcattgatcttacataaaggtcggaagagcgttcataagtcagatgcttactcgattgtaaaataccgcttgccgaatacagttcttcacaaagaagttttccccgttctactgatctggaagcataaggtccataaggcgttcggttcgggaatatgattgcctccggggcttcgtccatatgtccattatcgaagttagtatatttagaacggataaaagatccgtccggtcttttttcaatcacttcactataaccgatatgatttccggaggaattgatacatgccggtagcacagactggctgctgaatcttcttattatacgttttacgtctttattcgccccggtgccttctacctgataatcatcaaaatagtactttatctgtcctcccaggaaaccgcttgagattcttgccttttctttattaactaaataatcatccacataaaagtactcattttctactttttcaccactttccaatcctgtatcactatttattatcttctttattcttagtcctcccgctattttcggttggaatgtatcctcgtacccttcccatcgattcattttcacttgtttacaatactcgtgaggctcgaaaacgaaacgtgtatatcctcccgtgggatagcgtagccttttcaaaacgccaaatgtcaaaacattcgcattaggttcgcgagaatcgtaatgagtggcataattatcggtcatcaaacgattgttgtaaaatccccagtgatctacttttccggacaaataaggaggcaattgctccggaaagtcatactccatattaaaatttcgtccgtttgctccccatacaaattcagaaacagattgtagcatcaggcgctgggaggtgttgtcgttgtacgaaaaatggtaatcccggatccactttcctttcttatcttttatttccagattgctcaacttataccatttcaacttgtccaaacaattcggataattatcatataaaggattatctgcaagaaaattcagaaaacgatatttgggatttttacgccataacatatattgaaaagcataaatatcctgcgaatatctcaattccgtagtcacttcacgcgcaaaagttatttcacattcgggaaaagaaatacggttgagataaaccggagatatgagacttccctgataactgtcttcaatagccacatggcttgaagacgagcactccggagtcaagattccaccaccaaatgtaaaagaccccaaatcatcatacagcgaaataaacatttgattgataaaatcgccacgctcgtatgtgtaagttatttcctgaccgttagtcaggataatttttgtcagataccaagctgtagctgtccaaaaatccgtagcttgctgaaaaaatccgatagaatattcaatggcattccgttctttgccaaagatatattgagtgccatcttcagtagtcaaagtaaaaccatcaaaagaaggcgaatatccggaatattgaaatgccgtatttgctttttcaaacggaacatccatccaattaccactaaaatttacctttacaggcctgtcacattgcacaatccatgttttgtcactattcaacataaatttcccatggtaatccaaaaagttgaaatcgaactcgtccggctcaaaatctgctccaccatgactttgagctgttgctttgagatagtcctgtgtattccattgaggagtattcaatgtttcggagtgaaaataatatcccatattcatcaaataggtatgatttttcacattgcaatcatcaggcttgcccttcaccgttctggatacaacacctccggtatttaaattccaccccattcctacccatcccgggtgttggtcaggacgtatcccggcggcatgataattgagagaaaacggcaattttaaatctccgacaggaacttcatataaaggaacggatatatccggcatacctgtaaatttcgaaaccggaatctcaccataaagtcctaaggccgctacattaggactaggtaatgattgtgaggaagcagggatctgcgcatacataatattgttacctagtaaccccactaaaaaaataaagatatataatcttttcatatacaattcattattaattatttcattctaaatagaaaaaacacaggccacacataaacgattatcaaattaacaacctgtaaaaggagctaaccaaacaactatttcgtgcgacccgtgatcacttttacaaattcatcgcattaccgcccacaacgcccagcactgccgaagccactgcgatgactactttcaaaatcatgtcccaaagggattttttcattgccataaccttacacacctcctttctgactctttaaatgattgactgaattcaataaccaattacgtttaatgattagttactttcaatacccagctacttcctgaaaaccttcctacctcattttctcgttatcctattgagaactaagcttttactcatcaggagttcaaaactccgctttcacctcaaaacacggacacgccttgatccattcttccggctcgatttccccgtttccgttgcggtcgggacttaaatcgcgatgaccgcacacccggctaccggggaaagtctcaagtaattgatgtaccagtaagcggagtgccgcccgttgttccggtgtccgcgtgtctgccggacaaccgtggccatccaaaccgccttcgtagcagataccgacactgttcgaattgaatcctttcacgtgcgcaccgatacgttcaatcggtcgggtgaggtgcactgttccatccttgcggatgtagtagtgataacctgttccgttaaatccacgccgacggtgttgcatctccaagtcatccagggtgagagaacggtcggcacgggtggcggaacagtggatcacgatcaaatcaatctttctcatcatagtgccactatttttcttatcagttgtaaacattatctgcactctacgaattaagctgccggatccggagcttcaccgctaccgcctccactacctccaccggagtctccgccaccttcatcaccgggatcttcaccatcggttttctttttcttgggcgcgtcgagatccagaaactcgattttctcaccggcacgggtagacgtcagattgggacggacactgctcgaaggacggaaattgatgttcaccgtcttgatgttcttcatcgtacactcatctttcgtgtccactccccgcgtggtagcggaaaggctgaatacaccaaaatcatggatattgacggatttaccgtcgaacagcgccgtacgcatcgcttctacgagattagtcagcacactctgaatgtcacccaacgacagggaacttttctctttcatcgtgtaagcaagtttatccaggtctacactctgtccctgcgtcacaagttgcggatgatacttcaccaccccatcaacctttctcgggtctttacgacccattcttttaaatggtattgccatgataaattaaaaattgagaattaataattgaaaaataaatattacagattgcggttgccgcaatcaatatcggaagagaggaacgagctctgtttctttttctttcgatacctcaaaggtagtgtattataaggggatggaatgacgtactttgtcttactttgacctagtttgtcttactttcattcagaatgtatttacttttattcagagtgattttatttgacttatatacttggacaagcgggagattttccgtatatttggaatacgataaaattaattttccgaagatatgaaagcagaaaaagaagagatagcggaggagccgtttgtcatacgtccgtatttgaaatcggagctggcacatttatataatccgtatgtaccgttggtgtatgccatgcggaaaatgagggagtggatcagaaataacaaggaattatatgacgcaatgtatagcggcggcgaaggaaaaaacgaccacgcttatagtgcaaggcaggtgcggctcatcgtgaggtatctcgatgagccatgaatctctttagggcaagtgctgattagctataacgaaaataaaattagctataatgaaatcgagattagctataatgaaaacagaattagctataatgaaatcaagattagctataatgaaaacaaaagcggttatgggggtattctgtccaatatctgttttataatgccagccctgcaactgtgccctgtcgacattatgatgggactccgtataatacatggtatcttgaggacaaacagactgtgtgttttcttattgaatgctgttagttttcttatttaataatgtacacgtgcgcaggcgcgagagaatattctttttatatagaaaaagcgtgtaattgaggtggaggggttccacctcaattacacgctttttccatcaaataaaatatataaagagaataaaaagtataagtaaacgatagaaacaaaataaaacgtacctttgcgtctttttagaccaacattttttaacactaatcaaataacacttaaaatcatgagaaaaaagacattttttccgaaggcttcgtttaccagaacaaacaggctgtaacactcgaaaagggagaatttccccaagtatcccagtttatcacgcaaatgcttggcactgtcaacaatttgtataccaacagaatagaggtaagtccaggcgaccgcaagaagtttctcctcccctttgtccatctctgttatgaccatgactctgtttttaacattaaaagccccaaatactttgcagagttgttgtttatggctgttgatttcaagaaatcggatgattcggacgaatcattaagcgtggaagagattgattatgagatacaaagaatgaaaagaacgcttcttgaggattaacacgaaagaaccgactgttaaaaaactgctttttgagtaccaaaagcagtttttttattctacatgaaaagccgtcctttgcagtgtgttaatattgacacgacttacattcatatcaataattaaaatggaaaatatctcaataacgacatacaggggattatcactcgtatcaggaagtatcagtatccggcaaatgttcgaatttatccggggagatgtctatcgcgacagaatccggagactccgggaagcaatggatgcaggagaaacggtgaaagcagaccacatgaagaagcaactgccctactgcaccatcacggctacttactccaaggaaaggctggcttacagtctggacaagtatcaggacatcatcacgctcgactgtgacgatatgccggcagaaaagatcccggaattccgccaactagtgaacgattgccccgacacgctaggcagcttcgtcagcccccggatgcacgggctgaaaatcttcgtctatcttaccggcaatgaagcggaagccttacgcaccgaactaaacgcattgggaaccgtagacttcctcaccctcgaacgctaccaccaccgcatgtacgccctggcaagcagccaatatgaaaagctgctcaataccaaagtagacaccagcggaagcgacccgggacgcggattcttcgtgtcgcacgatccggacgctttcctctctaccgaacgactggaaaacgtgaagccgctgaccgtaaaagtgacactgcccactgaagaagaatgtaaaaacaagaaacgcaagaatccgggaaaacgatccccgctcctccccgtgcaggagaatgcgtcgcccatcgacctgcaagtgcaactcgacttccgcaaggcgctggagtacaccaaacgcaaagaacgtctcgagataggcaaccgggacaatttcttctattgtctcggcaatcagtgttaccaccgccatatcacggaagaggaatccgtcagtctggcacacagtcatttcggcgacctacccgacttcgacctcgaactgcccttgcacaatgcctaccaatacacctcaaagaccgatcaggcggaagaagaaagccaacaaccgagaatatgccaggtcatcaaatttatggatgaacactacgaaattaggagaaacgtggtgaaagagcaaatcgagttccggaaaataatacctgatctccctaaaacagagcagccgcctttcagtacactgcgcacaaaggatgtcaacacattctatatcaacgcacagatgaagaagatatacagttcgcaagctaatttgaaagcactggtggactcggactatgcaaagccgttcaacccgtttgtccattatttcacctcactccagacatgggacgggaaaacagaccacatcggccaactgacaaaaacagtgaaagcggcagaccaggctttttttgaagacagcttccgccgctggctggtgggaatggtggcatgtgccatcgacgacgaagcgcaaaaccaccagttgatgctgctccacggcgcacagggaaaaggcaagagtacttttgtccgccatctcctcccaccggagctgaaggattattatcgcaacggcatgattagtcccgacaacaaagaccatctcctgcaaatgtcgtcctgcctgctcatcaatctggatgagtttgatacgctctctcccgcacgcatgcaggagttgaaaagtctcatcacgcaagatgtaatgaacgaacggaaggtttacgacatccaaaattatacgttcatccgccgcgcatcattcatcgccagcaccaacaatccgcactgtctgccggacatcggcgagaacaggcgcatcctgttcaatacgttgctgggaatagattatcacacgcctgtcaaccatcaggggatatatgcacaagcatacgcactctaccagcaggggtttcaatattggtatgagaaccaggagattacgtttctcaacaaccgcaatgaggcgttccgccaaaaagatccgttagaggagaatcttttcttctatttccgggcagccagaccgaacgatatacaagcaaaatggtatcctgcctcccagctgctgtcaatattgagcatgaacgggcgcacacaggccaacgcacagatgaaacaaatgctggtcacggtattggaaaacaaccatttccactcacggaagacctccaacaatatcacggaatattgggtggtggagtattcggccgaagagcgcaaagaaaattcaatacgcccgcagcttccggtgcagacggggttggagttgtagttttcccgcgaaatggcagttttcacacggatagtcgtttttccacaaaatagcttttttcctccaaatagtcgtttttgcacgaaataacagataaacggataaattagtggcattaaacgtgtcactttcatccgtttttccgtatatttgctcgatatgaatgatgaataaagaaaggaatcgcaatatgatgaagcaaataccatacggattgacggatttcggtcgcatccaaaaagaaaactattattatgtagataagacgatgtttatcgaaaagatagaaatgcaaccgtcttatctgttcctgatccgtccccggcgcttcgggaaaagtctgacgctggcaatgctggaggcttattatgacgttcggtatgccgaccaattcgacgaattgttcggcaatctgtatatcgggcagcatcctacgccgatacataaccagtttctcatcatgagattcaatttctcggaggtgagctcgaatatcaatgaggtggaggaatctttccggttgcattgttgcgggaaactaagacattttctgcaaaagtacgaacatattttgggaaaggaaatctggaacgtgctgaacgaagaaacgctcgaagaaccgggagcactgctatccgccatcaattcgtatgccaccctcaagggagacatcaaaatctatctcctgattgatgaatacgataatttcacaaataccattctttctacttacggcacggacttatatcgaaaagcgacgcatggcgaagggtatatccgcaggtttttcaatgtaatcaaagccgccacgacgggaatgggttctgccgtcaaccgtttgttcatcacgggagtaagcccggtgacgatggacgacgtgacaagcggattcaacatcggaacgaatatcaccaccgacccgtggtttaacgaccttgtaggtttcagcgagaaggaattgcgcgagatgctgacgtattataaggaacaaggcgctctcccgatgtcggtagacgatgcagtgacaatgatgaagcctaactatgacaattattgcttcagtaaaaataaattagcagattgtatgttcaactcggacatggtgctctactgcatgaagtcattgatattgcacggagtaaaaccggacgagattgtagatcccaatatccgtacggactttaacaagcttgcctaccttgtccgtctcgaccatggactgggcgaaaacttctccgtcatcaaggagattgcggagcaaggcgagatagtgactgaaatagtcacccatttctctgcactggaaatgacggacgtgggcaacttcaaatctctgctgttctatttcggactgctttctatcaaaggggtggatatgatggggcgtcccctcctgcacattcccaatctggtggttcgcgaacagctattcaatttcctgattcagggatatgcccgtcatgacatcttcaagctcgacgtgaaccgcttgcgcactctgtttgagaatatgtccttcaaaggagactggaaaccgttgttcgaatttctagcagaggccattcgggagcagagccggataagggagtacatagaaggggaagctcatatcaaaggattcctcctcgcctatctaagtatgttccgctattatcaactatatccggaatatgagatgaataagggttttgccgatttcttctttaagcccagtccggcggcacctgtatctccaccgtgcacgtatctattggaggtgaagtatgcgaaagcaggagcgtcggagaaagagatacgcgcacttgccgatgatgcacgggaacagttgattcgctatagcaaggatgaatgtgtggcagaagctcgtgagaaagggggattgaaactggcaacgatcgtatggcgcagttgggaattggtgctgatggaagaggtataataaagtacttgtcacatcacaaacaccgatttaggtatgcactcacctccacatctgatattgggctaaataaataatctcatcagaacaggtgaatggaatcctatctataaaaatcaggcgcggattgcacgaattgcacgatttctttaaaatcagaaacgtgttatccgtgtaattcgcgcctaagttttatacgatggctacgacatccaagacggggaattacttatccccgtacatcttcgctctcaattccttgatgtgatcggacgtgatatattcgtcatactccatcatcttgtcgatgataccgttcggtgtcagttcgatgatgcggttggcaaccgtttggataaactcgtggtcatgagaagagaaaaggatgtttcccctgtacgtcttcaggttgttgttgaatgcctggatagattccaaatccaagtggttggtcggagtgtccagaatcagacagttcgcattgcggagctgcatacgggcaatcatacaacgcatcttctcacctccggagagtacgcttactttcttcaacacctcttcgccggagaaaagcatacggccgaggaaacctttcatatacacttcgtttccttcgccaaactggctcaaccagtccaccaggttgaggtcggtattgaagaaatcggtattatccagcggcaggtaagcagtggtgatggttaccccccagttgaaggtaccggcatccggcttcatgtttccgttgatgatttcgaagaacgcagtcatcgcacgcgggttgcgcgacaggaataccactttatcacctttctctacgttgaaattgacgtcgttgaaaagcactacgccttcctccgtcttcttgctcaatccggaaacttccagaatctggttgcccggctcgcgttcgggagtgaagataatgcccggatacttacgtgaagaaggtttgatttcctctacgttcagtttctccaacatcttcttacggctcgtggtctgcttgctcttcgctacgttggcgctgaaacggcggataaattcttccaactctttcttcttctcttcagccttcgccttctggttctgctgctgacgaagagccaactggctggattcgtaccagaaactatagttaccggcaaacatattgatttttccgtagtcgatgtctacggtgtgcgtacatacagaatcgaggaagtgacggtcgtggctcactaccaatacggtatgctcgaagttggaaagatactcttccaaccaagtcactgtctccatatccaagtcattggtaggctcatcgagcaagagattgtccggatttccgtacaatgcctgcgccagcatgacacgcactttttccttaccgctcaactcacccatcaatacataatgcttatcttctttcacgcccagtccgctcaacagcatggctgcgtcgctttccgcattccatccgtccaactcggcaaatttctcttccaactcggatactttcagtccgtcttcatctgtaaaatcttctttcgcatacaattcttcgcgttgcttcatgatgtcccacaacacagtatgccccatcatcacagtatccataacggtataagagtcccacttaaagtggtcctggctcaacaccgaaaggcgttcgcccggtccgagcgcaatggtacccgttgtcgggtccaaatctccgtaaatcgtacgaaggaaggtagattttcccgcaccgttagcaccaataataccataacaattaccactcgtaaacttcaagtttacgtcattaaacaacactcttttaccaaactgtaccgaaacgttcgaaactgtaatcatcttctttatttactattttactagttactattttactattttgctagctactattttactatttcgttagttactattttagtattaactattttagcgtgcaaagttagacatttaaaatgaattatgagctatctgatatgtgccaatctgacataaaagcgttacctttgctgcgttttttggcaaaacagccaacttggcaaagtttttgcagacaaaatcaatgacatccggtcagcccggtatgtttattggcgttattctaccaagtaagataacgtgtgtgttaaatagtaaatagtaactagtaaaatagtaaataccaagatggatccgaaagaaaaaaaagtgaaggaagaagaactgaacgttgaggaaactcaaaaccatgcggaagaacaaccgcaaaacgaacaagcggaggacgccactcccctgactcatgaagaagagttggaaaaagaactggaaaaggcccaagaggagattgaagagcagaaggataaatacctgcgcttgtctgccgaatttgacaactaccggaaacgcaccatgaaggaaaaggccgaactgattctgaacggtggcgaaaagagccttagcagcattcttccggtggtggacgacttcgaacgtgccatcaaaacaatggaaacggcaacagatgtcaatgccgtaaaagaaggagtagaactgatttacaataaatttatggctgtcctggcacaaaacggtgtgaaagtcatcgaaacaaaagaccaaccactggacactgattaccatgaagccatcgcggtaatccccgcaccgtcggaagcacagaaaggtaagattctggactgtgtgcaaacgggatatacactgaacgacaaagtgctccgccacgctaaagtggtagtaggagaatgaggagatttatgaattatgatttatgatttatggctgcgctattggtctgcagagtaaatcataaatcagaattcataaatcataaatcttttcaatcataaatcaataaatgggcatggcagaaaaaagagactattacgaaatattggaggtgacgaagacagccacagtagaagaaataaagaaagcataccgtaagaaagcaattcagtatcaccccgacaagaatccgggcgacaaggaggctgaagagaaatttaaggaggcggccgaggcatacgacgtgttgagcaatccggagaagcgttcgcgttacgatcagttcggtcatgcgggagtgagcggtgcggcaggcaatggcggtccgttcggtggtttcggtggcgagggaatgtcgatggatgacatcttctctatgtttggcgacatctttggtggccgcggcggcggtttcgggggaggcttcggaggattcagcggatttggcggcggtggcggttcacagcaacgccggtatcgcggcagtgacctccgtgtgaaagtgaagctgacgttgaaggaaatctctaccggagtagaaaagaaatttaaactcaaaaaatatgtgccgtgcgaccagtgtcatggcacgggtgccgagggtgacggcggatcggagacttgtcctacttgtaagggtagcggctcggtgatccgtaaccagcagaccattctgggcacgatgcagactcgcgtcacttgttctacgtgtggcggcgagggaaagattatcaagaataaatgtaagaagtgtggtggcgacggaatcatttacggtgaggaagtagtatcggtgaatatccctgccggagtggcagaggggatgcagctctctatgggcggcaaaggaaatgccggcaagcacaacggtgtggcaggcgacttattgatcctcgttgaggaagaaccgcatcaggacttgattcgcgacgaaaatgatttgatttataatctgttgcttagtttcccgacggctgcactgggcggtgctgtggaaattccgacaatcgacggcaaagtgaaagtgaagattgattcgggtactcaaccgggcaaggtgcttcgtttgcgtggcaagggattgccgaatgtaaatgggtacggtacgggagatttgctcgtcaatatcagtatctatgtgccggaagctctcaacaaggaggaaaagaacacgctcgaaaagatggaagcttcggacaatttcaaacctaacacgtcggtaaaagagaagattttcaagaaattcaagagtttcttcgattaatctttttactatcatattatcatatataaggtataagtgggctgcaatcttttttgtggcccactttttttatgatattctctaaatagccccccctctcgcacaatcttttcatatagtttacctaaataaggcgcaatatagggctatcctaaaaaaaatggcatatatttgtaactggaagttacgaaaagagtgtaatttat

SEQ ID NO: 8141 - DNA, 4901 bp, Unknown
  gut microbiota DNA sequence
tgatgattcattgcttaatccctcttttacggtcttggctttcgcttctccgatgataacggcaatctcctcaaaagaggcttcttttattcgttttacgctcttaaactctttcaaaagtgctgtttttgtcttttctccgatacctttgatattatccagtgcggacgcaacttgtcttttgctgcgtttatcacgatggaaactaatagcaaaacggtgtacttcatcctgaatctgtgtcagcagacggaataatgggctttgctgtttgatgccaatcgtctgcggaggaaatccaaaaagcagttccgatgtgcggtggcggttatcctttgccagtccggcaataggaatagccagattcagttcgtcttcaacgacttctctgacgacctccatttgaccttttccaccatcagtgataatcaggtcgggtagaggagaattctcttcgatagcgcgttgataacgccttctgacgacctctttcatggaagcatagtcatcaggccctacaaccgtctttatattgtatttccggtaatctttctttgatggcttggccttcttaaatacaacacaagctgccacggcatcagaaccctgtatgtttgagttatcaaaacactcgatttgcagcggcggcctttccaaatgcaattcttgctgaatttctttcattaaacgcatactcctttgttccggattcagcttttccgcctgttttaggcggtcggccttgtactgtttcacgtttagaaccgaaagatccagcaatttcttcttatctccccgctgtggaacggtaaatacgatattgtttaactccaaatcgagttcaaaaggcactataatctctctggactggcttttatagcgttcccgcatttcaataataccaagcgtcaaaagttcctcttttgattcgttcagcttctttttatattcgaacgtgaaagcctgattgatggcgccgtttgtgatgtgcagataattgatgaaagcagagttcgactcgtcttcttcgattgagaatacatcgatattgtgcaatacggagcttactacctctgatttggagcggtaactctctatcagaagatatttctctttcactttctgcgcctcttcaaacttcatttcgctagccaacgtctgcatcctttccagcaacatacgactgatatcttgtgtattccctttcaggatttctttgatttcatctatgtttttgagataatcctcctgtgattgcagaccgatgcatggcccggcgcagttttttatatgatattccagacatacattaaatttgcccgcccgtatgttttccggacttaggtttaaattgcatgtgcgcaagggatataaatgctttatcaggtccaataccgcatacattgatggaatgtgactgtacgggccataataagaggagccgttcctgataacctttcttgttttgaagactctcggaaagtattcattctgcacgcaaatagaagggtaggtcttgtcgtcctttaacagaacgttgtagcgcggcttatatttctttatcagattattctccagcaataacgcatcttcttctgtgttgactacgatatagcgaatatcagcgattttactgaccagtactcgtgtctttcccggctcatgctctttgctgaaataagaatagactcttttctttagattttttgcctttccaacgtatataatcgttccttccgtattcaggtattggtaaatacccggtttctcgggaaggttggctacaatccctttcagatattcattggttttgcttttgctttccggttctacattcataatcgttaggtatgagagatcgctagctgcttacttttgacatattcgctgcaaatagatgcaaatcctttataaagtcaataccgattctacttctacgtcgtctccgaatactgatttcccattcagttctttcaattcaatgatgaagtttacatatacctttttaggttttaatcttttcaccaattcgcaagccgctttcatcgtacctcctgttgccagcaagtcgtcgtgtaataaaactacgtcgttttcatccagtgcatctttgtgaatttgcacggtgtcctttccgtattccttgtcgtagctttcttcaattgtttctgcagggagcttgccgggcttgcggataggaatgaaaccggcgttcaggcgggtggctaaaatcggtcccatgatgaagccccttgattctattcctactactttggtgatccctttatccttatacatatcaaacataatgtttgataattcttgcaggcaccatggatctttgaatagggtggtgacatcgtagaataggattccggggatcggaaaatcgggtacttcccgaatacttttgattagtgtttctttgctcataatcattgaattatatcgtttctttaaatgatttgtttcacgtgaaacgttaccgcctatcgtcccgaaagcacgagcagtacgttgatgtcacttggagagactcccggaattctgctcgcctgcgcaatcgtctccggatctatctttgccaacttttgccgagcttcggtggatagggactgaatggtggaataatcaaattttcctttgatctttatgctctccaagcgtgccagcttttcagcaatcattcgttctctgtcaatgtatccttgatacttgattaaaatttcagccgcttcgagaatctcttcttttcgatcttgatccgaacttgtcgctttctccagttcccgttgaaacgccggaacatgttctattatattctcaattgtcacctgcggacggtttagaatttctatcaacttgcacccttgacgcaggggagttgttcctatcttttcgagagcataattaattaatgccggtttcatcgaatagttgcgtgcgaaagagacgatttgttccacagcttccttcttgcttcttaccaattgatagcggtctttctttgccaatccaagcttaaatgctttttctgtcaggcgcatatccgcatcgtccatgcgaagcaaaatgcgatattctgcacgggaggtaaacatacggtagggttcatccacacctttggtaaccaaatcgtcgattaatacgccaatatatgcttcgtcgcgggctagagtaaatgcttctccgccgtggcagttgatatgcgcattgatgccggctaccaatccttgtcctcctgcttcctcgtatccggtagtgccgttcacttgtccggcaaagaacagatttttgataatcttcgattccaacgtatgttttaattgggtcggatcgaagtaatcatattcgatagcatatcccggacgatagatgaccagatctttgaaagccgggatttgtttcagtgccgcaatttgtatttccatcggaagtgaagaagagaatccgttaagatatagctcttgtgttgtttcgccttccggttccaggaataattggtgctggtctttatcggggaaagtaacaatcttggtttcgatgctcgggcaatagcgtggtccgatactttgtatctgtccgttgaataggggagaatcgggcaaaccttcgcgcaaaatccgatgtacttcttcattagtgtagcatgtccagcattgaagttgctttaagtggtgcgtgctggtattcatgaaagagaacttgtggaagtcacattcgccggcttgtgtttccatttggtcaaaatgaacgctgcgtgcatcgattcgtaccggagtaccggttttcattcttccataggtgatgccgtgacgggcgatggattcggtcaattgataagaagccggttcggccattcttcctcccggtaattgatggcgacctacgtgcatcagtccgttgaggaaagttcctgcggtgagcacaacgcatttcgctttgaaagtgacaccccacgcagtgaccaatccggtaacctcaccgttttcaacgagcagttcgcataccgtatcttgccagatatgaaggttgggtgtattttccagtttctcccgccaggaccagatgaacttagcccggtcgcattgggcgcggggactccacatggcagggcctttcgaacggtttagaattcggaactgaatggctgtttcatctgtcaccaatcccatttgtccacccagtgcatctatttcacgtacaatttgtcctttggcgattcctcctacagccgggttgcaactcatctgcccaatcttgttcatgtccatagtgatgagacaagtcttggaacctaaattagctgcggctgccgctgcttcacaaccagcatgtccggcaccaattacaattacgtcgtacttaaaatccattcctatcttatttattatcaaacgctgcaaagttacggaaaagttgcgagacttgtatcttcaagctgtttttgcttctgaaaatccggggaggaatccggtttgactgaaaaaatcgccgtaattttgagttagaaatatgcagattgttcgaaaatagcccgcttattgttttttgtgattgtatgtttttaaatagaatggtaatagattgtgttttaaattccctgttttgctttctttttgttagttgtgtacttgctcaattatgaatgcaactagagagtaaaaggaaagatttgttgagaagacggattgttgtgggaataaacgtgaggtttacactctaaatttaccctacctcttgacataagtcaaaaaaataagtctgaatgtaattttttgcatgatggcttttgctgttttcgcaaacagctatacctttgcagtgtagttgtgaaactacttatattttaggtattagaaaaaggtaataattaaaaggtattagtttataaaattaag

SEQ ID NO: 8142 - DNA, 54272 bp, Unknown
  gut microbiota DNA sequence
ttcgtgtgaaatctggaggtgggtaatcagcttttcacgttcgatgtagagggcctctttcgtttcgtgcaaccgtttgtagatttgaataatatgttgcgagatttctcccagttcattatgtggaaaagcagattgcatggccatttcgataggctcgttgcggtcggcacgcatggcaaattcacggagctggctgatggaagtgcccagtttgttggtgaatttatagaagataatcattaataataaggtcacgatgatggtaaaccatagatagtgcggatctgcttgcaggttgttgatgaggctgacgttataaggcaaagccgaacggacaatataatctttataacgagtggccgaataaaaatagggaactccggttgtttccgaagtacggcgtacgtcatatccgttgccatgctttattgctttctgtacttccggacgattcagatggttttctatttggttattatgacttggataactgtcgtaaacaacatttccttctgcgtcaataagggtcacacgcaagtcttccagaatatgtttgtcgatataaccgctgattatttcgctatcaaggggttgctcttccaattgttcgtagagtctgctgttgtaatcttgcagttttgtatttagcagttctattttatattcccgttcacgttgatactggtacgcaataaaacaaatggcaaataccagaaatagtgaaataaccgaaagaaacagcttccggctgaaagaaagaaaatgtttttgagttacaggcaggttcataataattacttaattcggtattattacttattcagcttcaaaacagtatccatatccgagacgggtgacaatacgtttgccgtatatacctatctttttacgtaaacgggtgatgtttacgtcgatggtacggtcgagcacatacacttcgtcactccagatacgggccagaatgtcttcgcgtgagaatacgcgtcccttattctgtaccagtagaagcaatatttcaaattcttttttagtcaatggcacttcttcgtcgtcgatacttactttcttctttgtgatgtcaataacgagcgactgataagtaagacgttcgggggctctttccgtttccgttgttaccgtacgtcttaatactgctttcacacgggcaatgacttcacgcagcgagaaaggtttcgaaatataatcgtccgctcctagattgaatccggtcacagtatcgttttcggtatcttttgccgtgataaagatgataggcactttcgctgttttcttgtcttttttcaaaatgttagccattttgaatccggagatttctcccatcatcacatcgaggagaattaagtgataactgctgatatccatcttcattgcctcttcggcagagtttgctgtatcaacctcataaccttcgttttcaagattgaatttcagaatctcacagaggtcttcttcatcgtcgacaactaaaatacggtaatcgttcataagatatatgtattaatgtgatatgacaaagttacgtttttattttatcctttgcaaagatgaggagactttgttacgggcagatgaaacagacgttacaatcgtgttacattctgtgaattccgggaattgatacggaatatggaagtttttgttgattgtaagaggaaaaaacgctcgctatttgttatctttgttagcgagatacaatagaaatgtttgactatagaaactacaaataatgataaaaattgacttaaaacgacatcggaaggaaataataggatctgttgtggtactgttaattctccttggcggtatgtctgtgtttaaatatacttcattcaattccggttttgagattgtagacgatctgggaggaaatatatttccttcggcgattctgtctgttgccaccactgatgcacaagtgattgttccgtcggattcgacgtctttgggaaatccgaagtcgtgtattgccgttcggttgaaatcgaagacagcttatagtcgtgtgcggattgaagtagccgaaacgccttttttctcccgctcggtgtcggaatttgtattaaacaagcccagaacggaatatacgatttatcctgatatcatctggaattatgaggcactgaaaaatgaggtgcaggcagagccggtaagcgtagccatcacagtggagatgaacggaaaagatttgggacaacgggtgcgtactttttcagtgcgtagcatcaatgagtgtctgttggggtatgtggccaacggaactaaatttcacgataccagtattttctttgcggcttatgtcaatgaagagaatccgatgatcgatcagttgcttcgcgaggcattgaatactcggattgttaatcgctttctcggttatcaaagtaaggctaaaggggcggtagacaagcaggtgtatgctctttggaatatattgcagaaacgtaaattccgttatagttctgtttccaataccagcctttcgagcaatgttgttttctcgcagcgtgtccgtacgtttgatgatgcactggaatcttcacagattaattgtgtggatgggagtgtgttgtttgcgtcgttgcttcgcgccattaatattgatcctatcctggtacgtacaccggggcacatgtttgtaggatactatacggataattcgcacacgaataaaaacttcctggagacaacgatgattggtgatgtcgatctggatgattttttcccggatgaacaactggattctacaatggtaggcaaatcacagaatgagatgtcgttactgactttcgagaaatcgaagcagtatgctaataagaagtataaggaaaacgaagaaggaatccattccggaaagttgaattatatgtttttggagatttctaaagaagtgcggaggaaaatacagccgataggaaaatgaagaattaaaaatgaagaatgaagaatatccttgcggcatacttgcatagcgcagcaaaattcttcattcttcgttcttcattcttcattattaattcgtatttttgcccaagtaatcattttaatataaaaggatgcaaggcaagaaatttatctctcccggagcatggttttctatgaactatccatcagactggaatgagtttgaagatggcgaaggctcttttcttttctataatcccgaagtatggacgggaaattttcgtatatccgcatttaaaggaaaagccggttatggtaaagacgtcatccggcaggaactgaaagagaatgattcggcttcgttggtgaaagtcggaacgtgggaatgtgcgtatagcaaagaaatgtttcaggaggaggggacgtattatacttcccatttgtggattacaggagttgacgatattgctttcgaatgttcttttactgtacctaaaggcggagttgtgaaggaggcggaagatgtaatcgctactttggaggtacgcaaagaagggcagaagtatcctgctgaactgatcccggcccgtctttctgaaatctatttgattaatgaagcgtacgaatgggtggtatccaccgtgaagcaggaattgaaaaaagattttcagggaatagaagaagacctggagaaacttcagcaagtgattaatagcggtaagattggctcgaaaaagaaagaggaatggttggcaatcggcatcacagtctgtataattctgacgaatgaagtggaaggtatggaatggaaaacgttgattgacggtaaccgggaagctcctgtattacaatataaagaccgtatcatcgacccgttgaaactggcatggagtaaagtaaaggctggagaaccttgcgacattattgaagagtataaatccgtgattattaatcactaatcactaaccaactaattactaaattacgtggctgtaccttatttacagatagataacctgaccaagtccttcggtgacttggttctttttgaaaatatatcttttggcattgctgaaggccagcgtgtaggattgatagcgaagaacggcagcggaaaaactactttattgaatataatcgccggaaaagaaggttatgatagcggtaacattgttttccggcgtgaccttcgggtggattatctggaacaagatccacagtatcccgaagagttgaccgtgcttgaagcctgtttccatcacggtaacagtaccgtggaactgataaaagagtatgaacgttgcatggagactgaaggtcatccgggattggaaaatcttctggcgcgtatggatcaggagaaagcctgggaatatgaacagaaagccaaacaaattctttcgcaactcaaaatccgcaacttcgaccaaaaagtgaagcaactgtccggtggacagttgaagcgcgttgctttagccaatgcgttgattaccgagccggatctgcttatccttgatgagccaaccaatcacctggacttggatatgaccgaatggctggaagattacctgcgtcgtaccaatcttagtttgctgatggtgacgcacgaccgttatttccttgatcgtgtttgttcggagattatcgaaatagacaatcaacaaatctaccaatataaaggtaactacagttattatctcgagaaacgtcaggaacgtatcgaagctaaaagtgtagaaatagaacgtgccaacaacctttaccgtacggaactcgactggatgcgccggatgccgcaggcacgcgggcataaagcccgttaccgggaagatgctttttatgaattggaaaaggtggcaaagcaacgtttcaacaatgataatgtgaagctggaagtgaaagcatcctatatcggtagtaagatattcgaggccgatcacttgtttaagagcttcggtgacttgaagatactggatgatttttcttatatctttgcccgctatgaaaagatgggcattgtgggaaataacgggacaggtaaatctacttttatcaagatattaatggggcaggttgcgcctgacagtggaacggtggatgttggtgaaactgttcgtttcggctattactcgcaggatggccttcagtttgatgaacaaatgaaggtgattgatgtagtgcaggatattgccgaagtgattgaactggggaatggaaagaaactgactgcttcgcaattcttacagcattttctgtttactcccgaaacgcaacatagctatgtctataagttgagtgggggcgagcgtcgtcgtctttatctgtgtaccatcctgatgcgtaaccctaacttcctggtgcttgacgaacctaccaacgacctcgatattatcactctgaacgtgcttgaagaatatcttcaaaatttcaaaggttgtgtgattgttgtttctcacgaccgctactttatggataaggtagtagaccatttgatggtattcaatggacagggagatattcgcgacttccccggaaactatagcgactatcgtgactggaaagacgcgaaagctcaaaaggagaaagaagctgaaaagccgcaggaagaaaagactgcccgtgttcgtttgaacgacaaacggaagatgagtttcaaggaaaaacgagagttcgagcaattggaaaaggagatagcagaattagaaacagaaaaagtgcagattgaagaactcttatgtagcggtaccctttctgttgacgaattgacagagaaatcgaaacgtttgcctgaagtcaatgacctgattgatgagaaaacaatgcgatggctggaacttagtgaaatagaaggctgatttgtgccattgtatcactagaatagtctgataatgataataactttgataatatatcccggacaacatataaccttgtatgacaaacctaaccaattatcatagccactgtctgtattgtgacggacgcgccaatatggaagattttattcgttttgctatcagtgaaggatttacttcctatggcatttcttcccatgctccactgccgttttctactgcatggacgatggagtgggatagaatggatgattacctttccgaattttcccgtctgaagaagaaatatgccgataaaatagagcttgccatcggtcttgaaatagattacctgaacgaagaaagtaatccttctttaccttgtttccaaaaactaccacttgattatcggataggttccgtgcatatgttatattctccggaaggaaaaatcgtagacattgatactccggcagatattttccgtcaattagtggataaacatttcgatggtgatttggatgatgtagtccgtctttactataagaacctgcttcatatggtagaactgggaggatttgatattgtcggtcatgctgacaagatgcattataatgcttcctgttatcgtccgggattattggatgaaccgtggtatgatgcattggttcgcaaatatttcaccgccattgccgaatatggttatatcgttgaaataaatactaaatcttatcacgatttaggaacgttctatcctaataaacgatatttctctttcctgaaagagttaggtatcagagtacaggtgaacagtgatgcgcattatccggaacggattaataatggacgtgccgaagcattggctgctttgaagaaggcaggctttacttcagttgcagagtggcataacggaaaatgggaagaaagagaaattgaataaagaaatagaatttagtcaatctccaaagtgcctccttaataaactgataatttattttgtttattaaggaggcgctttctttaaggatgttttgagatgttattcagttcttttgcaagcatttgcctggaaaaactcgttcaatgtatcttcatagttaccatgaagcataatatgatgatttcccaatggattcttcagaaaatactcggctggagtattcatgcggatgcgtacttgcgtgcggcacatattaatataattggtattttcagtcaatgttccagtagataagtaatattcgtccagacattcaccgccgcattttataatcgttacgtctcctgttggaagtaacccttgtatggcaattcctttttctgtttcaaaatgattgcggataatgtatctctccgtttgtttgagtcctacggtgcagtgtgccagtatcagctcgttcgtacgggaattaatcatggaaggatttgccataaatccgtccttgcccgtaagcgctttcactgctaaaagagtaaaaatagattgaagatcgccttcacaacctgctattatcccgtcatcattcaataaagataatgccacgcatccggtagtgtcgatttgttcaatcaatttaaagcagctcaatgtcagtgcttccagattttcttcctgacataccttttttatcgcccggtacagccgcatggatttgattaaatcttcgggagttccttcgcggcaggcaagagcttgcgatgctacagctgcacatgatgctccgacttgctcatccgttatttgttgaaattgttcataaatccgttccaatggaatatctacatattcaattccccaacgacgttttgccaacaggtagtctacgttactggcaactaaccaggaagaaggagttccgatgactccgatacgtttgccgaataaggaacgttgtgcacggaaattattatatagtgtatgaatacgcaggatgatagcaggtaattcgccatgtagtatttcgctcttcattccacgtccccgtaaccatgtggagatttccaatgcggcagcaagagagttctgcatgccgtctgccagtaaaatggcagggcgggggaggttttcgaattgctgtatgaccagtctttccaccccaccggtagcgataaaaatgattttgaaatcatcactactaagcttgtccatatcttgataatcgacgagctttacggtataatatttttcaatttcgcttaaaatagcttcgtgtgagctacgtagcgagacttgtttgtgaaggattgaagcaaatgagataaggtgtatggtcattatgatattgttttaagttttccgtatgacaaatgtatagctttcttttcaaattaccataacgattttaaccttgctaaggtttttaaagtttttatgtctctgtattcaaattattgcgtacatttgcagctccaagtagaaaaagtaaatagtaattaagtaatttgtagttaaaattatgccaaccatatccattcgcggaaacgagatgcctgcatctcctatcagaaagctggctcctttggcagacgctgccaagcaacgtggagtccatgtgtttcacctgaacatcggacagcctgatctgcccactcctcaggccgcgattgacgcgatacgcaatattgaccggaaggtattggagtatagtccaagtgccggttatcgtagctatcgcgagaaattagtaggatattatgcgaaattcaatatcaaccttacagcagacgatataatcattacatcaggaggttcggaagccgtacttttttccttcctttcctgcctgaatccgggagatgaaataattgttccggaaccggcttatgctaactatatggcatttgcaatctctgccggagcaaagatccgcaccattgctacgaccattgaagagggcttttctcttccgaaagtagagaagtttgaagaactgattaatgagcgtaccaaagcgattcttatttgtaatcccaacaatcctaccggttatttgtatacccgtcgtgaaatgaatcagattcgtgaccttgtaaagaagtacgatttgttccttttctccgatgaagtatatcgtgaatttatatataccggttctccttatatctctgcctgccatttggaaggtattgagaataatgtggtattaattgactccgtatccaaacgttattcagaatgtggtattcgtattggtgcgttgataaccaaaaacaaggagatacgcgatgctgtcatgaagttctgccaggctcgtttgagtcctccattgatcggacagattgctgcagaggcctctttggatgctccggaagagtattctcgtgaaacgtatgatgaatatgtagaacgtcgtaaatgcctgattgacggtttgaaccgtattcccggtgtttattcacccatcccgatgggagctttctatacagtagcgaaactcccggtagatgattccgacaagttctgtgcatggtgtctctctgattttgaatatgaaggtcagacggtattcatggctccggcttccggtttctataccactccgggttccggcatcaatgaagttcgtattgcttacgtattgaagaaagaagatttaacccgtgcgctttttgtcttgcagaaggctttggaagcatatccgggaagaacagaatgaaatttaagtattaagtattaggtattaagtattaaccgtagcttcttgtgtgtttgctcgtgtgtataattgcctaatactttatgtctaatacttaatactttatacttaatacttaatacttaatccaatgtctctatcacttttcatagctcggcgtatctatcgtgaaagcgatggcggaaagcaggtgtcacgtcctgcggtcctcattgccatggcgggtattgctattggtttggctgtgatgattattgcggtagcggtagttatcgggtttaaaagtgaggtgagaaataaagtcataggattcgggtcacatattcagataactaatctggatgccgtcagttcttacgaaactcatccgattgcggtaggagacagtatgatgactgctcttgctgattatccggagataagccatgtgcagcgtttctctaccaaaccgggtatgattaagaccgatgacgcttttcaaggaatggtgttaaaaggggtaggtccggagttcgacccccattttataaaagagtatttggtagaaggggagattcctgttttcagtgattctgtatctaccaatcaagtgcttatctcgaaagcgttggcaactaaaatgaagttgaaactgggagataagatatatacctattatatacaggatgatattcgcgctcgtcgcctgacgattgccggaatttatcagacgaacttctccgaatacgacaacctctttttactgacggatcttaatctggtgaatcgcttgaacggttggcaaccggaacaggtgaccggtgtggaattacaggtgaaagattatgataaactggaagatataacctatgagatcgcaactgatattgacaacaggcaagatgatctgggaggtgtgtattatgtgcgtaacatcgaacaactgaatcctcaaatctttgcctggcttgatttattggatttgaacgtatgggtgattctgattttgatgataggagttgccggcttcaccatgatttccggtttactgattattatcatcgaacgcaccaatatgattgggattttaaaagcattaggagccaataatttcacgattcgcagaacctttctttggtttgcagtctttctgattggcaaaggcatgctttggggcaatgccattggtttggcattctgtattcttcaatctcaattcggacttttcaaacttgatccggagacttattatgtagatactgtcccggtatcttttaatgttttacttttcgtattgattaatctaggcactttgtttgcctctgtattgatgctgattggcccctcttttttaatcactaagatcaatccggcaagctccatgagatacgaataatcctctttttttctacccgttttctactgcaaaaataatttagtccgttgcgtgatgtggagtgaataatatgtctatatttgcgcccaatttacttaatatcctcttgtaggtttaatttctaaccattatgaataatgtgttaatcctgttggataatctggatgactggaaaccgtattacgagacaagtagtgtcctgactgtttccgactatctgaaaaacaagccggtagaaaaagaccggaagttagttattaatcttagcgatgattacagttataactctgaagggtattactgttcattgttagcccaaacgagaggacagaaagtcattccggatgttgatataatcaacaagttggagaccgggacgggtgttcggatggatcgtagtctgcaagccctctgttaccagtggatacagaagaacaatgtcaaagacgacatttggtatctgaacatctactttggcaaatgtagagagaaaggcctggagcggattgcacgatttatttttgagaattacccttgcccattattgagggtggctttaaatactcatcccagaaatcagatcgaaagtattcaatttcttcctctgaatcggctcaatgatgaagaacaggatttctttgccaacacattggataactttaataagaaaatatggcgtgcgcctaagtcggcgaaggcttcccgttatagtttggctgtattggttgatccgcaggaaaagtttccgcccagcaacaaaggtgctctgcataaattgactgaagttgccaagaaaatgaatattcatgtggaaatgattacggaagatgacgccatccgtttgctcgaatttgatgccttgttcattcgtactaccacatcattgaatcattatacattccatttgtcgcaattggctgcacaaaacggaatggccgttattgacgatccgctttccatcatccggtgtacgaataaagtatacctgaaagaactttttgaaaaggaaaagatttctgctcctaagtcaacgctgatttttcagtcaaacgatcattcgtttgagcagatcagcgaacaggtgggggctccttttattctgaagataccggatgggtcttattccattggcatgaaaaaggtttcgaatgaggaagaactgcaagcaagtctgaagatgctttttgagaagtcggctatcttactggcgcaggcattcactcctacggagtttgactggcgtgtcggcctgttgaatggggtaccgctgtatgcctgcaaatattatatggcaaaaggacattggcaaatttactgccactatgattcgggcagaagtcgttgcggactggtagatacgattcctatttatcaggtgcctcgggtagtgttggatacggccgttaaagctgcgaatctgatcggaaagggattgtatggagtcgacctgaaaatggtagatgataaagcctatgttattgagatcaatgataatccgagtatcgatcatgggctggaagatgccattatcggtgatgaaatgtattaccgattactgaatcattttgaacaggccttggaggcgaaacattattgatgatggagacgggtttatttgttcgtaaagcacagcagagtgatattcttgctattttggaaatagaatgggaatgttttcgggaagatagcttttcgaaagaacagtttgcttatctgataagccgctcgaaaggaactttctatgtaatgatggaaggggatagggtaatcgcttatgtctccttgttgtttcatggcggaactcgttatctaaggatatattcgatagctgtccattcggatttcagagggaaaggattgggacaggcattgatggaccaaacgattcggacagctgacgaatgtaaggctgctaaaattactttggaagtgaaggtgacgaacgctgccgctattgcgctatatatgaaaaatggctttattccggcaggaataaagccatgctattatcatgatggttcggatgctatttatatgcaacgattgattcaataaatttatcttctcatgaaatctccttttcctcgaaagaatcggcaaatcttgaaattcagcgactgtataggttggagaaggtcgaataccggtaatgagaaatagtatttccgatttcctcccatttctttggctgtttggttaataacgacaatttgcatgatgaagcgtagtaaccagattaacagtgcgatgcctgcgactaaccaatgagaattgaggacgccggatgcgatgcctgctatacaggaaacatagaataacagacgggagaaagtctcaaatcccaaaaggtatcgttgtattccctgataatatcttgcggtcgccatatagcttattttttcctctttccattctttgtatcggtacacaggatttatccgtgtggtggcgttgatgtctgtttcgacgcgggtatttgaaggagttgccaactggttgatgaataggtcatcctctccacgttgcaggttcaggtatttggagaatcctttctgttggaaaaacaactctttccggtaagctaagttacgtccgatacccatatatggttttccaactaaagcgaatcccagataacgtaaagattggaagagggcatcaaatgcggtacgtttgtgcaaccatccttttgtacggtcataaccgctataccccaatacgatttgagtctgcggagtgaagttgcgtgccatcagctttaaccactggttacttgccggcatacagtttgtttctgtaaataccagccaatcatgtttactggctttgatgcctaatgtcagggccagttttttatgactgatataacgtgcgctttcaggggtaaaactatggtaaagatgaggatatttttcttccattattcccagtatatcctcggtttcatctgtggaagcatcgttgatgacaatcacctcgaattgcggataatcctgttccagaatagctggcaggattttacgcaggttttcagcctcattgcgtgcgcagagaattacggaaagtggaggcagttctcgtgaaaaatgtacctcttctttgcgtacagccttattatgggcatgtatccgattgtacaggccaaaataatagatgagctgaatgataaaaagaatacctgccgctgataaaagaatcagttcgacagtattgaatgtaaatgtttccatcaaattttagtgtcgtttttacaacggcaaaagtacacaatttttcggtagttccgtcatctcgacgggaggttatttcgtaagtccagatattcttttttaaacatatctacaaaaagaaagaatagcgaaagcaataacgggccgaagatcactcccatgaacccaaataacggcagaccgatgactactccgaaaatggtgataagcggatgtgtatctgccattttcttttggagaataaaccggatcaggttatctgactgtgatacgacgatggctccataagcagcaattccgatggcattaaaccagtctccgcttatggcaaggtaagcggctacgggaaaccataccagtgcggtgcctaccatcggaataatggttgcaaagcaggtcagaaatcccagcatcaatatgttgggtgctccgaaaaggagataaccgatcatggctactcctccctgaatgatagccagcaagggaataccgatggcattggaacgaacaatcatattgatttcgtggatcacttcttgagtattggtctcgttaaatggcagaatatcgttgacgtatgcttccatttttttccctccgatcaacatgaaataaagtacaaagatcatgacgaacaggttgatggcgagactgctgatactctccattatgatttgtccgatacggggaagtatggagacaatgaatgtcaatgtatcttttcctaatacatcatatcctgttttctctttgataaattcggctacttgttggatcggtgcgatatacgtttgtgggtccagattgatatcttgtagtttatttactaccatccagacggtcagtcccaaaggaataaggaagacaaaaatagtttctgcggtaatcagtaaagcacttaggctacgttttagctttcgtttttctaccagatatctcatctgtccgcgtacaagaatataaatagtgagtgctcccaataatcctcccaggaatggagtgatttgtcggaagatgatgatccccataaataggatgatgacgatgagggaatatttccagtattgttctttggtgctcatatcatgtgaaattcgtttatataatgaacaattaaggtataggaaaggtttgttttatggtgagataacgaaatgaaaacagtttggtttcattgagcggatattcgttaatatccaattgatttatgttaaatgttaacggattggttgtttctattaaaccatgttataagatacgctgctttgacctgaaaatttggagataaccgaaaagctcgtatctttgtaatgtgtttttcatagtattagatttaaggttaacaaagattggctgtctgggatagatagcctttttttatgttatatattctgctctgtttgactatcctcttggtttttcacaaaaagcatttgattcccacgtcccactttacagattatgccttctttggcaaaccgctttaaatcctctaatgctttatttttcagtcgtccggtcagttcggtatatgtggtgcgtgtgatgaatccatatcggttgacgtgttcaagtagtcttcttttcagttcttcgtcatccagttggcttgaagcttggaaaaatagtttttgagcccgttccagtttacccgttgctttcttcttgaatgttttggaagcaaggaaattcactccgttgaattgaatggaaggtgaacgcaggtcttttttatctttcaccagtcgggattttatctttccggaaaaataaccgaactcacctacttctacccggtagccttgtcctatgtattctcccacgaggtctacaagttccatcagtgtaccttctaccactcccggcttgtatccggtgcgggcaacgagttgtttcaatagttgtttggtgttgatagtgccgttaaatacaatgctggggtacaacacatccttttctccctcttttgtagtgagagccggtttcttcttaaagtcgtaatatgccattattctgataattaaatatattctctgtattctttattgttttttactgtagcttttatgaaactgcttagtataattttgctcgtcctgttatagggtgtctattgtcctgttataaaaaactatttgttttcctataagaaaataattgttttgttgtaaggggataatgaaaattatgcagtaaaggtatttgttttatgtgaggcggacaagtaattgatgcaatgtttgggaataatcttctaatgtgttgaacaagtgaacgtttcttgtcctgtgccgaaaattatgtttttcagcataagtgagtgtttttctatactaatattattgtattctaaaaaaaatcccttaatattgcatttgtattatttgtcagacaaataatacaaatcataaaattctaataatatgaagatagaaattaatcaaacaacattaatcgatcaggtggaagacagtctgcttacttactttaaaaagaatgacttaaggcgtggagattcaattcccaatgagaataatctggctgcagaattaggagttgcaaggagcgttgtcagagaagcgttgagtcgtttaaaaatgatgggactgattcatgcacgtcctcgtaaaggaatggttctgaccgaaccttctattttaggagggatgaaaagagtgatagatcctcgtgttttgagtgaagaaactattttagatctgttagatttcagaattgcacttgaaataggaatatcaagcgatattttccgtaagataactcctaaagacatcgaagaattaagcgagatagtgaaaatgggaattgtttttgagaataatgaatacgcattaatcagtgaatcggcttttcatacgaaactatataaaatcactggaaataaaataatatccgaatttcaggaaatcattcaccctatacttgtttatgtgaaagaaaaattcaaagattacttgaaacctataaatatagaaatgagtaaaagtggtaaaatagctactcatgctgatttgctggattttataaaaaaaggggatgaaaaaggatatcgggatgccatcgaaagacattttgaggtttataagattttcaaggtcaatcggagtcaggagttgatggcagaaaaagaaagtagtgaaaaggtagaagggatatgaaaaggttacatctcatcattttatgtttatccttaataatattgtttatgaatacatcttgtttgagaaaaaaggaaaagaggatagaggtgcaatgggagaactcattgtcacttccgggttgtgccggcatgtcagaaaacgtcggattggcaggtgcgtattccgggatagtggaaggaaagttgcttgtgctgggcggagctaatttcccggataagtatccttgggaaggaggtacgaaaacttggtggtctactttatatagctatgatttacaaacgggaaaatggactgtttatgatgattttctcgatcgcccgcttgcttatggagtttcaataagtctgccggaaggattgttgtgtattggagggtgtgatcgtacgcagtgtagtgataacgttttcctgataaagaaagaagaagattcatttgtgatagactctgtcagttatccatctttgccggttccgttggcgaatgcaacgggagcaatgggtgataactgtatttatattgctggggggcaagagactatggtaaatgaacagtcgactcatcatttttacatgcttgatttgatgcataaagaaagaggatggcaagaaatgccggattggaatggtccttctctttcctatgcagtaggtgtggctcaaggggaacgattttatcttttcagcggaagaagttatgctccggatgaggcgatggtagaacatacggaggggtacgtatttgagccaggcgttggaaaatggagtaaaatgatcggttcttttcctgtaatggcggggactggtataccatacggggaggataagattctgctatttgggggagtggaagagattcttcctacatcttccgagcatccgggattcagccgtaagttacgattagtcagtacaagtacgaattctctggtagattcgctcgaatgtccttatcgcattccggttactacaaatgttgtttctgtcggaaatcaggtattcatcgtaagtggtgaggtacagccgggaatacggacgccatttattctgaagggaagtttctagaaataaaatgaaatatcaaatctaattaaatgcattatgaacaattatgaaagactggaagggatggttgcggccaccttcaccccaatggatgaaaatggggatgtaaatttatctgttattgaaaaatatgctgattggatcgcatcaactcctattaaaggggtgtttgtgtgcggtacgaccggtgaattctcttcgctgacgattgatgaacgtaaattaattcttgaaaaatgggttgcttcggctggtaagcggttcaaagtgattgcccatgtaggttcaaactgtcagcggagtgctatggaactggcatgtcatgcggaaaaagcaggagccgatgccattgcttcaatagctccgtcttttttcaagccgggaacggtagatgagttgagcgatttttttgctccggtttgcaggtctgccagtggactgcctttctattactataatatgccgtcgatcacaggggttaatttgccggtagatagatttttggtagagggtaagaagaaaataccaaacttggtaggtactaaatttactcataataacctgatggagatgggggcttgcatcgatttggagcagcataagtttgaagttctgcatggctttgacgagattttgattgcaggtttatcaatgggagctgtggcaggcgtaggaagtacatataattatattccgaatgtttaccatgccatttttgaatcaatgaagcaaaatgatgtggaaacagcacgtgcctggcaaatgaaatctatacgtacagtggaagttatcattaaatatggtggaggcgtacgtggaggtaaagctatcatgaaattaataggcattgattgtggcagttgtcgtttaccgattaaacctttttcaattgaggagtatgacaaattaaaaggtgatttggatgcaataaatttcttcgatttttagatataaaaagaggagatgacagtaaaagtatattgctggggtttagctattttactttctgtcattcccctcaaatctagttaaatgcgttcaaaattacctaaaataaaaatactatgaaagtaagaagggaaatattaatcatattttcaatgattttattattggtattgccagccacgtctttgggtaaagaaataaaatgggtgctggaacgaccggtaattcctgtgttggtgaagaaaccggcaagtcctgtattaaaggttactctaatcagggcagacaatcaaccttacgccattcagcaaatagatttagatttattagggagtacggatgcggcagatgttgtttctgttgctatatatggtacacaagaaaatggactgatagatacatcccgtttgctatataaatcacttcccgctgcacgtaaaatatcatttactgataaagtgcaggtaaatcaggattctttgtctttttgggtagccgtgacgttgaaagatacggtttcattggatcaccgtattcagcttaactgtaaccggattaaaacgactaaaggcaatctgaaaatctcggaaaaaggaagtaaacctttgcgggtaggagtagcggtacggcagaaaggacaggatgggtgtgtttcgtcacgtattccgggattggctaccagcaatcaaggaactttgttagccatttttgatgcccgttatgactattctcgtgatttgcaaggaaatatagacattgctcttcatcggagtacggatcagggattgacctggcaacctgttcagactgtattggatatgggagaatggggcggtttgccgcagaaatacaatggagtgagcgatgcttgtattctagtcgataaaaatacaggtgacatttatgtagccggattgtggatgcatggcctgctggataaagatggcaagtggatagaaggattgaatgaaagtagcacggtctggacacaccaatggaaaggaaaaggctcccaacccggaacaggactaaaagaaacctgccagtttatgatagtgaaaagtacggatgacggtcttagctggagctttccggataatataaccacaaagacgaaacaccctgaatggtggctgtttgcaccagcaccgggacaagggattacgttgaaggatggcacgttggtatttcccacacagggacgtgatgaaaaaggacttcctttctcaaatattacgtatagtaaagatcacggaaagacgtgggtgaccagcaactctgcgtatcaagatgtaacggaatgtagtgtcgtacaattgaatgatggtgcattgatgttgaacatgcgcgacaaccggaacagaggacataaagatgtgaacggtcggagaatttgtacgactactgatttgggaaagagttggaaggagcatcctacttcacgaaaaacactggtggaacctacctgtatggcaagcctgcatcgacatgaatatatagaagaagggaaaaagaaaagcatgcttttatttgtaaatccgaatgattatgggaaaagggataaactgactttgaaagtgagttttgatgatggaatgacctggccggaggaacattggattcttttcgaccaatatcgcagtgccggatattcctgcattacgtccatagatgagaattcaataggcatattatatgagagcagtcagtcggatttagcttttataaaaatcgatttaacggagattttaaagtaaacaggcatgaataataaaacttcaaatatatatccctgggtagtagtcggactattgtggggtgttgccctgctgaattatatggacaggcaaatgctttccactatgcgaattccgatgatggaggatgttcgggaattggaatcggctgccaattttggtcgcctgatggcggtcttcttgtgggtatatggactgatgagccctttatcaggtatcatcggtgaccgtgtgaaccgtaaatggttgattgtaggtagtttgtgtgtatggtcgggagttacttatctgatgggctatgccaccactttcaaccaactctattggttgcgtgggattatgggaattagtgaagcactgtatttacctgctgctttgtctctgattgccgattttcacaaagataaaactcgttcgctggctgtgggaatacatatgacgggattatatgtaggacaggctatcggtgggttcggggctacttttgcagcaatctattcttggcataccacgtttcattggtttggtattataggtgtaggatatggcattattctggcatttttcctacgtgataaagagagaggaagtgtctcggagaatcagaagatgaaaaagattccggtattgaagagcttgggaatgttattctctaatgtctttttctgggttatcttattttatttctgtgtgccgggcactccgggatgggcggcaaagaattggttaccaactcttttctccgatagcttgtctattgatatttcagtagcaggtcctatgtccaccatttccatagccttgtcttcactattcggagtattggcaggtggatatatctcggatcggtgggtactaaaaaatgtacgtggaagagtatataccggtgcgttggggttgggacttatcataccatcgctgctgtttatcggatatggtcattctatttttgcattagtcatgggagctgtgttattcggaataggttttggcatgtttgacgcaaataatatgcctattctttgtcagtttgtatctgcacgttacagggcaaccgcttatggcattatgaatatgtgtggtgtatttgccggagctgctattacgagccttttaggcgaatcaatggacgccggacatctgggacgtgattttgcactgcttgctatactggtactggctatgctggttattctggtcacttgtctacgacctaaaacaattgatatgaaagattaattttcaaattttaattttatattttatgaaaaactcaataaagcatacgaataaaatattatcggtgttatttgcttttttatttatttccctaaatattcaagcagatgatatcagttctaaagaaattaaagtctctggtatagtacaggatcaaattggggtagaattgcccggagtttcaatttctgtaaaaggaatggataaaggtaccattactaatgtagccggtgaattctcaataatggtttctcctgacgctactcttattgtttcttttgtaggaatggaaacaaaagaaatcgcgatcaaagggcgtagaaatattgtcattattttgaaagagagttctgtattacttgatgaagttgtagctataggctatggaaaacaatcaagggcattaataacaaattctatttctaagataaataaggaagaatttcaaaaggcacccggacagaatccattattacagttacaaggaaaagtgcccggtctatccttacaagtatctagtgggcagcctggagctgaccctcaattatttattcgtggaggaagttctacttcaccggaaagcgatacgcctttaataattatagatggtataatatcacagggttttagaaatatatcggatatgaatccggcagatatagaatctatagaggtattgaaagatgctgcttctactgctatttatggttccagagcagccaatggtattattcttgtcaagacaaaatccggtcagaaagggaaacctgttgtaagtctgcgatatacatacggagtggagcaacaacctcagcgaattccattgttgaatgcacgggactatataacattatctcgctcgaatatttcccaatttaatcaggcagatttaacttataatgggaaagaggatcaggctaaatttttgagcggttcatttggtatgtcaaccggaaatcctagaaattcaaagaatacacttgagttcttggatgtttatcttcaaaagtatggtcaaggatatgtcagtaacttgttggaaaacgaagggtggcagacaatggtagatcctgttacaggaaaacaacttatttttcaggataatgactttcagaaagccacttttacaactgggcagaagcatgaaatagatttgagtattagtgggggaacagaagctatcaattactatgtaggattgaggtatttgaatcaagatggtatccttagaggtacgaattataaaaactacagcgttttatttaatggaaattataaattaagtgaagcatggagtttgtctaccaaagctagtttacaggtgagagatgctgtaggaggtggaaatacagttaacaccatatcacgaagtatattaactccaccaacttaccgcttgtattatgaagatggaactccggctcccggtgaaggaatttcttcttttagaagcagattgcacgaaatttattataagactaactatgatgataccagtgtatataggactactttccaattaggtgcaatttggaatattctgcctggcttgatattaaaacctacagcctattatttcggtacggaaggtatcgaaaattattttcaggcagataatgaaacaaccggaaatacaattcgtccggcttctgccaaacataattttgacaggcatttgcagggagatttagtgctttcatatgataaaaaagtgaaagaacataatattggagtcgtagcaggtgctagctatactcatgattacagttataggctttctgcaagtggcagtggttcttccatagatttaattccgacattaaatgcaacggcagatagtactcagcgggcaagctcgactaaaacaatggaggccactttgagctatttcggacgtgtaaactatgattataatggtaaatatcttttctctatcagtatgcgtgccgatggttcttcgcgatttgcggaagataataaatggggatttttcccgggagtatctgccggatggaatatgcatcgggaaaacttctataaaccattggaagctatcgttagtcgttggaaatggcgtgcaagttgggggcgtacaggtaacaataatttaagtgtggctaattcgagaggagaatataaaattacagataccaactatcaaggctctgtcggcatattaaatacaacattgaaaaattctcagttgcgctgggaaacaacagaatcgtatgatattggggttgatttgggatttttcaataataggttaggactgttaattgactattataacaaactgacatttgacagattgtatgatgaacctttatggagttctaccggatttagttccattaagagtaactatggatcagttagaaactccggagtagagattgagttgaatgccactcctattcaaactaaagatttctcatgggatttagggttgacatttgcttataacaaaggagtggtagtagacttaccggataatggggaagaaaagcatcgtgtaggaggaaactttgtttatgatcctgcaactggaggaacaaagaaagtgggtggtattgccgaaggtgagagatttggcggaagatgggcttttcattatttgggaacatatcagactgaagaagaagcggccaaggcacctaacgacccgaacgcacaaggaagaaagaaacatgcaggagatgcaatatttgaagatgtaaataatgacggacaactggactcaaaagacatggttttcatgggatatgttcgtcccgacaaagttggaggtattattaatacattaaaatacaaaggactgactgtgcgaatcgttatggactgggctatgggacatgtaatagacaatggcttcaagggacagataatgggtagttcacgtaataataataatgccatcaaagaggcaatgatcaattcttggcagagtgcgaatgacgggagcaagtatcctaaatatacagttcagagcgactacgattatcaatatagaaatcatatgagatgggataatcagattggaagctctgcaagtggtagtactaataatagcttgtattttagcaagggggattacctggcattcagggaagtgtctttaagttatatgttgccattatcttggattagaaagatgaggctcagtgctgtggaagtttttgcaggagcgtataatattggttatataaaaaaatatgatggcatgttccctgaaatatatacaggtgttgactatggtatttatccgagacccagacaatataacatgggagtaaaaattaatttctaattaaataagacttataattatgaaacaaattaaatcaatactattaggcatttctttattcctgttacactcgtgtaacttactggatgtagatactgtttcaagtattaccggagatggatactggaatacaaaaggtgatgtagaaagttatatgattggtatttataccaaattgcgcgatacatcgaattcaactcttcattttgaagacagaggagatgcttttacaacagggctggaaggtggtccttccaatttatgggcgcaaaacctgacatcgcaaaatggttatagctggtcgagctattactctgtaatacaacattgcaatatgttattgaagcatactcccggaatagattttggtgtagagtctgataaaaacagactattggcagaggcgtattgtatcagaggatatatgtatttctgtattgcccggatatggggggatgctcctttggaactggaaccgacagaaagctcaaataagcctaagttagcaagagaacccgcagaggaagttttggcacgtgctttaagtgatgtaaatacggcaatcgatcttttcccagaagaaagttatacaaatggaaaaggaagagcatcgaagtcggcatgctatgcattgaaagcagatattttgctatggaaagctaaagtaatgaatagctcggaacaagatttgaaggacgtcataacttatgcggatttggcaagtaaaggactctcactggaagataattttgcagatatttatggtactaaatatgggaaagaagtgatatggactatccattttgaaatttatgaaaaggaagctcagtatagtcagagcctgaagccaagagatgtttttgtagaaaaggcagtcaataaggatgaaattccttatgccaaaggaggagctcgcagcacttatgcaccaagtccgtttttgataggtctttttaatgcaaatccggcagatatcagaaccaaagactcttatatcactgcaaaggatgcggacggaaatgaaatagggacttttgataataagatgaagggaacaaaaacagaaggagatcgcacctatgactcagatatagttatatatcggcttgcagagatgtatttatttaaagcagaagcttatgcggcgttaaatcaaacaccacaggctattattgaactgaatagagtcagagaccgtgccaagattggaacttataatggaagtaccaataaaatagcagtggagaaagaaattctgaacgagcgtgcaagagagttatatcttgagagaaaaagatggccagatcttctcagattccattatggtggaacgattgatgtttatcaggaggtcccgaacttaaagaaaaaagtcgatgataatattatcattccattatatcttgcaatcccattgagcgatatgaatatcaatcctaatttaaaacaaactcaaggatatgaaaacctataagattattacatgcatatttctttttacaagtatgtttacacaggcttgtcaaaaagatgatgagacacaaggaaacccaactcctgttccaccggaagaagaagtgccttcgtccgaattcaactatatttataatcaagggacagatggctttgaagtctatcggatacctgctattgttaaaagtaaaagcaatactttattagcttttgctgaagctagaaaagcccgaagtaatggagatagcggagatatagatcttgtagtcaaacgttcgtcggataatggaaaaacatggagtaaacagataacgatatggaatgatggacaaaacacttgtggaaatcccgtacctattgttgacgacagaggtagaatacatctacttatgacttggaattttcagactgataaatgggggacaataaccaatggtaccggagaagacagccgacgtccgtactatacatattctgatgatgacggtattacttggacgcaaccagttgaaataacttcttcggtaaaaaaagaaaaatgggattggtatgctaccggtccgtgccatggtatccagattcaaaagggaatgcataaaggacgattagttgctccaaactattttacgactcgggagaatggaagggtcacgagctattctcatatcatttattctgatgattacggaaaaacatggaaaccaggagaacctacccctgccggtggtgttggagaatgttctgtagctgaaataggcgaagggacattaatgttgaatatgagagcagatgaaggtttttatcgaaaaagttgtactagcctggatggtggaattacttggtcttctcctcaaattagcattgaacaaatagattgtaagtgtcagggtagtatattgtcaataggaggtgctgtttttctttcgaatgctgcttccgctacggaacgtattaatatgactatcaagaaaagtacggataacgggaagagctggaagggacaatatacagtttatgaaggtaactctggttactccgatatagttgaactatctgattcacagattgctattttctatgagggaggagaaaaacgatatacggacgggctggcatttaaggttgttagcataaaatcaatacaatgaatttaatacattactgatatgaaaagaaaaactttatatttattacagtgtattgtcgtgatattattatcggcttgttctgaagatgatttgcagtccctgcaagctgctttcgagtcagaacttaaggaagtcacaatcggagaaagtatcacttttaaagacatgtctacgggtgaaccttctaaatggaattggcggttcgaaggtggagaaccggaaacctcaatcttatttagtcctaatgttgtatataataagcctggagtttattcggttaccttgtctgtcggacgtggagaagaagcaaacgaaatggtgaaggaacaatacattactgttaactatccgtcacagataactgttgacttctcagcagataaaactactgctacaaatgaagatgttatttcttttaaagatttgtccaaaggctatccgaatgaatggttatggagtttcacacctaaagaaggtggagtagctatcacttcaacagaacaaaatccacaaatgacattctctccgggaatctatactgttaaattgacagctaagaatcccaaaacgtcttcggacaaagtaagagaggattatattactgttattgataaaaatgcgattgccgctgattttggtgcacaatgccggaatacttatgccgggggatatattaacttcttggataagactttaggaacggttgaagaatgggaatggacatttgaaggaggtactccaaccagttctgtagagcaaaatcctgtagtgcaatatgataatccaggaaaatacaaagtgacgttgaaagctaaaaactcggtgaatagctctacgaaagagaaagaaggttatgtatatgttgtttctgcagaaaagttagtattgtatttgccattcgatggtgataataaagatgcaggtccaaatcaattgaatcctgaagaacttacggcaggaactggttccagtgtatataattctcaggcgcgctttcccggagaaagtgctgaatgtcgatttgcagcacacttccaaggcgacaagcaaaattattcaattttgtctattcctgaagaaggattgaagaatcattatacggatagtgaatttacagttgcattttgggtgaaggtttcaaatatgacagctaagaatgcagtctttcatcaaggtgtgggacctggtgctacttataccgatcctgtgcccagacaaagttggtttagacttgataccagtggtaaaactgttgttttctgtgtagaatataagggaaaagcaggaaactgggccgaatatgaaggtaaacgaatggatgacagtgagtggcatcactatgtttgtatttatcagaaagtggatggaaaaagagatagctatttgtatatagatgggcagaaagttattgaaaagaaaggggttgttgacaaggtggtagatagctggccatattatattggttgtaactatcgatttaccaatggagaatttgcacctgagaacttcttgaatggttatctggatgattttattttgtataacagaatattgtcagaagaagaaatacaagatttatacaataactaaatactaattgccgaacttctcttttaatcagtaaaagagaagttccacattcaattaatatcagattatgaaaaaactttatctatttattctcatgcttgtaagttgcattggtttatatgcacagcaggtaatggagacaagtgaagtatataagagagcggatgaactactaaagaagctgacaattgaggaaaaagcgctcatggtcagaggatataataagttctttatcaaagggtttgaagaaaaaggaatacttcctgtttatttgtcggatgcgacacaaggggttaatatccggaataatttgcccgattctagcgttgtaaagcaactggagcgttcaacagcctttccttctcctattttgttagcctctacattttcaccggagttatcctaccaatatgctaaagctattggagaagaatgtagagccggaggaattgaggttttgttaggccccggattaaatatctatcgacagtctcaatgtgccagaaattttgaatattttggagaagatccctatttggtgtctcaaatggtcagtcaatatgtgactggacttcaaagtacgggtacagcggcatgtttaaagcatttctatgggaataatactgaattttatcgtaaacggagtaattccattatcggagaacgtgctatgaatgaaatctatttgccaggttttaaagctgggatagatgcaggagctatgtctgtaatgacttcttataatcagattgatggcgaatgggcaggacaaagttcgtatgtaataaagaagattcttagagaaaagctgggatttaaatggttggttatgagtgactggaattctgtgtgggatttggaaaaggttattaaatcaggtcaaaatctggaaatgccgggttcatataattttggagtatcagtattggatttatatcatgaaaagaaaataacagagaaggatttagacgatatgatacggcccactttggctacttgtgttgccatgggattttatagcaggcctaagtatgacacgactttgttaagtaaatatcctgaacatgagcaaactgcgaggcgagttgcagaagaaggtgtgatattacttaaaaacaggaatgaaattttaccgcttgatcctacgaaaaatagaaaaatattattaaccggtaaatttgtatatgaaatacctcgtggctatggtgcggcagaagtgatagggtataataatgtaagtctgattgatgctttgcagaaagtctttgggcgaactgtatattatattgaaaagcctactgtggcagagataaaagaggctgatgttgttttattgagtatgggtacacgggataaagaagccgtagaacgtccgtttgctttacctagggaagacgaatcatttatgcgctatatcactaaaaataatcctaacactattgctattatcaatactgggtctgcgattgatatgtcagcatggaacgaacaattagcagctttgatttatggttggtatggaggacaatctggatttgaagcacttactgatattattatcggaaaagtaaatccatcaggaaaattaccgatgactatagaaaggtcatttaaagattcaccggcatggggatatttgccacaaggggcatcactctataatgagcttaaaaatgagcatcttattaatgtgtatgatgttaattataaggaagatgtattagttggatataggtggtatgatacaaagaagatagaaccgctttatccttttggatatggactatcctatacaacatttgctttgacaaaaccacgattatcatctaacaagatgaatgataaacagactataaaatgttctgttactcttacgaatacaggtaagtgtgaaggagctgaggtggtacaattatatatcaaagagaaccagccaagtgtattacgtcccgaaaaagaactaaaaagatttgagaaagtatccttgaaacctggggaaaatcgaatccttgagtttataataacttccaaggatttagctttttgggatgatcagacacatagttggaaaacaaatactggacaatatacaatttttctaggaacatcctccaggcatataaatcaaactctttcttttataaaagaataggaatacttttagggctactttgtggatgccgatgatagaatttgcctttaagcataaattaataaaactacagtctgataattatttagattgtagtttttttgataatatctcattcatttattatttaatggtggagttgtcttatttatttggccaattctgtatatttgcagacatatattacaatatcatgaaaattatatttattaatacacttcgtatcctgatgattctcgtgattatgatttcatgtggagttgcctatgtagtatacgaagatacattggctgcctggtggatacctgttggagtggcacttataatagtgatagcaacaattcctttctataaaggatggatttggctgacaacaatggataataaagtaattaattgttgttgccatttggtttgtgtcggtgctatcagttgtgttttgtttttgggggggaattactggttcgccgattctgcttccacgcatgaagaggaagtcatggtacagaaaaaatatatagaaacacataagaaaactcgtagggtcggcagacatcgttatgtgtcggatggtgttcgtaaagaatattatttgcaggtagcttttgaaaatgggaatgtagaaacattgcatgtatctccttctacttataataaaacaaagacaggtcggccgaagattctgactttgcaaaagggcttatttgggttgcctgtaattaccaaaggactttaatgaaagtcacaccacctttagaatgggttatatatcctttaaaagcgatattcttcttttcttttatttttcatcttgctaattttgcatttagtctacaaatgggacgcgttcgtctcatttgaaaaattagtgctgatctctgccttatcttcgtgacgaaattaaaacggaataaaatcatgaagatgaataaaactagattattagagaaaatatctattcagtcgggcgtctctttagatgagtgtgggacagtgctcaaaacttttgaaaaagttctaagtgaagaactttcccgtaaaatgtatcgttatggcggatggatcctattattgaccgctttatttgtgtctgtaacagtatttagccagacaacaggacggaaaggacgtccgatgcagaccatccgtggaattgttatagatggagactcgaagtttccgataccgtatgcaacagtaaagctatctgaaaaagagggggcgggtacgataacagacagtcttggtcgtttcagtataccgcaggttcctgtcggccgacataccgtagaagctgcgtttatgggatatgaaccgggcattttcagagaaatactggtgacctccgccaaggaaatatatttggaaatacctttgaaagaaagcgtgaacgaattgaacgaagtggtaattcgtgcgcggacgaacaaggaagaagcaatgaacaagatggctaccactggagcacgcatgttgagtgtagaagaagcgagccgttatgcaggtggatttgatgatcccgcacgtttggtttctgcttttgccggagtggctcccagcgtttcttccaatggaatttctattcatggcaatgccccacatctgttgcaatggagactggaggatgtcgaaattcctaatccgaatcactttgcggacatcgctacattgggtggaggaatcctttcctctctaagttcacaagtgcttggaaactctgattttttcacaggagcatttcctgccgaatatggaaatgccgtatccggagtctttgacatgaaattgcgtaacggcaacaaccaaaagaacgaaaataccattcaggtgggaattatgggaatcgacgtcgcttccgaaggccctttgagcaagaaacataaagcatcgtatattttcaattaccgttattctacaaccggacttctgaatcttgaaggaggaacgatggattatcaggacctgaacctcaaactcaactttccgacacggaaagccggaacgttctctgtttggggaacgagcctgattgataagttcactagtgattttgaaaagaacacagagaaatgggattattggggcgaccgcagtgaatcaagagacaagcaatatatggcagccggaggtgtcagccatcgttatttctttaataatgacgcatcattgaagaccacgatagccgctacctattcgcaactcgacggaggagcaaccttgttcaaccattcgatggagtctactccttatatggatcttgattcaaaatataccaacctgatatttaccaccacctttaatcgtaaattcagtaaccgttttacgaacaagacaggattcacctataccaatatgttctacaaaatggatctttccattgctccttatgaagccgaactactggaaattgtatctcaaggaaaaggtaatacaagtctgatttcagcctacaatagttcatcggtgggattaacagagcgttggacccttaatgccggaatctatggacagcttctgactctgaacaataaatggtctgtagaaccacgggttggcctgaagtggcaagctactccaaaagcaacctttgcgttggcttatggaatgtacagtcgcatggaaaagatggatgtatattttgttaaaacgaaaagtacaggcgatcaatccgtcaataaagatcttgattttacaaaagcacagcacattatgttatcattcggttacaagatttctgatcgcatgaatctgaagatagaaccatatatccagtttttacatgatgtcccagtaatggcggatagttcttattccgtacttaaccgttctgatttttatgtggaagatgcgttggttaataaaggaagaggacgcaatgtgggaatagacattaccttcgaacgttttttggagaaaggactttattatatgatttcgggttcttggtttgattcccgttaccggggtggggacggtgtgtggtataacacgaagtttaaccgtaattatgtgataaacggacttatcggtaaagaatggatgttgggaagaaataaacagaatatacttagtgtcaacctgaaactaaccttgcaaggtggtgatcgatattctccgattgacttggaggcaacgatgaatcatccggataaagaagtgcaatatgacgaaacgaaagctttctcaaaacaatattctcctatgttgattggtaattatactgtcagttatcgtatcaacaagagaaaagtatcacatgaatttgcagtgaaaggacttaactttacgggtgctaaagaacattacggtcatgaatataatgtgaaaactggaaaaatagatgtcagcgacaattctacgatattgacgaatgtgagttataaacttgaattttagagatacggtatagagtctaaccggaaaaatgttttatcttcgtccccaataaagcgtatgacaactgaaacacttgcaacaggtagtgaatctacctttttatatcgatttctcgttagtccggacttacgatggatgcggtatttggtacttatcctggtgctggggacgatctctttcaatcaggtctttattatctttttggattataaggatatattgggcggatggatttacacatttacctttctttacctgctcacttatgtagcggttatctacttgaatcttttccaactctttccgaaatatttgttgaagagacattatctgacctatttgtcattgctttctactgcgatgattgtagctctgttgatacagatgtcaatagaatacatggcatattcctattggccggaactccatgtgcgaggttcttatttttcgatgcacatggtagtggactatatttcttcttttatgttatctacgctgtgtatgataggaggtacgatgacagttctcctgaaggagtggatgattaacaaccggcgtgtttcacaaatggagaaagcccatgtcgtttctgaagtggaacggttaaaagaacagatcagccctgaacttctttttaaaacattgcaccaatcgggagaattaacgttgagtgagccggaaacagcctcaaagatgttgatgaagttaagccaacttctccgctatcagttgtatgattgcaatagggccaaagtcttgcttagtagcgaaattacatttcttactaattacctgacattggaacagacctcccgaccacaattttactatgaatttacttccgaaggcgaagtgaacagaatgttggtaccacctttgcttttcatcccttttgtacaatatatagtcaaagcaatagacgagcaacagatacagcctcctgtttcattgaaaactcatttgaaagcggaaaagggtacgattattttcgcttgcgcttgtcctgaagtaaatctcttgtcgtccgataaagggctggaaagaatcagacaaagattggatattttgtatggaagccgttacagattatcattggctgtcggcagtatatggctggaactgaaaggaggtgagtcatgagtatggataccaatcatggtaatgacttcaataaaaataccactgatagaaacatgaatgataaaagtgtcactgcatttctattgagtccccgttatcggatatacaggcatttgctgctgcaattggttgttgttttgataacaatcaacgtcctttggtatgagcctttacaaacagtctcctttgggaggcgactgggcggatgtctggcatattttgcttctatgaatatggtgatatatataaacctgtatgtattggttccttatttcctgttgaagaatcgttggggtagttatgtgttgatggcagtcattacaaatatagcagtcattacttttctttcagttacccaaggtttgctttttgaagtgattctgcccggaaaagatcccaatggctttgccacttttatcaatgctttttcgggcatactgaccattggctttgtcatggcaggctctgcagctatctcattgttcatgcattggctacgctacaacctgcgtattgatgaactggaatccacgactttacagtcggaactgaagtttcttaaaaatcagattaatccgcattttctttttaatatgctgaataatgccaatgtcctgataaagagaaatccggaagaagcatccaaagtacttttcaaattagaggatttattgcgctatcagataaatgacagttcgcgagaaagagtctcgttagcatcggatatccgtttcttaaatgattatctgaatctggaaaagatccgtcgtgataattttcagtttacgatggaggaacatggaaagacagattccatttggattcagccgttattgtttattccttttgtggagaatgcggtaaagcatagttttgacagcgagcatccttcgtatgtgcacgtttcgtttaaggttgataatgatagattagagtttcgatgcgagaattccacaccggaagttgccgttagtaaagggaaagtcggagggataggacttgtgaatattcaacgcagattggggctgttgtatcccggtcggtatgaactgaagcagatagagaatgaaaataaatatactgtaattttaagtataatattatgaattgtattattgtagacgatgaaccattggcacgtgaagccatgaagctattgatagaagaatcgaataaccttcaattaatcgggagttttaatagtgtgtccactgcttccgatttcatggagcaacatgtgactgatttggtttttcttgacattcagatgccagggattacaggaattgagtttgcacgtacgatttcaaagaaaacactggtcatttttaccacagcctacacagagtatgcactggacagttacgaagtggatgcgatagattatttgattaagcctgttgaagcggagcgttttcaaaaagctgtggataaggctttgtcttaccattctttgttactgaaaaaagagaaagaagccatcgaaacagtggttactgccgactatttttttgtgaaagcagaacgccggtatttcaaagtcaacttctccgatattctctttattgaaggattgaaagattacgttataatccaacttagcgatcagcgtattatcacccgtatgagtttgaaagccatattcgatttgttacccaaatcaaccttcctgcgagtgaataagtcatatattgtcaataccggtcacatcgaatcatttgacaataatgatatattcataaaatcgtatgaaatagctatcggtaacagttatcgcgacgacttctttgaggggtttgtgatgaaacaaagagtgtgagatcgtgatgtagtattattcaatgtttctgcattttttcaatttgaaatataaataagaagataaagtgaagtgcgaatatatgcaaatatgtttgttcttatcatttggcatatataaacagccctctatccatcttctaaagacgaatagagggcagttgtcatgacgagaaaaaagtcgaagtctattgctttgcttcgttattttgtttcagaagaaattcatcaattgcttttttaagctggtctttaggcatagctccctgcatgattctcggttcctctttcatcggaatcatcaatagggtagggatgctgcggataccgaatgccgctgccagatcctgttctttgtccacatcaatctggtagatatctactttgccgctatattctttgctaagttcttccagaatcgggtgcatcactttgcagggaccgcaccaggtagcatagaaatctacgatggcaggacggctgccttcaaatttccaatcgtttggattggcttcatagttatataccttctttaaaaaatctgctttatttaatgctactacttccattttattgtcctcctttgttggttcattgctttttttattttctccgctgtttcccgcgcaagccgtggctgccagtgtcaagacgaagacacttaataagctttttatccgtttcatatattatctttctttttgtttttatctgatgcaaagatagacgatataaagggaccataaaatagcaatttgacagaaattcttggcaaaacttccctcggatagttattgaacactaaaatttgtctattaatctttggaagatataaaaataagcactacttttgccgcgataaaatgagtattcaccctttaaaattgatggaaagggtattaattatgttggagttataatattttcaaattaggactaagttgtctcgtcggaaggatgaggctttgcaacttattattttttatattgaactgatggttcttacattgaccgcaattctactaacaggcggcaatggttgattagtcctgcaatcacatttattatttttaaaattaatcacttcaatgcggtgggagggtattttatatccgtatcctaagcattggtatcacgtgtattgcatcgtcgtttgccggtgaggctgacagggaatgttgtatgcgaatgaaaaaagagtatgggaatacgattaaaagatttaagtaaactgggatatcgggataatgttgcccgtagtctggtagtggacattgtgagcaaacattgcaaatataacacgaaagaacagattgaaatgacattgagcgatatactcgagcatcccgagtcttacaaaaacaatgaaatatggaataagctggccgaacgcctttcgccgactataatagcgaaagagtttatagcttatgatttactggatgagccgttgatgtataaaacctatggaggtaaatttatcgagacgcttgccaaacaacagatgaacctggctatgcgcttgcctataacagtggccggagcattgatgcctgacgctcatgccggatacgggttgcctatcggtggagtgcttgctacggataatgcggtgattccgtatgccgtaggagttgatatcggctgccggatgagtctgacagtattcgatgccggagcagattttctgaaacggtatgcctatcagatgaaaaaagccttgaaagatttcacccatttcggtatggatggcggattgggttttgagcaggaacatgaagtgttggatagggaggaattccgtctgacgcctttattaagggacttgcatggaaaggccgtccgtcaactggggagttccggtggtggcaatcattttgtagagttcggcgagatcactttgcaagaaaataacgtcttgaatcttccggaaggaagttatctggcgttgctgtcacattccggttcacgaggattgggggctgctattgcaaaacattacagtctgctggcacgtgaagtgtgcaggcttccccgtgaagcacaacattttgcctggttggatttgaatacggaagaggggcaggagtattggatgagtatgaatctggcgggtgattatgcccgtgcctgtcatgaacggattcatttgaatttggcgaaagccttagggttgaagcctctcgctaatgtcaataaccatcataacttcgcttggaaagaggaaataataccggggcgtatgtcaatcgtccatcgtaaaggggctactccggcgcaaaagggacaagcgggattgattcccggaagtatggctactccggggtatctggtttgtggcaaaggggtggaagaagcgttgaattcggcttctcatggagccggcagggcaatgtcccgccaaaaggcaaaagatagttttacgcaatcagctttgaagaagttactgtcgcaagcaggagtaactttgattggtgggagcgtggaagaaatgccgttggcatacaaggacattgacagagtgatgtatacgcaggagacactagtggaagtgcaaggcaaatttatgcctcgcattgtacgaatgaataaggaatgatgcgatgaaagaaaaagtctatttacaaattacttccggcagaggacctgcggaatgttgccgggtagtggctttagtgctgtttagctgtgcaaaaaagaataagtatttaattaaaaaaaaagaagaagatgatatcagagaaatatggtcgtacctatcactatccgttctctcccggaacgactagtgatgaccgaattaatcatacgtattgggaagatatccaacggattaagacattggtgcataccgagaagttggatggagagaataattgtttgagtcagtggggtgtctttgcccgttcgcatgcggctcccaccacttcaccctggacgaggcaactgcgggaacgttgggaattgataaagaatgatttgggtgatatagaaatctttggagaaaatctatacgccatacattctattgaatatcagcgattagaaatgcatttttatatctttgcggttcgttgcatggatcaatggttgtcatgggaagaagtgaagttttatgcagctttatttgacttgcctactgttccggagttgaagatagaacctgtttccggtttaacgccggagcttttaaaacaggaaatcattgatatgtcacaagacccgtctgttttcggttcatgtgatccgtggacgaaagtggcttgtactcgtgaaggagtagtcagccgcaatatcgaggaatatccggtaagcgaatttgcgcatcatgtgtttaagtatgtgcgaaaaggacacgtcaaaacagatgagcattggacgcgtaattggaaacgtgccccgcttgtctgggaattgagtaatgaaaaggagaataatgatgaattggaaattgatagaagataaatcgtggtgctcactcgaacagcagttcgagtgggtacgagaaatgaatgtcgtcccgcaggatactcgttatcatgcggagggaagtgtggccgagcatacccgtatggtgttggaagcattgcagcagtcttctgcttatcagactctctgcaccttggagaaagaatttatttggacatctgcattgttacatgatgttgaaaaacgttcgacttccgtggatgaaggagaggggcgggtatctgctaaagggcacgccagaaaaggagagtacactgcccgtactattttataccgggattgtcctgctccgttccatatccgggagcagattgcgtctttagtccggtatcacggattgcctgtttggctgatggagaagtcggattctgtaaagaaactctgtgaagcttctttacgggtagatacttcattactgaaaatgttggctgaagctgatgtcagaggacgtatttgtgaagataagaatgggttgttggaagctgtggaactgtttgagattttctgccgtgaacaagattgttggagtaaaccgagagagtttgccacagattatgcacgctttcattacttccatgcagaagacagttacattgattatatccctcacgaacagtttaaatgtgaagtgacgatgttgtcaggacttccgggaatggggaaagactattatattcagtctgctggcatggatatgccggtggtgagcttggatgccattcgtcgcaagtacaaattgagtcccacggataagtcggcgaatggacgggtagtgcaaatggcgaaggaagaagccagaacgtatcttcgcaaaggacaggattttgtttggaatgctactaacataactcgtcagatgcgtgcccaactgattgatctgtttgttgattatggtgcaaaagtgaagatagtctatctggaacagccatatcatacttggcgtcaacaaaataaaagcagggattatgcacttcctgaatctgtattggataagatgttggataaactggaggttcctcaactgacggaagcacatgaagtggtatatcatgtggtataagtaacttatagaacttatacaaataatgaccgaatagtttcaaaatatgtttcaagccttgaaacagttcgtttctcggtgtgaaacactttgtttcaatgcttgaaacgctttgtttcccggtgtgaaacactttgtcccaagtaatgaaacaaagtggaactactgttaaccggaaattatccagtgagtaattacgaggcagggtgagagtaaccgtttaccctcacacctgtaactatgatgaataagcggtttgagctaatggtgtgagggtaaagacatcgtaaatttattagagatacctgtaggtaatcaactgaaaatataaacaataattccggtaatcgccacatacaccaacgcataaggaatagccgctttcagtatttccccttcttttccttgttggtttcccgcagaagtagcaatggcaatactttgcggagagataatcttaccacctgtagcacctactgtatttgcagcggacagccaatccgggctgacatgaatttgccctgcaacacttgcttgcaactttccgaaaagaatattggaagaggtgtcgcttccggtgataaacgttcccagacaaccgatgaccggagcaaacagcgggtataaacttcccgtagccgtagccagtgccgtggcaatcacagcaatcattccggcactatccataattgtggataatcccacaaggcagatcactgtgatgaatgttttctttaattgcttcactgtattccaaagaacgatgaacaggtcttttactttagctccttgaatcaatccaccgataaaagttccgatgaaaagcaataccccggcatgagttagccaggaaatggtataattgacggtggaagcattgatgggcaaactgattcgggttatccagttattctctaatgtatgacgcaatcccgggaagaggggactggtcagaatgattaaaaatagaatcagcaaatagatgctccatgcattcagtatatcttttgttttcagatggcttttccgtgctttctcttctttagaggcagtcagttttccataaagaacaatcacgataatcgaaagaatactgccgataatggccggagattcagcacccatatacttggcagccagatattggctgactaaagaaactccgcctactaataaggccagaaatatatttttgggaagcgatttaagtttggagtcagtaaggaaaagcaaaaccagcggaatcaggaacatcaaaacggataactgcaatacgacattcgtgctaagatgcaatacatccaaattcgtttctttggctagtaccaacaccggagttccgatcgctccgaaagcggtggctacactgttggcaatcaaacttacagttgccgaaaagataggcttaaatcccagactgataagaatggctgccggaatggcaactgctgtcccaaagccggccatcgcttccagtagtccgccgaatccccaagtcagtaataacacctggatacttttatcggtagaaatagaagcgaattgctgtttgataatctccatcttttctgttttcaacaatacgttgtaactgaaaatagccatcaggataatgattaagataggagagacggcttttaacgccccatataaaaaggagtaaaacagattgtctactgaaaaagcgaagccgaaaatagcaatcagcatcgtcacgatcagagaaatgatactacttttgtcacccggcattttaaagaatgccattaatataatcaacagtaacaccggaataatagcaaggatcaaggtcataattatcagatttaaaaagtggaacgtcgtttattattgatataacaaacaaacgtcccactttggtcggttgaataaaaagatttttctatttatttcatcttcacgctaagaatttgttgtaattgttttaagttggccagcgcagcttcgttacctagctttgctgcctttcggatagctgttggctacctgatacatttcgttcagactaaggtatttcggattttcccggataatgatgcggccttgttcaacatcgaagttgacaacggtataggttttattaaaaatgataagcgataaacagaaaagcggggaagtttgttgtcgcaacctgcaaaaaaagctccctaaataaatggataaagatgttttaaggcataaatgctaacattttccacacatgaggcgttcattatataaaagtactttgtgtaatcaatatgacaatgatttcatatattactgtttatttttacacacacatacaactttaataactacagcctatgaaagagcttattaacaacctggaagaactgaacaggaaagcagaaaaaggcggcggagacgctcgcattgaaaaacaacattctgtgggtaaactgaccgcccgtgaacgcatcgatttattattggagaaaggttcgtttatcgaactggataagttggtaacccatcgatgtaccgatttcggtatggaaaagcagaaatttgccggagacggggtagtgacgggatacggtatgattggcaagcgcctggtctatgtctttgcacaggatttcaccgtatttggtggagctctttcggaaacgcacgctaagaaaatttgtaaagtgatggacatggctatgcaaatgggagcacccatcatcggattgaacgactcgggcggtgcacgaattcaggaaggggtacgttctttggccggatatgccgagatattcctgcgcaactctatggcatccggagtgattccgcagattagcgcgatcatgggcccatgtgccggaggtgcggtttattctcctgcattgacagattttatcctgatggtgaaaaactccggttatatgtttattacaggaccggatgtggtgagaagtgtgacacaggaagaagtcactaaagaggaactcggcggagtaggcgtacacatgacaaagtccggtgtagctcatctttctgcggagaatgatattgagtgtatcaattatattcgtgaattgatttcctatctgccgggaaataatatggaagagcctccgtttgtagctacaaacgattcgccgacccgcctgactccggaactggctaatttgattccaaccaatccgaatcagccgtataatataaaagaaatgattgaagcagtggctgatgataatagtttcttcgaacttcaggcagaatatgcagcgaatattgtgaccggctatatccggctgaatggaaaaacagtgggagtggtggctaatcagccattggtacttgctggtacactggatattaacgcatctgtcaaagctgcccgttttgtccgcttctgcgatgctttcaatatccccttgttgacactggtagatgtgccgggattccttccgggaatcgatcaggaatatggcggaattatccgcaacggggcaaaattgctttatgcttattgtgaggctacagtgccgaaagttacggttattacccgcaaagcatacggtggtgcttatgatgtgatgagctccaagcatatccgcggagatgtcaatcttgcttttcctactgccgaaatagctgtgatgggaccggatggagctgtgaatattcttttccgtaaggatatagataaagccggaaaccccgaagaaaaacggaaagaacttcaggatgattatcgcgggaagtttgccaatccttaccgggcagcggaattgggatatgtggatgaagtgattgatccggcggtaacacgtttgcggttgattcgaagtttcgagatgcttgccaacaaacggcagtctaatcctcctaagaaacattcgaatcttccgctttaataagttgagagtggagagttgagaatggagagtgttcattaaaagaataaaaagattatgataaagaaaatattagtagccaaccgcggtgaaatagcgatgcgaatcttccgtacctgtcgggtgatgaatatctcgacggtggctgtttatacccatgtagaccgaggagctttgcacgtgcgttatgcggaagaagcctattgcatctccgaatcgcctgaagatacttcctacctgaagccggaattgatattatccattgccaaaaagaccggagccgctattcatccgggatatggtttcttgtcggagaatgcggattttgcccgtcgttgtgaagaagaaggagtgatttttatcggaccgagtgcggacattatttccaaaatgggaatcaagacagaagcccgtaagattatgcgtgaagcaggattacccattgttcccggaaccgagacacctgtgcaggggattgatgaagtgaagaaagtggccaatgaagtaggttatcctattatgctgaaagcacttgccggaggtggaggaaaaggaatgcgcttggtacgtacggaagaagaagtggaaacggctcttcgtttgtcgcaatccgaagcagggacttcttttggcaatgatgcggtatatattgagaaatacatcgaaaatccccatcatatcgaagttcagattatgggagataaatatggcaatgtggtccatctttacgaacgtgaatgttccattcagcgtcgtaaccaaaaagtgatagaggaaagtccttctccttttgtgaaagaagagacgagaaagaagatgttgaaggtggctgtggaagcctgtaagaaaataggatattacagtgccgggacattggagtttatgatggataaagaccaaaacttctacttcctcgagatgaatacccgtttgcaggtagaacatcctgtgacggaggaatgtacgggagttgacctggttcgggatatgataacagttgccgccggaaatccgttgccttataaacaggatgatattcagtttagcggagcagctatcgaatgtcgtatttatgcggaagatccggagaataacttcatgccttctcctggggtgattactgttcgtgaagctcccgaagggcgtaacctgcgtcttgacagtgccgcttatgccggattcgaagtctctctgcattatgacccgatgattgcgaaactctgttgttggggacgtacccgtgcttctgccatatccaatatggcacgtgctttgcgcgagtacaagattttgggaattaaaacaacaattcctttccatcaacgtgtattgaagaatgcagctttcctgaaaggcgaatatgatacaacgtttattgatacgcgcttcgataaggaagacctgaaacgccgtcagaataccgatccgacagtggctgtcattgctgccgcagtgagacactacgagcgggagaaagaagcggcttcccgtgccacaacgcttccggtagtaggcgaatcactctggaagtattatggtaagttgcagatgactgctaataattattgatttgacactaaaaaataacagaacaaattatgggtacaacattagctacatattacgccaagctccaggacatgccggatagtgaatataaggtggaaatactggaggacggaccaatcaagaagattgcagtcaatggtaagatatatgaggtcgattataacatgggtggcgactctatccattcaatcatcatcgatcaccactcgcatggagtgcagatttctccctcttccaataattcatatacaatcatgaataaaggggagctttatcagattgaattgcagggagaaatggagaagatacataatgcccgcactgctgccgagtctgtgggacgtcaggtagtacaggcaccgatgccgggagtaatactgaagacgtatgtaaagaaaggagacagtgtgaaacgtggcgatccgctttgcgtattggtggcaatgaagatggagaatgagatacgttcggtgacggatggagtagtcaaagaggtgtttgtggaagatggcatgaaggtggcattgaacgaccggatcatggtaattgaatgattttcaaaaaaaaactggtttttgcgtacttatcttcaaaaaaatatttacttttggcagataagtacgcatttattctgatatatcatgaacaccgaacaaaaccaaaaagcactattagaacagctggaagcgctaaagaaagaaaatgagcagctcaaaaaggagctttctattcttaggaatgagaatataagtaatcgtcccgttagtttcaaagaaaaatatgctgtcaggattctggactctttgccggatatgctgactgtcttcaatcagaacgaagtaggcattgaagttgtttccaatgaagaaaccaatcatgtcgggatatcaaacaaagattttaagggaatgtatatgcgggaaatggttccaccggaagcatatcagaatattcactccaatatgcgtcaggctgtcagcacgggagctgtttcaaccgcccatcatgaattggattttaatggtgaacatcatcattacgaaaatcgtatctttccgttggatgaggagtatgtattgattatgtgtcgtgatataacggagcgggtgaccacgcaaaggcaactggaggttttcaagagtgtactcgataaagtgagtgacagcattcttgccgtatcggaagacgggacattggtttatgcaaataagcaatttatagaagaatacggagttacccaacagatgggtatccaaaagatatatgatctgcctgtctctatgacaacaaaggaggcgtgggaaagacgtcttcaggaaatacgtgacaatgatggcacttttgcttatcgtgctgcctatatgcggaaaggtgaagataaagagcggatgcatcaagtatctacatttctgattcgtgagaataatgaagaactgacttggttctttacacaggatattactgatgttataaagaaacaggatgaacttcgcgaactaaatctattgctggatggtattttgaataatatcccagtctatctgtttgtgaaagacccggaaaatgattttaggtatttgtattggaacaaagcatttgccgaccattcaggtatcccggcgtctaaagcgatcggacatacggactatgaagtatttccgagtcatggagacgcagagaaattccgtaaggatgatttggaattacttcagacccataagcgtattgatatgcaggaaacgtatctttccgccaccgggaaagcgcgtattgtacagacattaaaggcgcttgtgccgatggaagggcgcaaaccgttgctgattggtatctcttgggatattactaatcttcagaatattgagcaggaactgataaaggcaaggattaaggcggagcaatccgaccgattgaaaagtgctttccttgctaatatgagccatgagatccggacaccactgaatgcaattgtaggattctctcaattattgcctgctgccgaaactgctgaagagaaaaagctctattcgggtattatcaatcagaattcggatattttgttgcaactgattaatgatattctggatttatcgaagatagaagccgggacactggaatatatcaagcgtccaatgaatctgggagaagtttgccggacaatttatgctgttcataaagaacgtgtgaaagaaggggtaactcttgtttttgataatgtggatgagaatttattcattgagggagatcagaatcgtatcatgcaggtgataacgaatttcctgactaatgcgagtaaatttacgtatgcaggagagattcgtttgggttttgagcggacggataaaaatattcgtgtatatgtgaaggatacaggaataggaatagagccggaaaaagtagaccatgtctttgagcgttttgtcaaactgaactcttttgctcaaggcacaggattagggctatctatctgtcagatgattatcgaaaagatcggtggagaaataggggtgacttctgaattgggtaaaggctctacgttctatttcacgattccttatgaggaagccggagaactcggcgaaatctttaaaatgtcaaagacggaatctaaaggaaatactgtaaatcgtgtgcaacagatcaaaaagattttggtagcggaagatgtagaaagtaatttcatcctgctgaagaatctgatcggcagggaatatacattgctttgggctaaggatggggtggaagccattgaaatgtataagcagtatcaaccggacttaattctgatggatataaaaatgccacgcatggatggattggaagcaacgcatatcattcgttcttattccaaagagattcctattattgctttgacggcttatgcttttgaaacggataaagaattggctttagagatgggatgcaatgattttgtgactaaaccggtttcggaaagaactttgagaaaggctttggataaatattcgactattgtttaatgaatagatgcgacagaagggaaaacgtaagatcataaaaacaataccgaaaaagaagtatgtgcagaagcctcctcataagggaactttttggtcggaatattcatttgctataatcgccttcttttttatggtatttgtgtcttttttattgtattattcttcacttccagaaaattatgataaagaaacagtaggaaatatcgtacgccatgaacttaaatatgacatgactcaagggcgaatgggtggtagtgtttcttattctttcgtagtctattatcaatatatggttggaggagaacattattctagcaaagtttctttgggttataccagacagaatatcccttttattaaaaaaataaaggattatggctctatgtatcctgtgacggttacatacgatagccataatcctcaaattagtacgattgttgttgagtgaaagggttaattggtgactgtttttctaccggtcacttttttatttcttgttcttagaatattcaattatcttagaagagaagtctacaaaatcggtgaataattgtagaatgcttaaccattagaagctatgagcatgagccagcggatttataatccgctggtctttggtatcaggatttttaatccgcttatcttatccgatcgtttaaaatcctttgtctctttcgattttaatcgtacatttatcctctctaatcaaattagtatatcaatggatactgcgaatcgagttttagatgaattatattttgttacttctaccgttgtcgattggatagatatctttacccgtcctaaatacaagcatataattctggagtcactagcctattgtcaggagaaaaaaggcttaagaatttatgcctgggtattaatgagtaaccatttgcacatgattgtcagttccggaacagaagtaacagtttcggatattcttcgagattttaaaaagttcactagtaaacgtattatggcagaactcgaaacagatcctcaagaaagtcgtcgcgaatggatgctggatcgttttcgctttgccggagctaatgacaaaaaaatatctaagtatcgtttttggcaagaaggtaatcatcccgaattaatttatttgcatgacttctttctgcaaaaattgaattatattcataataatccggtgaagcaggagattgttgcacggcaggaagattatttatatagttcggcggtgagttatgcgggtgataaaggactgctagaggtgattgtagtttaagaaggcaagaggttaaggagtggattacaaatcctgatactcaagcaatcggattacaaatccgattgaacggagcagattgcgaatccgattgaacagagaacggaaacctactttaaatgattttatggcgaactttcatgtaagatgtgatgttgtttagatagaaaaatgtatctttgtaatgtagtaagtttgattcattcatgcatttagaaagagtaagaaatgaagagaccggagattatagaagctattcgtgaaacattaaaacgtgttgctcccaatgcgcaggctattttatatggttcagaggcgcgtggggatgccaggcatgatagtgatgttgatttactcattttagtggaaggtgataaaatgacattggctaaagaagaagctatcacattacctttatatgaattggaattgaaaacaggtgttagtattagcccgatagttgttttgaagaaattttgggagaaccggccttttaaaacacctttttatgtaaatgtgataaacgaaggtattgtcttatgaaagaaattctagataaggaaagtaagaaagcactggtcgcttatcggatacaacgtgcttatgaaacattgagagaggctgaggttatgatacgtgagtcattctataatgctgctattaacaggctgtattatgcatgctattatgcaactgtagctcttcttttaaaatatgatattcaaacgcagactcataatggggtgaagacgatgcttggtctgcactttatttcgacaggaaaacttcctgtaaaagtaggaaaaactttttctacattatttgagaaaaggcatagtggagattatgatgactttgtatattgtgacgaagaaatggtaaacaacttatatccacaagcggagactttcataaatagtattcaagaattaataagagataaagagtaggaatctatacaaagaaggtgatccgtcccagtggattttgaatccgcttgcttcacttatgtgttgttgatttataaaagcagagattatgagtaataaaatttatcctatcggtattcagaattttgaaagccttcgtcaggatggttatttttatattgataaaacggcattgatgtatcaaatggtaaaaaccgggcgttattactttttgagccgtccgcgccgtttcggaaagagtctgctcatttctactttagaggcttactttcaaggaaaaaaagaactgtttaccagcttggcagtagaaaagttggaaaaggattggattaaatatcctatattgcatctcgacctgaatatcgagaagtatgacactccggaaagtctggataagatattgaatgataatctggaatattgggaaagccaatacggcacccgtccgtctgagacatctttttccctgcgttttgcaggtatcattcagcgtgcttgtgagaagaccggacaacgtgtagttattctggtagatgagtatgacaaacctatgttacaagctatcggcaatgaagaacttcaaaagcaattccgaaataccctgaagccattttatggcgctttgaaaacgaaggacgggtatataaagttcgctctgcttaccggcgtgacaaagtttggtaaagtcagtgtattcagcgacttgaacaatttggatgatatttcaatgtggaatgagtacgtcgaaatttgtggtgtcagcgagcgtgaaatccatgaaaatctggaagcggaactacatgaatttgcagcagcacgtggaataacgtatgataaa

SEQ ID NO: 8143 - DNA, 31445 bp, Unknown
  gut microbiota DNA sequence
agtccctttattgatagacggctattgcgcttccgagcccacatctgtcgaaaatctaaaactcgccagagttagcagcaaccgtgtgaaatccgaactgatcctcgaaaaaggcttgaatgaatcctgttttatcactcacaaccacactgcaccttatggggatttacgacatgttgttatcgttcgtctgcgttttcctcaagaagaagtggaagaaaaaccaattgtcggagaaaaagaaacgttcatcatcgcaccgaaaaaaccgaagcaggaaacgcccgcagattcaacatccccgacggatacatcttcggaagtgactgaaactccgttgaaggcatccgactttcatcatctcactctgcgtgccaacctgcttcattgggctactcttactccggatttaggattcgaatggcggatgaaccgtcatttcggtctcttgctcaacggtagttggaccacatggagctgggaccataagaaccgtcgctatgccctttggaaagtctctcccgaagtgcgttattacctgggcaaacaaggcaaaggctttttaggtgtcatgtatcatacgggcgagtttcattataaattgggcaagaccggcaagcaaggcaattatcaaggcggaggactgacaggcggttatatcttcaacctgaaccgttcgctttctctcgacttccacgccggagcaggctacacttacgctgactatgacgaatacgcactcatcaatgatgtccgcgtccacaaaggcagtaagacaaaaaattattggggtattaaccaactaggaatcacactgatatggaaactaataaaataacctcccgcgcagcccttttttgcggggtcgccttgatgctgacctcttgcgttaaagacgatattgataacacgccccatccttcacagggagcgatagtgattacaacagattggagcagccgtgcagaccaggccgtgcagcctgtatcgtatacgcttcgtgtgtccggccagtccgggcaaagcgacgaacagcccgtgaagggaaacacgaatatttttcattctttgcttgctccggcagcttacgaattattggtttataacacccccgaagccataaccgtcaccggtgatgttgccacgatagcttcgacagacgaaaataacatagaagctcttcccggttatctcttttccgctacgcagacattggacgtagtaaaagatgacaccttatttgtaacagtgggaatgttgcaacatattcgtcagctgacgttggtgctgaaactcaaagaaggagatcacgaccgcatcaccagtttaaatgccacattgagcggcattgcctccagtataaatctcgcgaccggagcatgggcttccccgacaggagtatccctttctcctgtttttgaaaaaacagaagaaaaggacggaacgccgacactgaccgccacgatccgtttgttgggaattatcgcggaagaaaaacaggagcttagcatagctgttgcattaaacaaccaatcggtgtacacgataaagacagaccttaccgaagtattgcagaaatgtttcgacggttcgatgactccgctggtattgggggccaactttgacttgccttcccaaggagatttttccggtaatataaatagttggaattcggtagaaggcggacatgtggatattcattgattgcacgtgttgtaaacagaacagaataataacaacaaatagattgaaagacaatggtgaaaaagaaattagtactttatgttgcgttggctgccttatggggagcttgcggcaatgacaacgaatctcaaccgaccgctgcgcccgacggacgtacggcattgactgtaaagggcgagatcggcacaaaaggggcttccgtaagccgtgccatagatacggactggggcagcaatgataaaattggaatttttatggtgtattccggaaacggtgtagggcttacgttggagaatatttgcgacggagcagacaataaatgttacataacccccaatggcaatggcaaatttgaaccttctgtcacgccggaagaaccgggagaagtgaatacaaatagaatctattttccgattatcggtacagtggatttttatgcttattatccatttgtcactccgttgacggattatacttgttctctgaatattgccgaccaaagtaatcaggaggctattgatttcatgtatgccgacaaagcggaagggtatacaaaaaataatccggtagtatcgttcaattttagccatcaactttccaaactggtgttgactattacaccgggagacggattgactgctgctgatttagaaaaccttagtgtcactgtgggcggacaacacaccacagccacatttaatctttccgatggtactctgacggcgggtgcggaaacaacagacatcacactacttacaacaaagtccggtgctttgtgtgaagcaattttattacccgacgcgactacatcgcgcacgttgactttcgatttgaacaatgacaatgatcttcctttcacttgggaaatggataaagcattggcagcaggcagtaagtatacgtatgacgtgaagttgcatcgtacaaaaatagagatcacaggagctactattaccgaatggactccggtgaacggcggcggagtagatgcgcattaattaagtagattaataataaatataaactaaaaaaaatacagttatgagaaaagtctatttttttgcagctgccttggttgcaacattgacaggatgtgacaatagtgaaatgaacaatatcaccgatagcaaacaggtggcagtggaagtgacggccggaattgaaggagtaacaacgcgtatgaaaaatacgacatggcagtctggagacgagatcggcgtttttggaacgagcggtaaaatgagttattcgaattaccgttatcagtggacgagtggaaatgcttttaaaccatattcgaatgttatttattatggtgatgaggaaggtcagtttacggcatattatccgtatgctgctgccaaggatattacagataataagattacaaggaagctgctagaacagtattctacgtatttggacgaccagatagatttcctgtatgctgaagcaacaggtacaaaagacgatcctcaagttgattttcaatttaaacataaaatgagtaaggtggtcttaaagttagtgccaggaaatggttataattccgcgagtggttttgcgtcgtggtggaacatcgttttttcgaatttacattctcaagtttcatttaatattaagacaggcgaggtggaaccgattggaagtgcagaagaattgaattttgcttattctgctgtttggggatttagtggaaattatgttgcggcagataatgcgacttattatacttttatagtatgtcccggcgaacgtgttgatggaggtatgaaggtggatttagtgtataataacaagtacgacggatatactcttcatacaacattatttactggcagtcaggtttttgaaaccgaagccggaaaggaatatacgtatactgtaaccgtaaacaagacggatctaaaagtggaaaatgctattatttctccttgggatcctgtaactttacctaatgatggaaaagtggatacaactctgtaaaaaacatctccggaacaaaaatcccctggtaatatgctagtatgctgaagatgtaatacaagttccctagtcctcctattatattaaaagagaaagtagaaagctcggactttcccggactttctactttctctttgtctttaaacatcttaggactgtaaatgtggtatatcaaattaagtaagagaccataggtagaagaaaacattgttcataatcgattgagtaacagaaataatgattatctttgtaggtacgttcattatataaaatcaaaagatggaaacaactgatcgctatatcagatttgattgggccataaaacgccttttacgccagaaagccaacttcggggtgctcgaagggcttctcactgtactcctgaacgagaaagtagaaatcatcgaactactggaaagcgaaagcaaccagcagactattgacgataaattcaaccgggtagatattaaagcaaaaaatagtaaaggggaaatcattattgtagaaattcaaaatacccgtgagctgtattatctggaacgcatcctgtatggagttgccaaagcaatcaccgagcatatttcgctaggcgaacgatactatgaggtgaagaaaatctactccgtgagtattctttatttcgacatcggtataggtgatgattatctgtaccacggacagaatacgtttttaggcgtacatacgggagatcaattattggtcagcaccaaagaaaagaatgcgatagtgagcaagctccccagcgaaatctttcccgaatatttccttattcgggtgaacgaattcgacaaggtagctgtcactccccttgaagagtggatagaatacctgaaaacaggccgcatccgacccgatacgcaagcccccggtcttgcagaagctcgccggaaactcgtttattataatatgaatcccaaagaacgtcatgcttacgacgaacatctgaatgctatcatgattcaaaatgatgtactggatggagccaaactggaaggacgaatggaaggattggcagaaggacttgcagaaggtaaagcagaaggtaaagcagaaggacttgcggaaggacttgcagaaggtaaagcggaaggactagcagaaggcgaaaagaataagcaaatcgagatagcccgtaagttcaaagaaataggacttagcactgaaatgattattcaaggtaccggattatctgcagaagaaattaacgccttataatacattcataaaataaagccctaccaagaaacggtagcggattataaatttaaaagccccgttttgtcttttgataaaacggggctttaagatataatagatcaatgaaaactatcgtttcttacccaagaaacgttttgccaaatatttacgtatcggttcgtcatacagtttcagacacagataagcaagcacgatactcaagacaaagacgcacacggctacgtgccaagtctcgcccaacgtatagagcttattctcaatcagccatgcatagaacaggtacatcaacggataatggatcacataaaccggataggatatatcccccagaaatttgcatacttttgtcgattgcacgtccgtagtggtgcccgacgctcctatccaaagaatgatagggaaagccacaatcacacaaaacgcttcataaataccattcatgcaaagcggctccattccttcgagataaggaacagagaacagggcaatcagcgcaatggtacagatccaaaacgcacccttcaccttcataggcttgaagttgcgcgacatcagcatacccagtgagaaagggaaaagcatacgcaacgagccgcccaggaaattaaccccgtccagcgtccagcccactcctatgtttccataagtggagacattgaaaacggcaaacgctgccaatgctgcacccagcaacaccacaaataccgtcagcgccttgttggacaagcggcggatgaacaacgcatacaggatattaccgatatactcgaaaaataacgaccagcaagggccgttcaacggaaacatctcaccattgccacgaacttcatatcccacacccggcatggcaggaatgaagaatatcgtgcaaagaagagacaacataatcatggagatggctacatgcgttccatcccattgcacacaaccctgaatacagaatgtgatagcacccaatacggcacccataacgaccatcggatgaagacgtatcaaacgacgtttaaagaaatctttcatggtgagactcttgccccaacggtcgtcataagcgtaaccgatcacgaaacccgaaaggataaagaagaaatccacggcaagataaccgtggttgagagtctcgatattgccaccaccggcaaaagcatatccctcgaatacatgataccatatcaccataagagccgctacaccgcgaagtccgtcaagaagatcataatgtgctttggtatctgcaaaggctgaagaagaaatgttcgacatctgtttttctattagttagttagtattttcagatggcaaagatacggtttgcgaaacgaagttcttttgcttaaaagcaaaaaagccctaccgaaaactattttttagcacgtacccgactaagcgtgtagatggaaatgcccaaaaaggcagccacatacttcagcttcacccggtttatcagtccgggatagcgacggttgaactgctcataccgttctttaggcgaaagctggagccgttccacaaacatgtggctaagctctttgttgacattctgatgcaggatgcgcccccagttggctatgtcgatataggtttcgtagagcatattcagcttgtcgatatggatgacgtagattttgcaatcggaaagcgtttcaatgctctccaccgacggttgctgatagtagagcgaatccatgccgaacgtaatgtcgccttccagcgtgaaccacgtagtagtgtcctgtccgttgtgatggaatacggaacgggcaatgccctcttcaatgaaataaaccaggcggtctgttacccccgactggacgatataggtatctttaggataatatcgcagttccatattcgcctgaagcgcctgaagcgcttcatcggataccggatagatttctctgattttttgaataatgttttccattttgagattccttacttgatattcgacaggccaccggacggacatttctaatgacgcaccttaggatacttattattgaaacggaatcccaagccgagcatcagataattaggtgtctgaaagttttggagattgtaaccgatgtgaaggaaagagctacgtgtcacgtctatcttcaacgcaaagacctgatacagcccccgcaaatcgccacgccccagcacattcgttcccaaaccgacattgatggtgaaaaacggcattacatactccgcccgtcccgaaagtccgagagcaagctgatgctgaatgcccggcacaagaaacctgcgtccggaagtgccgctgcctccatcgtaatcgtactccacaatccggtcttcggtgtacacattggcactaccgtcataaacaccgtccagcgagacgccgaatcgcagcttatagttgaggttgtacatcggggcaaagttgaatcccgccacggggtaactgcccggcgaagctatctgcttcccgctttctacatacacgcctttccgtctccacgagccgaacaacacaagatcgtaactgatatgacggggaaaacggggaatatacggcttgaccaaagacttggtcaggtcggattcttcacggttgaagttgtacaccagaccgattttcgctccggtggtgttcactcctgcgttggggaatttggtgttgccgttggagaaatgcgtaaaatctccgccgatgataaaatcgaaataacgggaaagcgaccaattgaggtagatacctgcattgagatacgcattcacccgtgaacctaccgctccgttgtaggagttgtaatcgttatcgtatggtttccatccggcagaaaggccgaaattccactcgtaattgagcgaaagacggggattgaaacgggcgatacgtgcgccctgaaagacatagaacgtcaccggatcaccgagttgcttacggtcgccaaaggtggtgacggccaagccgaagccttggtaggctccgccgtagatacggtcggcacaggtattgggacgaaacttgaaggaatatttcaaatgagcggcaaaggaactttggatgggcttccaccgttcgttctctccttgcaggaaaggattggtggggaacacgtattgcggccgagcttctatccccaaccggtgaatgaaccgatggggaacgtaaggagctaccgtgtccatgccacattgcgggaaactgttgcgccggaatccatgaagttcttcctgcaatcgacgcacttcttcacgaagttcgcggacgtcctgctggagttgctccacgtcttgcctgacctctttcacctcctgccccacttcttgcgcgcacagcgaagcaacggggaaaagcaaggcggaacagaataggatgatttcccgtctgggtatctttactctcatatcatagtctggttagtctttttcagaacgaagtttataaatggagcttctcgataaactgcgctacatgatagccatccatcaatccatgatggcaagtgacggaaacgggcatcatcagcctttctccttcgcggaagtatttaccggtggagattttgggaacgctgtcgcccgaacgcatattggtgggatgcttcatatcggtgaaagagagccacggcacggccgaataatgaatggcgttgggatgaaacgtacctcctttgttgagtcccgtagtggcttgcaggcgttccatctcggcttttgcccgacggataaagacgagttcgtccggatcgtattcaaaagcggcaaaagaaaaggtgtggtcggcacgccccacagtggcttcgggcagaagactgtcataacacaccactcgatcgccttcgatgcggtagcggaactcttccacggcagccgcagcagtcacgatgcggtgaaggacgagcagggaaaaggaaacgcctttgtctttggcttcctgatacgcgcgcgtacaatctacattgaccgtcactccaaaaaaaggatcgtcaaaagcactgaaatgttcgtaatgttctcttctgttccaagtagcaatatcgatgatcttctctatctgattcattctaaacactcttttttaagtttcaccacagagggcacagaggacacagagattttatagagtttttatagaactttttcaccggattaatgcaattgattccattgcttccggtcttaccttaccgaaaaaactctgtgtcctttgtgtcctctgtggtgaataaattactgatgttgctcacgcaacaagtcattcactgtcttcaccgggttaaaggtagaaagaggaacttctacaaagacggtattccagtcgctcatcgcaccattccacaagccgggaagttcgagggctttcaggtctttaccgttcttcgatttgtaggagatgaagccggtggctttatctacatatttcaccaggtcgaatttatgtcctttataatcacgcacagcgcatacgaggtctaccggattgaagtgcgtacccttctcgaacatttctttcttctccggatcgtccatgtcgatctgcgagctttcgagaatttgcagggagatagttccgtcgctgttgtaagcaaggaacggaccgccgccgggttcgcctacgttcttcaccattccgcagacacgcatcgggcggttgaacttgtttttgaggtaaatggccagtacggagtcttcgaggtctttcgtttccgggttcttgcagaagagtttcttttgcaggaattgaagcatttccatcatctggtcgtgcgtatacttgccgctgtcgagcagcgtgaggtattcgaatacttgtttttgcagggtcacgagcactccggcaatcagtttcttatacgtaacagtgtcggctttcaaacggtcgggcactacgttgtcgatgttcttgatgaagatgatgtctgcgtccaagtcgttcaggttctcaatcagcgcaccatgaccaccgggacggaacagcagtttgccgttgtcgcggaacggttggttctccatatcggcagcaatggtgtcggtacttggcttctgctcggaaaaggtgatgtaatagtctacgccgtaacgtttggcgaagtcgtccactttttccgtcacgagcttcttgaaaagttcgcggtgttcggtagacacggtgaagtgtacgttcactttgccgctcttgccggctgcatacagagcgccttcggcaagatgttcctccatcggagtacgggagccttcaggatatttatggaatttgagcagacctttcggtagtgcgccatagttcagtcctgcagtctccagcagggcggacaccactgctttatagttgccttcttccatcagtccgggaatgtcttttccggagatacgctggcaggccacattcagatcgtcatagaaagcaaaattcttgattccgtcaaagaaagcctgttcgaacttggtagtcggctggtcataatcggcggacagaaactcgaatagattcttaaacatacgacttgcagcaccggaggcaggcacgaacttcacaacagtcttatctgtgtttgtatatgcatcccaggcggccagataagccttctgttcttctgcgtcgggagctaatatgcccttttcgatggaagctgctgcatccagttttaaaaagggaaatcccgtctggaagcatgctaattgttctgcaatttgctcttccgtgatgcctttcttggcaagcaactctttgtcctgtgtcgttatcataatatctaattttattaattgatgcccaaaaatacaaaatgttatttacttcttgccgaataaccggaaaaaaaactacttttacatcgaattaacaagattgaatatggacgacttttttacattggaggaaaaaaaggagcttttttcactctatcgacatttattgcagtctgccggagacagtattttctggagagattgccaaaagttaaagaaacatcttatcaaagcggcccaatgtaacggtctgcaacgcaataacttcgggatgaatcccgtcatcagagatttacaaacagcagtgatcgttgccgaggaaatcggtatgaaaggttcgtgtctgatcgggatcatgttacacgaaatcgtgaaaggtcatgtattgtctatcgacgaggtgaacgccgaatatggtgaagacgtggcaagtatcatcaagggattggtgaagacgaacgagctgtatgccaaaagccctgccatcgagtcggagaatttccgtaatctgctgctgtcgtttgcggaggatatgcgcgtaatcctgattatgattgccgaccgcgtgaacgtgatgcgcaaaataaaggatacaggcaacgaggaggaccggatcaaggtggcaaacgaagcagcatatctgtatgctccgctggcgcacaagctgggattgtataagctgaaatcggaactggaggatttgtctctcaaatatacgcagaaagagacatattatttcatcaaggataagctgaacgaaacgaaggcttcccgcgacaagtatatcgccgcttttatcgaaccgatccaaaagaaggtggcggaagcgggactgaagttcgacatcaagggacgcacgaagtcgattcattcgatatggaacaagattcagaagcaaaagactcctttcgaggggatttatgacttgttcgccatccgtatcatactggattcggaaccagacccggcgaaggagaagcaggagtgctggcaggtgtattcgattgtgacggatatgtaccagccgaacccgaagcgtctgcgcgactggctttcaataccgaagagtaatggttacgagtcgttgcacatcaccgtgatgggcccggaagggaaatgggtggaagtgcagatacgtacccgacgcatggacgagatcgcggaacgcggactggctgcgcactggagatataaaggtatcaaaggagaaactggcttggacgagtggttgacttccgtgcgggaggcattggaaaacgcggacaacgactcgatgaaggtgatggatcagtttaagatggatctctacgaggatgaagtgtttgtctttacgcccaaaggagatttgttcaagctggctaaaggggctacggtgctcgattttgctttccatatacatagtaagttgggatgcaagtgtatcggcgcgaaagtgaacggcaagaatgtgcagttgaagcagaagttgaacagcggcgaccaggtggagatcatgacttcaaacacccagactccgaaacaggactggctgaacatcgtgacgacttccaaagcacgcaccaagatacgccaggcgctcaaagaaatggtggcacgccaacatgcgtttgccaaagagacgctggaacggaaattcaagaaccgcaaactggagtatgatgaagcgaccatgatgcgcctcatcaagcgtttgggattcaagaacgtgacggaattttatcaacggattgccgatggtggactggatgtgaacgagattctggataaatacattgagcagcaaaaacgggacagcgatacgcacgatgaaattgtttatcggagtgccgaagggtataatttgcaaaccgcgcaggaggaaacgacatctaaagaggatgtactggtgattgaccagaatctgaaaggactggagtttaaactggctaaatgttgtaacccgatttatggcgatgatgtgttcgggttcgtaacggtgagcggcggtatcaagatacaccggtcggattgtccgaacgcgaaccagatgcgcgaacgcttcggctaccggattgtgaaggctcgctgggcgggcaagtcggaaggtacgcaatatccgatcacgctgcgcgttgtaggacatgatgatattggtatcgtaacaaatattacttcgatcatctcgaaagagaatggtatcacgctacgttctatcggtattgattcgaacgatgggttattctctggcacactgacggtaatggtgggtgatacggggcgtttggaggctcttatcaagaaattacggacggtgaagggagtaaaacaggtgagcaggaattaaagttaagacagaagaacaaaagaacatatttttggatacgtatgatgaaaatcaaaaaataatcatcactcctgaaatatgttcttttgttcttctgtctattttatcttaccttcttctttatataataaggataagtgaccaatacgaagaacagcaaagcgatagaagctaccatctgtccggtatggagcatcttgtctgtatctaattccatgtagcacgcagtagcgatacccagggagataccgacttcacttgccaacaaatgggtagtgttggctgttccgcgttggcaatgatgggatagtttcacaaatatcatcaggaattccggcatggttaaacctaaacccaatcccaagagtacggaagagatacctatcgaaaggtctgtgttcaataaggacatggctaccatttccaacccgattcctataatgaccaggcgcagcgttttctctttgaagaagaacaagcgcgcgaagaacagggaagcaatgtatccgagggctgtgccgataaagaacggtacggggattcccatgtttccgagtacgaaatcgtttagaaaagggtgtaccattggaatcagtaagcccggaacaaatgttatcagaatcaggttgatagcgggaacccatccacgaagcaataagaagcggtcgaaggaatagagtttagtgacaattggcgcacggaaaggtacatatacccccgatagcatgagaattcctacagctccggttatgacagatacagtgagcaggttttggaatgagtggctttgatagagccacactccgaggataatccccaaaagcattcccagacgtgccgtccacgagaagctgacatttcccgcgctccgcagtgtggagttggtgatgtcgatagccaaggtgataccggcagtagtgcctatgccaaaggccagtccttgcacggtactcaacaggattagttctgtgaagttcgtcacaaaggcgtacccaatcgtcgccactaccatcagggcagcggcaaacatacatacgtatttacgtttgtaggcatctaccaagtaggcatggaaaggaccgatgaggaacatccccaaggtgaaaaaaagaaagattactcctgtctgtgcggccggcactccgagacggtcggccatctctacggaaagtaccggaaataacacatacaaggatataaacaacagcaaattagctacacatatccgcataaaatgaactgtccacaatttaactgccatatactatcttaatattgttccttctcgttggggaagtagcaattcttcacgtcggaaacgtaacggctgatggcgtcggtcatcactgtgtacaagtcagcataacgacgtaagaaacgcggacggaatccgttgttcatgccaagcatgtcctgaataaccaatacctgaccgtctacgtggccgccggcaccgattccgatgataggaatagtgagttcggaagctacacgctctgcaagggtagcggggattttttcgagtacaatggcaaaacagcctgcttcttccaataaatgggcgtcgcgaatcagtttgtcggcttcggcttcgtctttggcacgtacggtataggttccgtatttgttaatggattgaggcatgagtcccaaatgtcccatcacagggataccggcgcatacgatacgtttcaccgtgtcgatgatttcttcaccgccttcgagcttcaatgcgtcagcgtgactttctttcatgatgcggatagcggaagcaaggccctccatctcattgccctggtaagatccgaaaggcatatcaactaccaccatcgcccgctttacaccacgtactacggatttggcatgataaatcatttggtcgagcgtgataggtaatgtagtcacgttacctgccattacgttagaagcggagtcgcctactaggattacgtccattcccgcaccgtctacaatctgtgccattgtgtaatcatacgcagtcagcatagatattttttcgcctctctgtttcatttcaaccaagcgatgagtagtcacctttcttgtgtcatctgatatataaccagccatgtctttttaatttatgatttatgaattatgaattatgaattatgatttatgtcattgatgtctgcgcatttggacgctttcaaaaattgcggcaaagttataacatttaattcataactgggaaagaaaagcaaaaaatcctttcaaatgcttcgcttggatagttggaaggcatttgaaaggatgggtgggtctcactatttttatttatctcggttatttttcttatttcatttattaatataatataaatgaggtaactatttaaaaataatgccgttatttatggagagatatcattttttcgtatgtcatgccggtgaagtcgtctattatataatgggcttttccggtgatggcttcgcgtgagttggtggtggcaagtccgatcacggttgccccggaagtcatgccggcttgcaggccgtggaaagaatcctcaaagacgtaggagttttcgggggtggcttcaaagatttccattcccagcaggaaacagtcgggagcgggttttgaacgggcaaacatttctcctgtcaggatgcggtctaccattcctttaaattcgggatgggcattgtagacgttggccatcttctcttcgttggagctggtgactacggctatctttgcaccgttccgacgaagatcggctatgaaggcttctactccggggatgtattcgtaggacatctttttctcgtaaacattgagttcagcgcttatttcgagctgtgcttcgggtttgtccgcgaaatacttttcatagatttgtaatagcgtctgtcccttgatacggcgtccgaaatcttcttcattcagatatttccgtccttgctcgtcccaaaaaacagtgtactgcgtttctgtatccatgatgacaccgtcaaagtcgaagagtgctgcaattgttttcgttgtattcatattaaactgtctttttacctaaaacgttaaaccttgtgtatctatcgccgcaaagttccgaataatcatcgaatcaggcaaataattcgtacctttgcaaagctaaaaaaaacgtaacatacgtttttatccaacaaaatctactggcgcatgagcaagaacgacccgcacattttaggcaaagaacgtatcggcaaattgctgttacaatattccattcctgcgattatcggaatgacgattacttctatctataacatcattgatagtatcttcatcggacatggcgtaggaccgatggctattgccggactggctatcagcttcccgctgatgaatcttgttgtcgctttctgtacactggtttcggctggtgggtctaccctcgcctctatccgtttgggacagaaggatatgaaaggagctacggaaattttgtcacatacgctgatgctttgtatcacaaattctcttttcttcggtattctgtcttttatcttcctggatgatatactgacttttttcggagccagcgccgacacccttccatatgcacgcagctttatgcaggtgattttgctgggaactcccatcacttacacaatgatcgggctgaacaacgtgatgcgcgctaccggataccccaaaaaggctatgcttacttcaatggtaacggtggtggctaacatcatcctcgctcctatctttatcttccacttcgaatggggaatgaggggtgcggctacggcaacggttatctcgcagttgattggtatggtgtgggtggtgagccacttcaccaagaaagacagtacggtgcattttgaagggaatatctggaaaatgaaaccgaggattgtagaaagtatcttcgccatcggtatgtctccattcctgatgaatgtgtgtgcgtgtgccatcgtgattatcatcaataacagtctgcaaaactatgggggcgatatggctatcggcgcgtatggcatcatcaatcggttgctgacgctttatgtaatgattgttttggggctgactatgggaatgcagccaatcgtgggctacaacttcggcgcacaaaagatagaccgggtgaaacaaacgctgcgactggggattatctccggggtagtgattacgagcagcgggttcgtgatttgtgagtttttccctcatgccgtatcggctctcttcaccgatagcgatgagttgattgatttggcggtaggcggtatccggttgactgtgttgatgttcccgtttgtaggggcacaaattgtaatcggtaacttcttccaaagtatcggtaaggctaaaatcagtattttcctttcgctgacgcggcagttgctttatcttttgccttgcttattactgttccctaactggtggggattggaaggtatctggatcagcatgccggtatcggatgcgctggcgtttattacggccgttatcagtctgatgatttatatcaagaaggtttccaaacagcatccggtagtagcagaataaggcggtgcctgccctattctgccatttattctattcggcttattctgccttaatgctattgaccggattctcgttcgcgatatgccatgctttcagaacaacacagattacaatcagtaattggacgaacaaggcagtagcagcaaaaagcaatggattcaaatcaatctgctcggcaaactgatcgagccatgcctgtcctgcaaaataagaaactgtagtgcctactaggatagaaatcactgaaacgtataaaatgtcacgtgtcagtaatccgaggatatgagatgcttcggctccattcactttccggatagctatctctttgctccggcgctgggtttcatcgttcacatagccaatcaatcccatgataacgatcagcaggataaaggcggaagtgatccagacggaattgcggaagcggtatacgtctttatagatatttttcaccatttgatctaccaggataaaacgcaaggatatattcggataggtattttctacaaactcgttcagacgtttcagattctcgttatatggttctttcaagcggacatcaaaggcgtggttggcattttcatctccaatcaggacaataggagattgcgacccataaaagctgttattgcgaatgtcacggaatacacctacaatcgttccttgaatgtcattcactgttttacctactgctccgtcggtccatttcatcagacgcaccagttcttcgtttaccaataagtcgttctgctttttcagcgtagtgccttctataatcttaatacccataacttcaggatagttgtaatgacaggagttaaaattaagggtagcaatccgcttaccgtcatttcccatcagtccgcgtgtccagtactcgcccaacaccccattcacggcaacggtcactccttctaccatcggttggcggttcaaatcgtctttgatatgctccaccgattctttaggcaaccatgtctgcgcttgagctaatccgggcacgacgatacccatatcacggctcatcagatgactgtactgcaacagagtgaccagcaacaagcccaaaacgaaagaaactcctgtaaactgcacaaacaacaacgaacgcttccaccctttcttcccatctgtataccggcggaatacctgcgtgacagggatacgggagaataatcgtcccggtatgccacctgccagtatgaagagaacaaggatagtgagcaacggtacccacaacgtttcccaagtgaaaagtgaggaaagacggacggaaagtaaatcttcaatcaaatcacgcgcattgattatcagtaagaaactaagcaatacggaaagaatgacaaggattcctgtctctgccataaacattctgaaaatatgggtggaactggctccattgcacttatgtactcccactccttttgcacgacggcttaaagtagcaatggatatcagcatatagttcatgatagccacaaagaagatagcaaaacccaaaaatccgtaaatgaccaaacgcttttgtacatcgggagaagccagatgacgtttcaccaatggaaggacgctaaattcaattttccagccatcatactctaaatctgtatatttcccgatcacccgctgaatgtcagcattcactttgtcaatgtccgaagcatggcgcaaacgaaggaaagcgtaaaagacatcatttcctctccagccggctcctgcatgataccctccattctgatgaacagatatcacgaaatcatgggtgagcatcgtattttccggtacatctttgtagatcccacgtatggtcagtgtgttttgtttttcaacagaaagcactttaccaacagggctttcatctccaaacgtctcacgggcaaaatgctccgaaacaaaaacgcttccgggcataatcatatccttgggattgccttccaacaccggtatgccgaaagtctgaaaaaaacaagtatccgcaaagatgtaatctgcatcgggcaacagtttatcttcataataaatattggcacttcccatcgaaaggacactactggctacttctatttctttcggcatctcttctgccaaagtaggtgccaccacatcgaaaacagtatagtcgtaactggtctctccatcatcacctgcggtttcgcctgtactaagattagtcatctgacaacgtacaagtgccaggcgttccgcctccggatagcatttctcatagcttagttcgaaagctatctgcgagaaaagcagaacaccgatagtaagccctaaggaaagggaaatgattcgtatgatattcgatccgcgttcacgcaataaggtacgtatagtataatagatttgtctcatggttggttctctgtttatgcctttacacttgctacaatacttccatcgaataaatgtacggtacgatgtgcaaaactggcatcgtgctgtgagtgggtcaccatgataatggttgtcccctctctattcagttccgtcaacagattcatcacttccgctccgttttttgagtcaaggttacccgtaggctcatcggcaaggatgagttgaggattggtaacaaccgcgcgggctatcgccacccgttgttgctgtccgccggaaagctgttgaggaaaatgtttagcacggtggttgatattcattctttttagaatgtcttccaccattcggcgacgttcgaaagatttaagacctaaataagtgagcggaagttccacattctcatagacgttcaattcgtctatcagattaaagctctggaatacaaagcccagtttacctttacggacacgggtacgctccttttctttcaggccggctacttcttctcccatcagcagataagagccttcagtggggttatctaataggccgaggatgtttaataaggtggatttcccacaaccagacggtcccatgatagcaacaaattctccttcttttacttcaaggtttacatgatttaatgcgaccgtctccacttcggtagtacggaatactttactaatattttcaatctgtatcatcttgtttatttatgatgttgttctacatagatttatttccagttttactattgacgtttttagtcatgcagaaagtatgccaaacaagaatagctattcattttcaatcatttatcttttcttagtttcccaagcattgtctaataattagacaggaccgtctaattattagacaaatcgatactgttccatatctcccatttattgttcaaagagtcctatttgcctgttagccgattgtccatccagatagaaaactttatctttgcatttagttttctagactataaacaaaataattatgatgagaaagagtgtatatgtattcttatcgtgctttttactttccggatgcggcatgatagattaccatccatacgacgtccgtatcagcggcgaaacagaggtcaacgcacataatatcgaaagaatagaggcaaactgccaaggtaaaacgaccatacgctttgtgaccatgggcgactcacaacgatggtacgatgaaacggaagatttcgtgaaagagattaataaacggaatgatatcgacttcgttattcacggaggggatatgagtgacttcggactaaccaaagagtttctctggcaaagggatatcatgaacggacttaacgtgccttatgtagtccttatcggcaaccatgattgtttggggacgggagcagaaacatacaaggcggtattcggtcccaccaacttttctttcatcgcaggtaatgtgaaatttgtctgcctgaacaccaatgcattggagtatgactactctgaaccggtgccaaacttcacctttatggaacaagagttaacgaacagacaggatgaattcaaaaaaacggtcattagtatgcacgcacgcccctacacagatgtattcaatgataatgtggcaaaagtattccaacattatgtcaaacaatacccgggaatacagttttgtacagctgcccacacacatcactttcaggatgacgtgatttttgatgatggaatacattatgttaccagtgattgtatggattaccgtacttatctggtatttacaataaccccggaaaaatatgaatatgaactggttaaatactaactatatcttgcgcgcaggagtattatccgtacttctgttacttcccggtctgatttcagctacttgtaaagcagatacaatcatcaactcgtacaaggctgattcactccgtttcattatcaaagatgattcaattatcacttttcgcacaggagattctatatttacgatcatcagagcggactctgtattgccggttacaccgaagcaggtgaaacacagtcgttacgataaccggattcaccgtttccgcagtcactgggaacggattatcccgacgcactccaaaatacagtatgccggaaacatgggattgctttctttcggtacgggatgggactacgggaaacataatcagtgggaaacggatatattgctcggatttataccgaaatattcgtcaaagaaggccaaagtaaccatgacgctcaagcagaactatatgccctggagcattaatatcggaaagggcttctctacggaacctcttacctgcgggctttatgtgaatactgtgtttggcaaccagttttgggtaaatgagccggaacgttatccgaaaggttactatggtttctccagcaaagtacgttttcatgttttcatgggacaacggttgacatacgatattgatccgcaacgtagatttttagccaagtcggtgacttttttctatgaaataagtacgtgcgacctgtatgttatcagtgcagtaaacaatagctatctccgtccccgtgattatcttagtttatcattcggattgaagttccagtggttataaaagaatttatgatttatgaattatgatttataacttactttttcgtaagtttgcgcattgcaaacttgaacgaaaatgagtaaatcaggaacaatcatcattgtagacgataataaaggagtattgacagccttacaaatccttttgaaaaattatttttccaaggttgtcacactctcttctcctgtcaccctgtccagtgtcataagggaagaagccccggaagtaattctgctggatatgaatttcacatcaggcatcaacaccggcaatgaggggttattctggttgcatgaaataaagaaagtacgtcctgaacttccagtcgtactttttacggcttatgccgacatcgaactggctatccgggggattaaagaaggagcaaccgactttatcgtcaagccttgggataaccaaaaactggtggaaaccctgcaaaccgcagcagcttctacgcacaacgacaagaaaacggacggcaaagaagaaaccacccactcacctatgtactggggagaaagcaaagtgatgcaacaactccgcgcactgattgaaaaggtagccatcactgacgccaatatcctgataacgggcgaaaacggaacagggaaagaaatgctggcacgagagattcatgtcctttccaaccgcaaatacaaagaaatgattgcagtggatatgggaactatcacagagtctttatttgaaagtgagcttttcggacacgttaaaggttctttcaccgatgcacacaccgaccggaccggcaaatttgaggctgccgataacagtacgctgtttctcgatgaaataggcaacctgccttatcacctgcaagcaaagctactgacggccatccaacgacgaagcattgtgagagtgggaagcaacacgccgattcccattcatatccgactgatatgcgcaaccaaccggaatctgcaagagatggtagtgaaaggtgaattccgggaagatttgctctatcgcatcaataccattcatgtagcgattcctcctttgcgggaacggaaagaagatattattccattggccgaaagattcatggtacgcttttgcaagcaatatgacaagacattgatgaagttcactcccgacgctaaagataaattgaaagcacacctttggtatggtaatatccgtgaactggaacacgtgattgaaaaggccgttatcatcaatgacagtccgctcgttcccgccgaattgttccaattatccattccacggacggagagtcaggagaaaagtatttctacgctggaagagatggaaatgcagatgatacggaaagcgctcgacacttgtgcaggaaacttatcggcagtagccgcccaactgggaataaccaggcaaactctttataacaagatgaaaaagttcggattatgacagtgcagcttcaacaagtaggtgttcaatattggttcagagtcctgctgacggtacttttctgtatatcgtccgtgtggttcggtatacatcaatcatacggctggttagggggcagtctttgtctattggttcttagcatactttggcaaatccgcctttatcgtctccacaccaaacaggtgctttttatgattgatgcgctcgagaataatgataatacgtttcattttaccgaagaaaacggtactcccgagagcaaagaaataaaccgcgcactcaaccgcgtgggacatatcttatatagcgtgaaagctgaaacagcccagcaagagaaatactacgaactgattctcgactttgtcagtaccggactagtagtgctcaatgacaatggagccgtttatcagaagaacaaagaagcactccgtattttagggctgaatgtgtttacacatatccgccaattgagtcaggtggatgcgcagcttatggagaaaatagagaactgtcgtccgggtgacaaactacaagtcatatttcacaatgaacggggaacaattaacttatccatccgtgtgtcggaaatcaatgtacgcaaagagcatctgcgcatccttgccctgaatgatatcaataccgaactggatgaaaaagaaatagattcatggatccggctgacacgggtgctgacacatgagatcatgaactctgtgactcccatcacttccctctgcgatacgcttctttcaatatcagcggataaagacgaagaggtgaatcacggattgcaaacaatcagtacgacaggaaaagggttgcttgcctttgtagaatcataccggcaattcacacgcataccgacaccggaaccctccttgttctatgtaaaagcgttcatagaaagaatggttgaacttgcctgtcatcagcatccatgcgagcatattcgtttccacacagagattactcctgcggacttaatcgtatatgcagatgagaatcttatttcacaggtagttatcaatcttttgaagaacgcaattcaagcaatcggcaatcagccggatgggagaattgagttgaaggcgtcctgcaatgacatggaagaaatatggattgagataaagaacaatggtcccgaaatcccagcggaaatagcagaacatatcttcattcctttctttacgaccaaagaaggcggtagcggaatcggacttagtatctcccgccaaatcatgcgcctttcaggaggaagccttacgttactacgagagaaagagacaacgtttattttaaaattcaaataacgattgatatatgatacctacactagtcaacaatccgctattccgaggaatcactccggaaaaacttcttgccgatctggaagagatcagttttcatacacgttcttataagaaaggagaaatcctggcacgacagggagatgtgtgcaaccgtcttatcatcctgaccaaaggaagtgtgcgtggagaaatgattgactattcgggacgtcttatcaaggtagaagatataactgctcccagagcgattgcccctctgttcctgttcggtgagcagaaccgctatccggtggaggtgactgccaatgaaccgacagaggtgatcgagcttcctaaaccaagtgttttgagtttgttccgcaagaacgagcagtttttggaaaactatatgaatctctccgccaattatgcacggactttatcggataagcttttcttcatgtcgttcaagaccattcgtcagaaacttgcctcctacctgctccgcctgtacaaacaacagcaacaggagcatatcaccctcgaccgttcgcaacaggagttgagtgattacttcggagtctcccgcccttccctcgcccgcgaactggcacacatgcaggaagacggactattgatagcagatcgtaaacatatcactatcttacagaaagaagaactggtccggctcatccaataatgctccgatttaaaaatcatttatctaattgtgagtatttgagataaaaatattcattgttgtaacattggttacagaatcacctgaaacctttcctctacttttgcgttcaataaataaactgttggactaattaaaaacgtaaaagttatgagtatgttctgttatcaatgtcaagaaaccgcaatgggtacgggttgtaccttaaaaggtgtatgcggtaaaacttccgaagtggctaacctgcaagacctgctgctttttgtagtacgtggaattgctgtctacaacgaacatctgcgtaaagagggacagtcttccgaacaagcagacaaatttatctatgatgctttgttcatcaccatcactaacgccaattttgataaagtagcgatcaccgaaaaaatcaaagaaggactgaaactgaaaaaggaacttgccggtaaagtaaagatcgaaaatgctcctgacgaatgtctttgggatggaaacgaagaggaatttgaagaaaaatcaaaaacggtcggtgtgcttcgcacgcccaacgaggatatacgctcactaaaagaactcgtacactatggcctgaaaggaatggctgcctacgtagagcatgcgcataacttgggctatcagtcaccggagatatttgcattcatgcagcacgcattgtccgaattgacccgcaatgatattactgtggaagaattggttcaattaacgctagaaacaggaaaacatggagtatcggcaatggcacagctggacaaggcaaatacgagcagttacggtaatccggaaatctcacaagtgaatcttggtgttcgcaatcatccgggtatattgataagcggacatgatttaaaagacctcgaagagttgctggagcaaacggaaggtacaggggtagatgtatatacgcacagtgaaatgctgcctgcgcactattatcctcaactaaagaagtataagcatctggcaggaaactacggaaatgcctggtggaaacaaaaagaggaatttgaaagtttcaacggtccgatcctgtttacaagtaactgtattgttccgccacgtgcgaatgccagctacaaagaccgcatttacatcacaggagcctgtggtctggaaggcgcgcattatatccccgaacgcaaagatggaaaaccgaaagatttttctgccctgattgcccatgctaaacaatgccagccacccgtagccatcgaaaacggaacactcatcggtggattcgctcatgcacaggtgacggctttagcagataaagtggtggatgccgtgaaaagtggagccatccgtaagttctttgtaatggcaggatgcgacggacgtatgaagagccgtgaatattatacggaatttgctcaaaagttacctggtgacacggtgattcttacggcaggttgcgccaagtacagatacaataaattagctttaggtgatatcaacggtattccaagagtgctggatgcgggacaatgtaatgacagttactcactggctgtaatcgccctaaagctgaaagaaatcttcggactggacgatgtgaatcagttacctatcgtatacaatattgcatggtacgaacaaaaggcggtcattgttttattggcattgctggctttaggagtgaaacatattcatttagggcctactcttcctgctttcctttcaccgaatgtaaagaacgtattgatcgagcaatttggaatcggaggtatcagtacagtggatgaagatattgtgaagtttctatcataaatgataagggaacagaagggtattttacagacaaatttccttctaaaaaatagtgacggtatatgataaggatagtgacggtatacggcaatgataccgtcactatccttatcatataccgtcactatctttttctctgtgtaaggagggtaaagtcaaagctcctttctttagagaaacgcccctacacatagctgtagcaaggggaaatttttcaatttgggcattatgacacatcctcgtttattatttccgcatagtggatggtttctttttgaatagaatatcaatcttctttgggcaatatcaaattgagaactactcctgccaaagctgccaatccgataccggacaacgaaaaatcaccccaactaaaagcagcaccaccaatcccgacagtcaacgttaatgatacaatgattatatttctcgtacggctcaaatcaatgcagttgtttaccagattaccaatacccgcacaggcaatcgtaccgaaaagcagcagcatgataccacctagtaccgcacttggtatggatcttagtaatgcgctgattttaccgataacggagaataagatagcagagatggcagctattcggaccacttgcggattggtaatctttgttaatgacatggctcctgtcacttccgaataggtagtcacaggaggcccacccagcaatccggcacagaaacaagccagaccatcacccaataaggtgcggtgcaatcccgggtctttcacgaaatcttttcccgtaaccgtattcaccacatagacatcaccaatatgctctatcaccggagcaatagccaccggaatcataaataacaccggctcccatgagaatttaggaaagacaaactgcggcaatccaatccaagcggcatctctgatgccggacaaatccaaaccatagaagatccatgcagccagataccccactacaattccacagaaaataggtatcagcttcaaaagtcctttagctttcatcgaaacaacaaccgcagtcaccagtgaaagcagagccagcacccagttctcttttgccatattcactcccgttccggccaatgacaaacctatcagaataatgacaggccctatgacaacaggaggaaacaaccgttcaatcacccgcactccctgccatttgacaagcgcactcatcacaaagtaaactaatgcaactccaaccatgccggataaggcaccgggcagcccataaagttctgtcgctttaatgataggcgcaataaatgcgaaactactccccaaaaagataggaacctttccacgcgtaacggcatgaaagataagcgtaccaatacctgctgtaaacagagctgtcgaaggatcgagccctaccaataacggcacgagtaccgtagctccgaaagccacaaacaagaattgtacccccaccacccctttcctcaaaggtgtaagattatttgaatccataagtataatgtagattaatctctgcaaaattagtctttttagacaatttaactcccttttttcacaaaaatacatctaaaaagaggttttatttgttgttaataatgtgtaacttcgcacggtgagaattaaaacgacaattttataactttataatatattgcctatgatatttacagcagaaaacaccctacttatcggttctatcttacttttcgtcagcattgttgttggaaaaaccggatatcgctttggagtacctaccttattattgttcctcgtagtaggaatgttgtttggaagtgacggcctcggcctgcaattccacgacgcgaaagacgcgcagtttatcggtatggtcgctcttagcattatccttttctcgggaggtatggatacgaaattcagagaaatcaaacctattttaggtcccggtatcgtgctttccactgtcggagtactactcacagctcttttcaccgggctctttatctggtggatatcaggtatgagctggtctaatatttatttacctatcaccgcttccctgcttttggcctctaccatgtcgtctacggactcggcttcggtgttcgccattctccgttcacagaagatgaatttaaagcacaacctccgccccatgctggagttggagagcggaagtaatgacccgatggcttatatgcttaccattgtcctgatacagtttattcaatcgtcaggtatgggagtcggagctatcgtaggctcttttgccatccagtttatcgtcggtgcggctgccggatatgtactcggaaagctcgcaatccgaatgttgaataagctcaatattgacaatcaggccttatatcctatcttactacttgcatttgtatttttcactttctccatcaccgacttactgaaaggtaacggataccttgccgtatatatcgccggtatcatggtaggaaacaataaaatcatgcaccgtaaggatatctacacctttatggacggactgacctggttgtttcaaatcatcatgttcctttgcctgggattgcttgtcaatccgcacgagatgttggaagtagctgctgtggcattgttgattggtgtctttatgattattatcggccgaccgttaagcgtattcctttgtttgcttccattccggaaaattacgatgaaatcacgtattttcgtctcctgggtaggattgcgcggtgcagttcctattatctttgccacttatccggtagtggcgggcgtagagggttcgaacctcatcttcaacattgttttctttattaccatcgtatcattggtggtacagggaacaacgatttctttcgtagcccggatcttgaatctttccaaaccactggaaaaaacaggaaatgatttcggagtggaactcccggaagaaatagactctgatcttagtgatatgactattactaaaagtatgctggaagaagcagatacattgaaagatatgaatctcccgaaaggcacgctggtaatgattgtgaagcgcggagatgagttcctgattcccaacggaacactgaaactgcatgaaggagataaactgctactcatctccgaaaaatcaaaagaagaagagactgattctgactaacatccgaaaagattgattctatacactataactgattcgtctccacgtatgaagcctcttgtccctataagacactcgtttcttcttcatgtgtggagacgaaatgttttaaataggccaacagactagttttaaggaagaaacacgaaaacgccttagcaagccgtaaaaattgttcattcccctccgttaattaaccgtaaaacttgaatttaaaattcggtttacatcagcgaagtattaattttgcgcagttttaaactaaatgtgcaaaaatcgaatggaacaagaacatcagttcattgattatattgagcaaagcatcatcaaaaactgggacaaggatgccttaactgactataaaggaattacccttcaatataaggatgtagcgcgtaaaatcgctaaatttcacattgtcttggaaagtgccggcatccagccgggagataaaattgccgtttgcggacgtaacagtgcccattgggcggttactttcctggcaacgattacttatggagccgttattgttcctattttgcatgaattcaaggcagataatattcataatatcgtcaaccattccgaagccaaattactttttgtcggtgaccaagcctgggaaaatttgaatgaggacgccatgcctttattagagggtattgctttactaacagatttctcaccattagtatcacgcaacgagaaactcacttatgcttttgaa

SEQ ID NO: 8144 - DNA, 6744 bp, Unknown
  gut microbiota DNA sequence
catcgggccgaaaatttggagataaccgaaaagtccgtatctttgtactgtgtttttcatagtattagatttaaggttaacaaaagattggctgtctgggatagatagcctttttttatgcctgtaagtcaggtgcggatcaggaagactaaaacaacgaatattgcttatccaacaatctacctcggaatatctgtccggcggctggcactgattatcatagctcaaagttacgaaaaaacaatctagtttccatgattggccctttttctattcttacttatccgggaagcaacttatgtgaatgaatatgttaaatgttaacgtgtgaagtctgaaatgttaatacgctccgcggagtattaaaccctgttataatatcgtcagtttggactctgaaatttgctatttatctgaaatatggtacctttgtactgtgtttttttcataagtattagatttaaggttaacaaaagattggttgctcgtgatgagtagccattttttgtttttatacacgctgattgcttattccttaatcatcgttagcagcatcttaaatttctccactgctacaagagcatgcggtgcattagccggaaatacaatactttctcctgcctttacagtgaatagagttccgtttagagtgatatcggctaccccctccaatacctgcacgagcgcatcaaacggagcacgatgttcgctcaatccttcacctttgtcgaaagaaaataatgtgatatttcctgccggactcttgattaactgtttgctgataacgccgccttccgcatattcgatgagagaagccagatggagcacagctcctttttgaaatgattgttccatatctgttttatttttaagttactaccatgtagaacacttctcgaatatgcattgtttgtctataacaaaaaacgatttttattgttatagtacgaaagacttaataaacgaaccattatgaagaagaatattttatttttcggagcacttgtaggtgctctcttgttggtttcttgttcgggaggaaacaagaaacaggctgcgtcctctgccgctccggaggagttggacaatgccagtaaagtgataaactattatcatacatcgctcatcgtgttgaggcatgtagccaatgcgaaagacataaatgcagttttgggatatatggaacagacaggaaaagttcctgaagtatctccgattgcaccacctgaagtatctgccagagatacagcggaattgatggatccgggagattattttaatatagaagtccgtcagaatctgaagcagagttatcgaggacttttcagtgcaaggacgcaattctatgataattttaataaattcctctcttacaagcaggcaaaagagactgcaaagatcggcaagctcctcgacgagaactatcggcttagtgtagaaatgtcggaatataaacaagtgatctttgatattctaagccctctgacagaacaagctgaaaaagaactgcttgccgatgaaccgttgaaagatcaaatcatggccatgcgtaagatgtccggcaccgtgcaaagcatcatgaatctctattcacgcaaacatgcgctggacggtatgcgtattgatatgaagatggccgaactgaagaaagaactcgaagctgcaaagaaacttcctgctgtcacaggttatgatgaagaacagaagaattattatagcttcctgacttccgtagaatcatttatgaaagatatgcagaaagccagagataaaggtagctattccgacgaggactataatgcgatgtcggaggcctacgaatacggactttccgttatctaaagaatcttcctctgtttgaatgtgagctacaatcatgctctttcaaacagaggatgtttttttattaagaaaaggtttgccgtctttttataaaaagtcctttttttactatacctctttaaacaggaactttacttttgcatttgaattaagaaataatatctttgctctatgcaatcatttcaactcataaaaccctgtttggcgcttgctccatatatacggcattactggatattgcaagacgattcagtgactccggtttccgaacggactctgcctattggctgtatgcaactggtatttcataaagggaaacaactccttttgtcgggcgggtcggaactacaacctcaatccttcatttccggacaatcggtcggcttctcggatgtacagtcgacgggtaggatagaaatgattactgttgttttccagccttatgcagtcaaagcattgtttcatattcccagccatctgtttcacggacaaaatgtagataccgatgcgatggaagatgtagaactgtcggatttggtaaaacaggtcactgacacttctgataatgccgtttctattcgtttgatcgaacagttttttcttcgtcgattatacacccttccggagtataacctcaagcggatgtctgctgtgtttcatgaaataaacctccagccgcaaatcaacattgctcatctgtcggaaacagcatgtttgagtagtaagcagtttgggcgtatctttgccgattatgtcggcactacccccaaagaatttattcgcattgtccgtatgcagcgggcattgtcaatgttgcagcaggatgccactatcccttttgtacaagtagcttatgaatgtggcttctccgatcagtctcacatgataaaggaattcaaactcttttccggttatacccctgccgagtatctttcggtctgcgctccttattccgattatttctccgaactttaaagatgtcccttttttcctatcaggcttcctcgtgttaccctacttttgcggtgtctttgcaaaggcttagtagtaacgataaaaaagaaacgagatgaaaaaactcattgcattttttgagattcctgcttccgatttccatcgggcagtcgatttttacgaaacagtgttaggtatgcaacttccgacttttgaatgtgaaacagaaaaaatggcttgtttcaccgaagaaggtgaaactgtcggcgctatctcctatgcttcaaatttcgactttcttccttcatcgcatggagtgcttatccatttcaactgtgaggatatagaacagacgttggaaaaagtacttttgaaaggtgggaaagtagtcattcccaaaacaaagatcgaggcagacggcaaaggatggtttgccgtattcatggatagtgaaggaaaccgcattggcatttatgctgaaaaataacaggtaggagagaggaaggcagcctgtcatggcataataatgtgcttttagatgcggataacgcaagatgacacggataagaagattataaatctgctaaatccgtgtcatccgcgtctaaaagatagacttatcagggctttgcattgccccctaaagtcagacgttaaatcacatctttattcattctctttattccgccattcgcctgccccgattattctaccggaatataaatttccgtcaacaactcttcgggagcagtgtcgcatggattgttcagataacgttccgcgctggcttcatcacgcagcgtacattccatttcgggcagacactttccgtaaatcgtatcatacacagcttgcaaattgtcatacggacctttatacaagaagatagcataacgtccggctgggatcaccttaaatccgacatcacttttgggggctacctttacaggcattaccatacatacgtctgtacgcagtttttctgccggtgtcactttcggatcatcgtgatagatgcaaagcgggctgaaatctcccatcggcaactgttgttctttgatgaattggaataaacggccccaggtgccaccgtaatcattcagtttgtaatcgccggtgagacggatataaatcacattccgttcggaaacgtttttgatctctctttttagttccaggtctggcctgataatcgctggtttcataattacaaagtttttattgtttctatactctaaaggtgaaatgccataaaattgcttgaacactttcgacaacgaagaaggagaagagtaaccaatccgataggctatgtcggcaatcggaacatccgagtagcggagtagacgtgcggcagcttctgtccgcgtccggacaataaacgtaccaatcggttcaccgagaaaagctttcatgatccggtgaaagtaaaaaggagaaaagtttgaaattctggccagagattttaaatcaatgtcttctcccaaatgttggttgatgtattccactacaacatttacgcacttttgatattcttctttcgttgtttttttctgttgcataacttattctggtatttcactccgcaaaggtattggtaaaaaagcgaaatgacttgtccgatattgcggaaatgtcaatttcctattttctttctgtgattgcccgattcctgttttgagaatttattttgatatataatgttccttttagtggtgttatggtacgaattattaccaagtttttaatcactagacgcgaaattgatttctttgttttaaataatgtcaaaaactaaaacaaaaaagttggttttgttataaacaattattaaaatgactatattgtaaccaaattattaataaaaatagccatggataaaacaattgtagggaacaatgccggaaaagtttggtgtgccctgaaagaaattggtgaaatttcaatacctgaattggcaagaagattaaacctaagcgtagaaagtacagcattggcggccggttggctggcaagagaaaacaaaatttgtatccagcgaaagaacggattaattgctttatctgatgaaagcactttcccttttagctttggataattacagattttgcgagtgagtatctttggatttccgttaacttgtaagtaagaaaatgtcgatataaggtatcacatgcaaagtttgaacttaagaagtttaatatttaaaagagttgctccgtaatagggcaactcttttaacgtataataaacgtataaaaatatcaaatcgttcttgttgataggtaaaatatagatacttatatttcgcaataataatagtcgatttttctttaaaagttctactttggaggatttgttcagaatcctacccgctttcttcctaaagagaaatccatgccttcgtaattatagatttcagccagtgtcataggttgtgtctgttgggggatatccagcccttcttcctttattagttggtttactttgtcggttgtcaggtctttaaattcgtaccgggcagccagacgtccttttctaagcaaggcttcgtcaatatcttttagtggagcgttgaatgtgcagataaatttgatacataattcatcactcaatagtccgtcgctgatattcagtatgttgactagtccggcattcatgcggttgcttccgttgcggcttgacaataactcttcgcaatcttctacgataaagatcgaattcttttgttggcggataaaagtgataaagctagggtccgaaagtttgtctaccaggtcgccgctcatataaatcattctcttttttccgagattgataagatgacggatataagttgttttccccgtaccttgtttcccgtgcagaatgattaaaccgcttttattctcctctaataggaagttttcgatttcagcggctacgggagcaaaatcattgttatagtggcggtcaatctgaatggccggcttattgatttgcgattgtttcaggctgaagtagttatgagcgtatgttactataaataggttgttcagtttctcattctcctttttgtggttttcgcaaatttgattgatacgatcgatttcttccttatcaatattggaataggctatttttatgcaattatcaaaatagccaatcattaaattcttcttgcagataacgatgcaatcatataactcttttgtagatgtatcttcttcttcctcctcttcctctttttcattctcaaaatgattgcaatatatatgctcgaatatatcgaacgcatcgtcttgctgataaagttctttgatttctttcaggaaatcttggtttactttatatttcaccattttcatagaagggaatcgtttgaatatctgatagaatagactacaaatgctactgtcgctgaaccagcctgtggagtaatcgaaaatatctgtgaaatctgcgagtgtgtattctttactcattttctctttttatataaataggacggcaaaggtactaaataaatctatgatatggacttatccgatttatcattttcttgaaaaacattggtatgatagtttcctgcatttatatcagcgcccccctgcaaacgatttttcattttcatttctcatattctcataggttgcacaataatcaactgtaaatcatcaatataacactatgagaaataaaatataaaatggtatttctcatactatttctatcatttatccttaaaaatgatgcatttctcataggttttaaatcgtttctcatcttattctcatactccttttatctattttactcctttctcatgcattatggctgtatcttttcccagactctcgtcgaactttacgattattcctttttcttatgtcgtttattaagcaacttcctattgtttactgctttcctgtgtatcatgcaccttatatccttatgcttttccttaat

SEQ ID NO: 8145 - DNA, 42520 bp, Unknown
  gut microbiota DNA sequence
atcttaaaagctatataaagtatatgttatattatcatcaataaaaaccagctttactctatcagacaaatccattcccagatacagacctgatgaaaataaataccatattaccaatccaagctcttaccaataaaagtattatctttgttgcatgaaaaaattagtcattgtaggatgtggacgacttgcagaaatcgttgcggatgcagttgtcaaaggcctattaccagattatgacttggtaggtgtctattcgcgtacggcttcaaaagcagcgcacatcgttcataaaatgcagcaacatggcaagccttgcattgcttgcgccacattggaagagttattagcattaaaaccagattatctggtggaatcggcctctcctgccgctatgcgggaattggctttgccagcattgagaaacggaacctctgtcattaccttgtctatcggtgctttggcagacgagacattctatcaggaagtggcagaaacagccaaggcaaatggtacacgaatctatatcgcctccggagctaccggtggattcgatgttttaagaactgcctctctgatgggaaatacgacggcccgcttcttcaatgaaaaaggtcctaatggactcaaaggaactcccgtttatgatgattctttgcaaacggagcaacgtaccgtcttctccggaagtgctgcggaagctattcgcctctttccaaccaaagtgaatgttacagttgccgcctcacgagcttctgtcggtccggagaacatgcaggtatccatacaatctacccccggatttgtgggagatacgcaaaaggtagaaatcaaaaatgaccaggtgcatgccgtagtagacatttatagcgctacatcagatattgcagggtggtcagtagtgagcaccctgattaatatcgcatcacccattgtattctgacagattggccaatacttttgcgctcaggcggtcaaacgcctgacgcgtacggccagtagacacctgcatacaacgtacatgcggatgattgagcagttgctcactccccaatgcgcctatcgtatcacaaaagcaaaggttatcaccttccagccattcagtgaaagcagcctcatcccatgccggtgacaaaccggtattgaataatatcttccggttacccatctgcctgaattcctcttcatgcagcagaaccgtgtttttattaaggcaacaacaaatgacttcactctctgcaagaagtttctccaatggcaaaaagcaatatcctttggcagttgccgcttctttctcactgcgggcataatatgaaatatcagcaccaaagaacttcaaagcatccgctatcatgccgcccgacttacccagtccgactattccgactttcaatccggtaatctcacgaggcaactcctcccacgattcctgcccgaagccatgcaaacagcgcaccaattcactgactacatattccactactccctcgtcaccataatcccggatacctgttaccgtgatcccccgttcattggcataacgaatatcgacattggcactttcgggggaatagagcgagcaacacattccaatgtatttcacattcggacaacattcaagtacataccggttgatacgggaggtataactcaaaagcaccgcatcagcatctccgatacgggcaatgatttcatcatcactcgcgggtatatcaggatacatcaccacctgaccggcaaatgaatacaacgctttttcggccgacggaaccagactgaccggttctatagctacaagtttctgaaacatcgttttttattttagaagtattataaaaacaaacatacacggttaccggattagcaacccaacatgggcgctaagatacaaatttctagccataatatcatttaatgatagacgataacagtatgttttagacatacgagcgcaagttaaacatatccaatcagagttcactactcgccatccggttcctttcgtggcggtgctataaaatgcatctgattgccccgtccctcccgcttgataatgccttcggccgcaaaagatttaagatcgcccaatgcagtattctttaaacgcccggtaagttctgtataagtggttcttgtgatgaagccatgctctctgatatattgcaggacgagtttcttcaggttctccctgtcccacttacgcgaagtgttgaaatcgacacactttctgcgctccaaatctccgcgaatacctacacgcatactcttagaggcacggaaattcaccccgttgaaagctacggattcagaacgaatatcatttttatttgctaccaatcgggaagctttcactttggctgaaaaaaaaccgaactctcccaattcgacgcggtatccttcacccagatattgcaatacatcctctttcagttccataaggataccttctatcactccttccttaaatccggttctcttagcaacgccacggatcaatcgttctgccggaatcgttccactgtagacaatgtcggcatacattgtttccgtttctccttccttagtagtcaaggcaggctttttctttaaattgtaaaaggccataatcttattgttatatttaagacttttcagtgcagagaataaagattttcagtgcagagatttatcatagtttatgcactcgggtagttgtccagttgtaacgggacaatagtcaccttatagaaaaacaaatatcaccttataaagtgatatttatcactgcataagatgaccacttgtctttacaagggtaaaaaacagtaaagatacaaaattaattagcggaaagcaagagacggtacaataaagctcaatatatgattgtaatatgattgcaaaataaaattcatctaccaactaccggacatcggtttctctttatttattcacatagatttgtttatttctaaattatttcagtacatttgcctgacctacttctattacagaaaggatgaaaatagacgaaatacagtgcataaaagaactacgcaacggctcttaccaggcttttacccagatttatgaagcctacgccgaccgactttacagctttgttcttaaacaactaaaaaatcgttccctgacacaagatattgttcaggatacctttttacgcctatgggacaaccgtagccaactgaatagctttggcaacctgcaagcctttattttcactattgccaaacatcaggtaatcgattatttccgcaaacaagtcaacgaactacaattcgaagactttatggagtattgcgagaaccaagagagcgatgtatctccggaagacctattattgtatgatgaattcctgcaacaactgaagaaatcaaagaatattctgtcacagcgggaacgagagatttatgaactaagcagagaaaaacatattccagtcaaacagattgccgagcaactggagctttccgagcaaacagtaaagaactatctgacttccgctctgaagatccttcgcagcgaaatgctaaaatacaacattatcttcctattctttttataatatcgtcactgcaacacatcacaaggggaaggcaataatatcttctcccacaaaaaagatctctatctgatttttatgttataaaacacaaagaaatcatagtactctcttattccattcacgtataaccaatagaaacacctataatatggctacacattttaaagatttataccgccgatatatggagaagggactaccttcttctgacttgagagagttcaaaaaagaacttgaacacataccggatgaagaactttggaataccatgataaacatggaaaaagattctgcaccggaaatcgggatgccccccatgatgaaaaagcagatacgtaaggagcttcatcaaatcatctggagaagacgctggtatcaatttgcgaaatatgccgctgtcatcgctctactcgtcacctcttccttcggcatatattccttattcgatactccaagttcgcaacaaatgataactgccaatgtaaaacccggcagcaaatcagagattatattgccggacggaacaaaagtgcaactgaatggtgccactaccatcagatatgacatcaatgatacagaacaacgactcgtacatctatcaggagaagctttcttcgatgtagccaaaaacccggactgtcctttcagagtcatggtaaatgacttccagatcgaagtattgggaacttctttcaatgtgaatacatataagaaagatgtcatcgaaacctctctgcttaccggaaaaattaaaatatccggcggctctctcccgcacgaatatacgctcactcccggtgaaaaagcaacctactccagtgtagacaaagtcctcaaaattacaaaagctgatgtgcatgtagaaacaggctggtgtaatgattatctaattttcgactccgagcctttaattgatgttatagagcaaatagaacggtggtatggagtagaaatagaactaaaatatccacagattgcacaagatttactgtccggttctttccgccatgaaaatatacagaatgttatccattcattgagccttcagtataaattcaaatatgagatacataaagataaaatcattatttattaacctcaaaagaaaggagcctatgaaagatataatataagctatttaaagaaaaacaaccaaagaatcgcccaatcctttggttgtatgaaagtcgataaaattaatccattaaaacatgaaaaaatagtatcaactatgaattacacaaagttaattttttcctttaaaaagaggagacataatctccttatttttagaaactttaccattttgctcactggaatgattttactatccacaacaggagcactggcacaaaaaggaaatgtgtcggtaaacatcaataatggtacggtgaaaacattcataaaggagatcgagaaacaaacccggtatacattcgtttatcggaacaatgtcctcaacgaccaagcgaaagtgaccgtcaactgtaaaaataaacctctcgatcaagtcctgtcacaagtattcactccattaaatatttcttattcgcttaacaacaataccatagtattagtgaagcaagaagtgcaacaacagaaaaaaaacgaaaaaaaaaccatcaaaggtactgtgacagatggaaaaggcgaaccgattatcggagccaatgtaatacaggaaggtggcatcgggacaattacagatgttgaaggaaatttcaccgtcacagcagacctatccaagccgttggaaatatcctacatcggatacaaaaagaaatctatccgcatcggtgcttcaccaacaatcaacatagcgctggaagaagatgcacacgtcatggatgaagttatcgtcatcggatatggctccaaaaccaagcgggatgttacctcttccattggaacttataaaccgggagaagtcaatgtccgccaggtattaggtgttgacgaactgctgcagggacgcgtatccggagtgaatataacgtcagcatccggtgtaccgggaagtaaaaatcgggtcagtatccgtggaatcggttcaattaccgcaggtaacgaaccactatatgtaattgacggagtacctatcaacaatacgtcaggagatactggtgcctggggagcacaatcaatgaacggtctgaatgatttcaatccctccgacgtagaatctatacagatcttgaaggatgcagcttccgctgctatttacggctcacgtgcaacaaatggtgttatcctgataacaactaaaaaaggaagcaagggacaggccaaagtaaacattgacacgaatgttagtttctccaacctgaccagaacagacaaactggatatgaccgacactgatctgtttctggaagttctgaacgaagctatcgacaactataatctgcaaaccaacagtacgcaggcacgtattgataaccctgcaccgggaaaagcacagacaaactggctcgatctggtacttcgtacggctgttacctacacgactaccgcgtctgtgtcaggcggaacagataaaacgaattattacttgtccgccaattacaaacacaacgaaggtgtaattatcaacaatcagctcaaacgttacaatttgaaggttaatctggacacggaaatcaaaaagtggctcaaggtaggaaccgccctgaatttaagttactcgcgtaataaccgcgttcccaccggctataatataggaaccagtgtcattacccgcgccatcgaacaacgtccatgggattctccttatcgtcccgacggagaatatgctgtcggaggacaggagttggccaaccataacccgatacaggctcttaacgaagaagatgtatatatcgataattaccgtgccctcggttcactctatatgctgtttaacataacgaaagacttgaacttcaaaaccacactcggagaggatttcaactatacggaagaacacatttattacacagccgatcacccctatggcaataaagtaggaaagcttattgacggacgaaaatcttatgcgagtactttatgggaaaacgtgctcacttataaacactcctttgaagaagatttctctctggacgtcatgctggggcattctatacaaaaggatgtaacttcctcggccgcacaaacgggtatcggattcccctctccttcttttgacgtcaactctgttgctgccgaatactcggatataagtacaggactttcttcattcctgctccaatcattcttcggccgtttaagtctgaactacaagaaccgctatttactaacgggaaccatgcgtgctgacggttcttccaaattcatatccagcaatcgctacggatatttcccgtctgtcagcgccggttggaatttgggagaagaatcttggtggaaatatccacaaaccgatgtaaagttccgcgcaagctggggttgcaccggtaatcagggaggtatcggctcttatgcttatcaagcattagccggtggaggatacaactataacggtgagaacggtttaggactgactactgcaggcaaccgcgatcttaaatgggaaaaagcccaacaagctgacgtcggagtagacctttcttttttcagaggtgcgatcacattcacagcagatgcatttatcaaagataccaaggatttgctttaccaaaagccaactcctgctacatcgggttataccagccaggtatgtaatatcggatcaatgcgtaataaaggactcgaatttaccttaggagccaaccttagcaaaggttcattctcatggcattcggatttcaatatctcctttatcagaaataaactgactgcgcttctcgacaataatgagatattgacaaccagctcgatgcacgcccttaaagtcggcgaaccgatagggtccttctatatgattaagtggaaaggtatttaccagtcggatgatgaaattcctgccaagatttacgatcagggcgtaagagcaggagactgtatttacgaagatgtggatggtaacgatgtcatagacgaaaacgacaaacagtttgtcggctcggctaatccaaagttcaccggtggtttcaataacacattcaagtacaaaggcgttgacttgagcctgttctttacattttcgtcaggcaacaagctctatgaactgtggaccggaggtttacgaatgggtaacggtacatggccgatactgaaatcagcggcagaatcccgttggacgggaccgggcagtactaacgaaaatccgcgtgccatttatggttatacgtggaactccaccaagtttgtcaatacccgaatgttacacgatgcatcttatatccgttgccgtacagcttctattggatataccctcccaaaaagttggattaaccggatacatatcgataatctacgcatatatttccaggcagataacctcttcatattaacgaagtggccgtatctggatccggaagtaaatgtaagcctctctgcaaccaatatgggatatgattatctctacccatcccaaccgcgtacgtttacaataggtgtcaatcttaaattctaacagatatgaagaattttattatatcgttattaacagtattattggtgtttgccactagttgcaacgaaatggaccaatatccgcataatgccgtatccagtgataacctcaccgaggaggatgctcaattactgcttaccggactctacttttatatacaaaacaaaccaacagtcaatggttatcttacacaagacattgtcggtggagatcttgtccgcggcggagcgacaggactgaaggatccggtattattggtaaaagacctggttacccctgaaagcggtttcgtcagcggaccgtgggatggattttatactgctctctaccaagtaaattcactgattgtcgcagttgacaaattagcagccagccagtcacgaaacgagatactgggagtagccagtttcttccgtggtctgatttattatcacctggttacccgctatggagaagttcccattctcgaagctcctttttcgggagatatcgcagcatctaccgaaacagaaggatggagttttgtagaaaagaattttcaggtagcaatagattatgctcctactttttccgacaagtattacgtctcaaaacaagcggcaaaggctttaatggcaagaaccaaacttgcacaaggcaaaatgactgaagctgccaaacttgctgaagaagtgataggtgatgccaatttctcacttgccgacttcgaccagatcttccgtggaaaagcaaaccgagaagaaatattctcgtttgtcaatctgctcaatgaatcaagcgtaaacttgagtgcttccctttattcacgtgcttctgccaatggaggtagctatacatatgcgccgacgacaaaagtgatgaatatgttcgaaccggatgataaacgaaccgccatatcaattgatatgcaggaaacaaatgaagtcattaataaatatcccggtggagaggtgactaccgatccgatcattattacccgtttgggggaaatgtacctgattagtgctgaagcacaaggactttccaaagggcttacccgtttgaatgagcttcggaatttccgtggtcttccttctgtacaccctgccactgaagaagacttcatagatgcaattctcaatgagagacatacagaactactggcggaaggtttccgttggttcgaccttgtccgcctcaaccgcctggaaagtgatctcggctttgagcgcaagtataacaaattacctattcctgccaaagaaaggtctctcaataaacttttaaatcaaaattcatattgggctaactaaaacaatgaaaatgatgaacttattaaaatacatgcagattctgtcatttgtattaccagtggctttcttaagttgctcaaacgatacaattgaagacgtacattataccccgcaaacaaaaatcggtcaaaaactattagcgggtagtgaaacagtggcacgtgtatataccgataccagctttgttgttgcattgggagttacggaaacagatgtccactttcaaaaggcagacagccgctctactcatatatttataatcgacattgatttgaatgaaccgggggtttcattagaagtaggtatgccgtatgatgcggatgtacgcaacaacttccagcggcagacactaacagaaatggcagattacgccgaccgtccgtggcaccgggtagctgccatgattaatgctgatttttgggatgtcagtacaatggatatcagggggcccattcatcgcaatggagtgatcttaaaaaactcattcatctttaaagaaacacttccccaacaagctttgagttttatcgcgctgacgaaagacaacaaaatggtaattgccgactctgtggagtatcgtgggatgcagtacaacctcaaagaagtgaccgggagcggagttatcgtgctacgggatggagaaatatccggcgcaacttatccaggtattgatccgcgtgcttgtcttggatattcagatgatggtcatgtctacttcatggtggctgacggacgtgtagagttctattcatacggacttacttatccggaaatgggttcaataatgaaagcgttagggtgctcatgggctgtgaacctggacagtggcggttctgcccaaatgcttatacgacatccgatagcggatatattccaaatacggaaccggccttctgatggacaggagcggcctgtggtaaatacgtggatggtaacagtcaatgaaccttaaaaaacagaaaatatgaagaactcaatatttattttatctatcctattttgttgtaacttgttctgtggatgttcggaatcggacgaatccgattcccgacaatttcctccgaaactcatttccattattccgaaagctggatcgacaggaggtaccgcaattatttcaggagttcatttttctgaaacagcaattgataatgaggtatttattaacggagtacaagcggaaattatcgatgcaacccagaatcgtttagtgattgctcttcccaataatccggaaggtacttattcaatcaaagttagtgtgaaaggggaagttgtagaaggactcaaatttacttatgcaacacctcaagctccacctgaacttgctgtattacaggttatgccctcctctgcctatgcaggagatttagtgacactgatcggtcagtgtttcagcacagtggtatcagaaaatcaggtgacaatcaacggagtgactgctgaagttaaagaggcgacttccagccaactcaaaattatcattcccgacaccgaggaaggcagttaccctatccgtgtgagaattggtactaaagaagctgaaagccccctatttacttaccttcacacagtgacattaacgacctcttctctaacccccgcacgtggaaaagccggagaggaagtggtgatttcaggagaaggatttggaacaacggtcgaagagaacatggtttctataaacggaaagcaggcaaccgtaaaagttgtaaccgcaacaacgctaaccattattgctccggagaacccttccggtacatatccagtcaaagttactgtcgcagataaaacgatagagaatctaagtttcacctacgaagatttatcttacacagttgcaacagtagcaggtaactccgcaactacctctactgacggtaagggaacggctgcctctttcaaattcccgcagggactagctctcgcacccaatggtgacatatggattgccgaaagaggaaataacgtcatcagaaaaatggatcaggaatataatgtttcaactgttgccaaaagtggcaccgttacatttaatgctccctggcaaggtggtttcgatctctcgggtatatattatgtagccaataaagctttgaataatattattaagattacacaggaaggcacttgctctgtgttctccaccgaaacgacctttaaaagtccgatgagcgtcacttttgatagtaacggtaatatgtatattgcggaccgcgataataaggcagtaaagaaaataacgtctggcggtactgtaactaactacgatatgtcttcactcaaagccggtcccaattgtatggcggtagataagaagggaagaatttttgtaggtaccggcggtacttatcagctgcatatgttcgatacggacggtacactaaaaactgtattcggaactggcgtagtacccactgccgcgacttattctgatggtgaacagaacgacctgtcaaaagcaaccatgggggcaacattcggcattgcattcggcccggatgaggtactttatatcaccgattatacaatgcataccatacgtacgctaacaccggatgcagaaggcgactatacgaaaggaacattaaaaacaatagccggtattccgggaacgaaaggtaaaattgatggttctgccctgacagctacattcaattgccctgcaagcgtactggtttcggataaagtatatatcgctgatgagcaaaaccatttgattcgtaccataacagtaaataaataaaagactatgagaaagatatacatactactgctcgcctgctcactcttatcattgtttgtagcctgcaatgataatgactacaaagcgtcagtgacagagcttaggctggtcctcgtgaaacccaccaatgtttattccggtgaaatagctacaatactgggacgtaatttcagcacggtgccggaagaaaatgctgttttcatcaacgaccagcaggcaaccgttatagaagccttcaaggacgaactgaaaataatattacctgaaatggctccgggaaaatattccatccgcgtcaaatccccctcgggtgaattgacaggcctcgagctcaattatctgaaaacaccggatcaggaatatatcgttcaaacaatcgttggacagaagggagtattcgaaatgacagacggagtcggtacggaagccacaaccaagcttcccactggtatcgcttttgctccggatggcagtttatggtttacagaacgaggatacaactatatacgacgtatctctccggacttcctggtcacttcactcctcgatgtggcagtagacggtagcagtgctatctggcaaggtggattcgattcgaaaggaaactattatttcatcgataaaggaaaaggaatgttacggaaaatagaaaccggcagtatgtctgtttcaaccatagcatccgaaatgaagagtccaatgaatgttacattcgatgatgaagataacatatatgtatcggcacgcgacaataaggcgatttataaattcacaccttcaggtacaaaaacaactttcgccactcttaacgtatctcccaactatattgtgttcgacaaaaacaagaatatgattgttggtacttctaatgggtatgtgttgattcaaatcagtccggatggcacgcaaaagacaattgcaggagacggagtaaaaggacaagagtattatgacggagaacccggtaatccgcttagtgcaaaagtgggtgctactttcggggtagctgccggttcagatggatgcctgtatctttcggataacacgtacaactgcatccgcaaactaactcctgacgcaaatggagactactcgaaaggaacgctggaaaccatcgctggttctgggaaagcaggtttctccgacggaaaaggactgaaggctaccttcaaccaaccgtatgaaatcataattacggaggactgcaaaacaatgtatgtggcaggcgctgtcaattacctgattcgccgcattactgtcaaataatagcgagcacccggggcgatgccccgggtgacttttatcatcattaatgaattctattaagttatgacgaaaaaactttttttcttactacctattctgctaaccgcattttccatcagcgcacaaacaaggactgataaacttttgaaaaatctacatgataatgaatcgaagtatatctttgttatcgctcatagaggagactggcgcaatgcgccggaaaactccctgcaaagtatcgaaaaagcaattgcaatgaaagttgatatgatagaacttgacatacaaccgactaaagatggcaactttatttgtatgcacgacgaaactctcgaccgtacttctacgggaaagggaccgataaaagattatacgaccgaggaactgaagaagttcgtcctacgcagcggcaacggaatcaagacccgccaaccaatccccacactgaaagaagcattaaatgtctgtaaaggccgtattcttgtcaatatagacaaaggaggtacttacataaaagaaattatgcctatcatccaggaatgtggaatggagaaacaggtcatcatcaaaggatactatcctgtagagaaagtgaaaaaagagtatggctccaatgaaagcatgctttatatgcctatcgttaatttatgggataaagaagcagttgccactatacaaacttttatcaaaaacttcaccccaattgcttacgaactatgcttcaaagatgatgcaaatccgaatctaaaaataatagatgaaatcgctaaatcaggtagtcgggtatggatgaatactttatgggatagtctatgtggcggacatgatgatgagaatgctctattggaaagtaaagataaacattggggctggatgttaaagcataaagcgacaatgatacaaacagaccgtccacaagaacttattcattatttggaggaaaaaggattgagagatctggaacaatcttctctataagtcattcgaaacatcttatttattaaagaagtagcgagcttcttgttttcaggaacaacttaacacatttgcaaaaaaaaggtcaattcacccccatgaattgacctttatttcttcttatttctttccgttattagtctctaaacttaattttcagaatcttgctgatagcaggtttatacttctttagcatccggtcgaatcccaaatcgttcggatgagttccgtcgatggttccctcgtgatctgttcccaagaaacggtcttctttaatgaaatacaggttctttacgccttttttacgcagtacttctacttgttcagcgatagcctcattctgttgctttacattctcacgggctttctgattaaagtttcccgtttcgcgtatcaatgtctgtatgataataataggtgtatccggatgtttttcccgcaaggtcattacaaagtcaacagcccgttcggtaatctctttgggagaaggattaggaatacaatccaagataaaagcgtctgcatcaatatccgctaacatcccggcaacttctttctccatttttccattgccactcaaccccaaatttatgaaattatatccactgctacgggataagcgggccggataggccatgcccggacggctggcagaagctccctgcaaaatactggatccgtagactactattttctctttgaacggattttctcctttatgtatgtgagcatcagaagaaacacctatctccagactcttcaactcatcgtataaaggcagatataacaaacattctttctcttcggttcccatattatcgacaatcactctttccgtagtcacaccacccggcatccctactccggcaaattgccatttcccatcccgtttgatatacaaatccaagcctttctgggctagtctggtcaagtttggcaattggtaattgtcaggaacagtccatttagcttttatcaccggactgttcgttgtgaaggaaatagccaaacccgcagagttggtgaatagcttctttactgcaggaggcatcgtacaatactttgctgtatctacccgatggaaatattcaccttcggtagtcgcttttcctaccaataaaagctcttgagccggcatataggtaaaattgctcttctgctgtccgaatgttgtaaggggaaacattatcagacccaggcaaatccagacatttcgtgttaagtttctcatggttagtttaatattaacagtttattaattgtcagtatatcgtagcagtatcaaaaagctacttataaatcagcgttgataaatactcttctgcaaacatttcattggcaacctccagtagttgctgtgccgttaactcttcaatacgcttaaaaacaagctcggatgattcatatttatgataatgaaggtatgttttcgccattcccagtgcattattctcaaagttatcagatgccactccaatttgtccgatcaactgctttttcgctgctgccaactgggaggaagtcattttcacatcacgcatccgcttcagttccttataggtcagtttcaaacaggtatccatatcatctacatccgtcccgaaataaatacagaaagcccctgtatccgtgtaagaggtcagattggattctacattataaaccagtcctctacgctcacgaagggacacattgagtttactattcattccgggacctccgaggacattgttcaataaatagagagccgtgcgtttgtcgtcatacgcattatagccacggctaccaatcattacatgtgcctggtgtgtgtctctgggaaccgtcaaatgttccggcacataaagaggcggaggtgtacgacgattctctactcttacatcaggaatatccaagaggtatttctctaccaggcgaatgattcttttgaaatcatattgtccctgaacaaaaaacaccatattccccggttggtaaaaccggcgggtaaacgatagaacgtcttccgtacgaaaactccgcagcagttccggtttaccaagaatgtttcttcccaatggatgattgcggaagatcatatcttcaaaatcatcgaagatcagttccgacggagtatcctcatacgactggatttcatcaataatgacctccgtttctttttctatctcatgctgcggaaaggttgaatgaaatacaatatcccccaacagttcaagcgcccgttccagatgttctttcaggaaagcggcatagaccaccgtttcttccttattagtgtaagcattcaggtcgccccccacattctccatccggttgaggatatgccaggctttacgcttctccgttcctttaaaaatcaggtgttctacaaaatgggccattccctgctcattctctgcctcatcgcgcgttccggcatcgatcgcaaaaccacaataagctacttttgagagggtcggttcatggataatacgtaagccatttggcaatgtatattcgttaccttgcattgttttatacttccttattgaattaatgccacaaaaatacaataaaacttattgctgtttatagaaaattgcagatatttgtggactataacagcaacaacgtatatggaaaagataggaatattctgttccgcctccgaaaacattgacaaaatgtacttcgaaagtgcccgccaaataggagaatggatggggcagaaaggcaaaaccttgatatatggaggggccagcctcggactgatggaatgtgtagcccgcgccgtgaaagaaaacggaggcaaggtcatcggagttgttcccgccaaactggaggagaacggcaaagtaagcattctgttagacgaagaaattcatacccgcaatttgagtgaccgcaaagacatcataacggagaagtcggaggttttagtcgcactacccggaggcgtcggtacactcgatgagattttccatgtaatagctgctgcttctatcggttatcaccggaaaaaggtcatcttctacaacgaatatggtttctatgacgaactattaaaagcactccacacactggaggacaaaggttttgcacgacaaccattctcaacctactacgaagtagcaaacacattgaacgaattaaaagaaaaaataaactgattatatgatagactccatcaaacaacttttgcaacaggaagcacaagctgtgctcaacatccctgtaacagacgcttatgaaaaagcagtgaaactgattgtagaacaaatacatcagaaaaagggaaaactggtaacttccggtatgggaaaagccggacagattgccatgaacattgctacaactttttgttccaccggtattccatctgtctttctgcaccccagcgaagcacaacacggggatttgggtattttacaaaagaatgatttactcctgttgatctccaactcgggcaagacacgggagattgtggaattaacccgtctggctcataatctggatccggatttgaagtttattgttattaccggcaatccggacagtccgttggcaaaagagtcggatgtttgtcttagtaccggtaagccggctgaagtctgtgtgttaggcatgactcctactacctctaccactgccatgacagtgatcggagatatattggtggtacaaaccatgaaagaaaccggatttacgatcgccgaatattcaaaacgccatcatggtggttatctgggagaaaaatcaagatcactatgcgaaaagtaatcggtatcggagagacaatcctcgatatcatctttcgaggtgaccagccttccgcagccgtaccgggaggctctgtattcaacggcatcgtctcattgggacgaatgggaataaacgtcggcttcatcagtgaaaccgggaatgaccgtgtaggcaatattatcctgcagtttatgcgtgagaataatatcccaacggatcatgtcaacgtattcccggacggaaaatcaccggtatctctggcttttctcaacgagcaaagcgatgcagaatatatattttacaaggattatcccaaacaacgcttggacgtcctattccctaaattagaggaagatgacattgtgatggtgggttcgtattatgcactgaatccggtattacgggaaaaggttctcgaattactcgatcaggcacgggaaaagaaagccatcatctattacgacccgaatttccgctcttctcataaaaacgaagccatgaaactggctccaaccattattgagaatcttgaatatgcagatattgtacgcggttcattagaggatttcctctatatgtacaacatgcaggatatagacaagatatacaaggataaaatcaagttctattgcccacaattcatctgtactgcaggcgggcaaaaggtagcattgcgcaccaatctagtcaacaaagattacccggtagaaccgttacaggcagtcagcaccatcggagccggcgacaattttaatgcaggactcatttatggattactcaaatatgatgttcgataccgcgatctaaataacttgaatgaagaaatatgggataaaataatccaatgcggaaaagacttcgcagcggaggtttgcggaagtttcagtaattcggtatccgtggagtttgctaagaaatacaggtaaaactacagattaagatttataggccagcagcctatcctacaaagactttatattatataatccatattaagttaatcagtaagccttaacttaatatggattttcttatctttgcaaacaccacaattaatacgcaatcttacttaatacacatgaaaagatttattctgcctctattaataataatccttattcttaccagtttgcctacaaaagcaaataatgagatcgaatcattattaaaaacattagataaatctctacaaaacaaatctgtctatactaaacaaaaacagaggcagatagacagtttaaaaatagcattaaggcaatccgacaatattcaagaaaaaataggaattgcccagtccctttgttttgaatattcatcttttcagaaagattcggctttagtttatgccatccatatgaataaccttgctcaaaaaagtaatgacaaagaactactaattgaggcgaaattagattattcaagaatactatcttctatgggctttttcaaagaagccttagcgattgtcaactcaacacaacaagagcaattatctccgcgactgaaagctgaatattttctcggacaagtcacaatttataatcatcagaaaacttttgcctcaaatgagaatgatgcacaagagaacgatctgattgcacaaatttatcgcgattcacttcttcaatgcaaggaagtcccctcaaacgtacgagcattcatgtcagcaccgactcttctcttccataaaaaatacgataatgctattcacatattagacagcgtctacaaaagttatgcaccttattcacgagatgccggaataattgcatattctttagcttctgcctatcaaggcaaaaatgactctaaaaatatgattaaatatttcgcgatatccgcgatatccgacgtattaaatggagccagagagaatctctctctaaaaatactcgccaaattgatctttgaaagcggagacatagaccgggcatataaatatatgaaaaatgcaatggaggatgctatcctatgcaatgcgagaatcaataccattgaagcttcagacatgtaccttttcatagataaagcatttcaggaaaaggaaaaaaataaatttatcaccataaccatattgcttgtagcattgtgttttgtctgtatcttattgtgtgctttgttcacacaactaaaaaaacaaaaaagaaaagtggagcaagccaatgaaagtttatcctatcatctttacgagatacaacaaatgaactcaatattagcagataataataaaatcaaagaagaatatgtaggactatatatggaacaatataccagttatattaacaaaatagccaatttaaaaaagagggcgcttaaaatagccaaaagcgaagatattaaaaaagtgacgtcattccttcactcttcactcaacacagaagaagatctggctgaattttataataactttgataaagcaattctaaatctttttcctaatttcgttgaggattttaatgcattgctcttaccagaaaatgtaattattccaggtccgggtaaacttttaacgcctgaattacgtatcttcgcactaatccgcctgggaattacagatagcgtaaaaatagcccacttcctgcaatattcattgtcgactatctataattaccgttcaaaaatgcgaatcaaagcaaatggagatcggaatgaatttgaagaaaaagtggctcgaatcgggcaataaattcaagaataatagtctatcagccaccaatagcatttacatttatgtaatatccatcaatacgtatacgcctaactatcaaacaagtacatcctacaagcatttacaattcgcttactacccattttataagtagtcggaataaggtatttttgtagagtcacagtagcagtgatacctgggacttgatctccaatgattaatcccccaataaattgaaaaacaaaattggactattttataaatatcaattaatgaaaggaaactatgaatagcctattgctcaatgttatttgtgctttcgccattgcgaacacaagtcctaacgcagaaagagcccaacaaactttggacgccctttacaaaaactatgcagcacctaatacttgtttgctgcgcgaaaattatccttctgaccagaacaacaaagcaacttatctggcgtcagaagaacaagcaaaaagacataatgaatattcttatctttggccgtactcgggtacattctctgcagtaaacgcactgttggagagcactggaaacaaaaaatacaagaaacttctggaaaataaagtactacccggattggaagaatacttcgacacacgaagagaaccattcgcttactcatcctatatcagtaatcaacctctctctgatcgcttttatgatgacaacgtttggttaggcattgattttaccgattcttatcgtatgactaaaaaacaagcctatctggaaaaagccgaactgatatgggagttcattcttagcggtaaagacgaagtgctcggaggaggaatctactggtgtgagcagaaaaaagagtccaaaaacacttgttcaaatgcaccgggagccgtttttgctctcaaactatttcaggcaactcaaaacagcacctatttgaaacaagggaaagagttatacgaatggactaaaaagaatttagaagatccaacagatcatttatactttgacaatattacactcaacaagaaaatcgggcgtgccaaattcgcctataatagcggccaaatgatgcaagcagccgccctactctaccaaattacaaaacagaaaaactatctggaagatgctcaaaatatagccgaagcatgtcacaagcactttttcactcatttcacctcgccgaacgcacaaacatttcaattactgaaaaaaggaaatatctggttcacagcagtcatgttaagaggatttatagagctttatcacacagatcacaataagacctatctagccgacttccaaaaaagccttgattatgcatggcaatatgccagggatgaacggggactcttccaaacagattggagcggaacagataaaaatgagaaaaaatggcttttgacacaagcagcttttgtagaaatgtacggcagattagccggaatcaaattataataaccacttttaataatcctctcaaaaacactgtaaagatgaagaaaagaaacatcggaatatgcattattacaaccaccctattaatgggaagtcatgcgaatgctactgaacttattcttgctaaagatcataccaatgtagtcaatcaggcagctgaagtggccgcttataaaagtaaccgcccacctgtaaacaagcgtctttttacatcaaaagccgtggaagcagaaattatcagggtaaaaaagttgcttactaaccaaaagctagcatggatgttcgagaattgttttcccaatacccttgaaacaacagttcattatcgcacaacagacggcaagcctgatacttttgtttatacaggcgatattcatgccatgtggctacgtgactcgggagcacaggtttggccttatgtacagctggccaataaagacccggaattaaagaaaatgcttgaaggagtgatccgcagacaatttaaatgtatcaatattgatccatacgctaatgcttttaatgacggagctgtcggaggggaatggatgtccgacctgaccgacatgaaacctgaattacatgaaagaaaatgggaaatagattctctatgttatccactacgtctggcctaccaatattggaaggaaaccggtgacgccagtatttttgatagtgaatggatacaagccatcaccaatatcctgactacttttaaggagcaacaacgcaaagaaggtgtgggaccttataaatttcaacgcaaaacagaacgtgcactcgatacattgaacaataatggcctaggtgctccggtaaatcctgtcggacttattgtttcagccttccgcccatctgacgatgctacaaccctgcaatttctcgttccgtctaacttcttcgctgtttcttcgctaaagaaagctgctgaaattctgaatgctgtaaatcaaaatgcagaactggcaaaacaatgcacagatctggcaaaagaagtagaagctgcactaaaaaaatatgcgacttataatcaccctaaatatggtacaatttatgcctttgaggtagatggcttcggaaatcatttcttaatggatgatgctaatgtaccaagtctgctggcaatgccttatcttggtgatgtagaaatcaacgatcctatctatcaaaatacacgccgttttgtatggagcaaggataacccttatttcttcaaaggaaaggcaggagaaggtattggcggccctcacatcggttatgatatggtatggccgatgagcatcatgatgaaagcatttaccagccaggacgatctggagatcaaagattgtgtaaaaatgctgctcaatacggatgcagggacaggctttatgcatgaatctttccacaaagatgaccccaataacttcacccgtgcttggtttgcatggcaaaataccttatttggcgaacttattctaaagttaatcaatgaaggaaaaacggatttattaaacagtattcaataaagctgattcaagcaacttctcattcagggcgctcttccaccggaagatgcgcccttttttaacacgtaaattactattaactttggctaattatcgcaaaggaattatcacatcttcgggtaattcttatctttgcagtatacgattcaagacaaagaaactatgtataaaaacctgttaagctggcttactgttttattagtgctcccgtcgtgctccggcacatcacctgccatatctgtggtgtgtgaggaaaataatataggaaactgtattatcaaatgggaaacaacaccgatattaaaaggacaggtaaaagtatacacctctacttctccggaaattattccggaagattctcccattgcaatggctagcatctccagtggtaaaatgacaatcataaccaacgatccgtcccaacgttattactacttgatggtgtttaacaacaaataccgcatcaaagtagctacccgcaacatcaatattcccggtatacagaacttccgcgacttaggaggatacgaatctgccgacaccggaaaatctcttcgttggggaatgatataccgttccgcacaaatagacagtatccctccttgttcccgccaagagcttaagaatatgggaatacgaacaatcatagacttacgttctgaaagcgaacgccacaactatccgcaactacatgatgacaagtttaaaatcgtacatatccccatcctcacagggaacatggaaaaaattctgcaaggtattcgggaagaaaaaataaaaactgataccatctaccgcctcgtagaacgaatgaaccgggaattaattacaaactaccaaaaggaattcaaagagctgttcaccattcttctcgaccgtagcaattatccggttatcatacattgtacatccggaaaaggacgtacaggaattgtttccgcactcttactcgccgctctaggcgtcaatgaagatgtgataatggaagattatcgtttgagtaacgattatttcaatatccccaaagcctctaaatacgcctacaaattgccgatcaactctcaagaagcaatcactaccatctattcggctaaagaagatttcctgaatgccgcaaaggaacagattgaagctgaatatgggagtgtacaaacctatctgaaaaaaggaatcggactttctacggaagatttaaaacagttgcgcagcattttattaacagataattgattgttgataaatgataaatacgatgacgtctacaataattatccgttatcaaccatttattatcaactaaattaactatctttgcagccgaaataaaagatatacagagatttaatgaagacatttgaagagcttggcgtttctccggagatacgtagagcaattgaagaaatgggatacgagaatcccatgccggtacaagaggaagtgattccgtaccttttaggagaaaataatgatgtagtagctcttgcacagacaggaacaggtaaaacagccgcattcggtttgcccttgctccaacagattgacgtaaaaaacagaattccacaatcgcttatcctctgccctacccgtgagctttgtctccagatagcaggagatctgaacgactattccaaatacattgacggactgaaagtgctgcctgtatatggtggttcttccattgatagccaaatacgcagcctgaaacgaggtgtacatatcatcgttgccacaccgggacgtctgctggacttgatggaacgcaaaaccgtatctttatctaccatccacaacgttgtaatggatgaagcggacgaaatgcttaatatggggttcacagagagtatcaatgccatcctggctgatgtaccgcaggaacgtaacactctactgttttctgcaacaatgagcccggaaatcgcacgtatctccaagaactacttacgtaacgcgaaagaaataactattggccgtaagaatgaaagtactaacaacgttaaacacgttgtttataccgtacaggctaaagataaatatgaagctttaaaacgtatcgtcgattactacccacaaatatacggtatcattttttgtcgtacccgtaaagagacccaagaaattgcagacaaattgatgcaggaaggttacaatgccgattctttgcatggcgaactttcccaagcacaacgggatgccgttatgcagaaattccgcatccgtaatctgcaactgctcgttgcaactgacgtggctgcccgtggacttgacgtagacgatctgacacatgtcatcaattacggattgcctgatgatacagaaagttatacgcatcgtagcggacgtacagggcgtgccggaaaaaccggaacttccattgccatcatcaacctccgcgaaaaaggaaagatgagagaaatcgaacggattatcagtaagaaattcattgtcggagaaatgccgacagccgcaggtatctgtcagaaacagctgattaaggtaattgatgatctcgaaaaagtgaaagtgaacgaagaagagattgccgactttatgccggaaatctatcgcaaactggaatggctaagcaaagaggacttgattaaacgaatggtttctcacgaattcaaccgttttgcagaatattaccgcaaccgtcctgaaatagaacaaccaaccgatatgcgtgcagaacgcgccggacgtggtgatcgtaaagaaggaggtttcgagaaaagaagccgaaaagctgctccaggcttcaaccgcttatttatcaatctgggtaaaacggacagcttctttccaagtgatcttatcggactgttgaacagcaatacaagagggcgcattgaattgggacgcattgacctgatgcagaactattctttctttgaagtacccgaagaggaagcgaccaatgtaattaaagcgctgaacaaagctaaatggaacggacgtaaggtcgttattgaaatagccggtgaagaaagcggaaaaggacgcgaaagcagttctaatgagcgcaagggaggtaaacgattcggcggcaaaagtgacgagcgtacaccacgttatgaaaataaagacagaaaaccaaaagatgcctcggcaaaaggtgctaaatcggctaaaaaagataaacccagtcgtgcagaacgaggatattctgatgcccgtggtcccaaaaagaaagatgactggcaagaatttttcaaagacaaagagcctgacttcagcgaggaaggatgggcacgtagaaaacccaaaaagtaaaaaggaattcatttaaataaaatagaaaggcaactaatttgtggtaattagttgcctttctatttagtaaatattacgtaaatgtaaatcttttatcaaaacatttacttcatcgagctatcttcaactcctgaataagattgcccgccttaccgtatttctctataataaagagcatataccgcacatctactccgatgcaacgctgtaagtcgggttcaaatacaatgtcactgctcattgcttcccagttgccatcgaaagccagcccaagcaattctcctttggcattgaacatggcactaccggaattacctcctgtaatatcattattagaaataaagcaaacattcatgtctccctgtgcattggcatatcttccgaaatcaccggaagaaagcaaattcaacaactccggctggacggcaaaatcaatatcacctgcatgttccttcaccttctcaaagatacctttcacggtggtataataatcgtaagtggccccatcaaaaggagtataccccccaaccgttccgaaactaagccgcatggtggaattggcatccggatagaaattacgatcggcatacatacggcgcatggcagcgttgaacaaacgttccccttgctctatctgctcggaagcttcggaaatactctgattcatctcataatacttcacgatcaggtccagactcaaggaaacagccgggtcctctatcagattatacgtagtatcccgttccaggaaacgttttaggcccttaggagacgttatattggacgttgcatacaaagagtctacataagcctgaatattcccgttatagagtgtatctatcttttcatacatagcaggcagatacttcttatccactttcaactgatattctttgagcatggcagcaaaaacctccttatcaatggaaagatcaagattatcatacttctccaataacttcttcatgcgggtaatcaccagcttctcctcggcctcaaagtcgaaattgagaatttcaagagcaagctgcaccaactcgggaccattgataaacgattcaccgaaataagccaacgcacgatttgtttcccgacgattactataactcaactccagagaagagaataaacgaatcagtttctctctttcttccggatgagactgaatccagtcgcgaagggctgcttcagccgcccgcttcttttccaataccttcagatgtttgatggccttgtttgtcccgatgctattcttccaataattggaactttcatcgtattttgaagcatacttgatacgaatatccggacgacgatccatctcccgtttccaaactgcttgttttactccccgcacatcaatcattgcctgattgattccattcatcatctcttcgataccatacgaagaaagatagcgttccgtacttcccggataaccaagcgtcatgcagaaagaaccttccttgtatccatccaaagagatgggcgctacatattcagggtgataagggacgttgtcaggagaataatcagccgggccattcttcgtattggcatagatacggaatacactgaaatcacccgtatgccgcggccacatccaattgtccgtatcccatccgaacttcccgacagaagaaggaggcgcaaagactaaacgaacatcgttataatcacgataaacggaaagccagaattcattacctgcataataagcatcgacaataccggtcagcgtagaatctttttcgaaaacttccagaccgattacattcatgatcgaatcgacagctacacggcgttctgtttccgttttagcatagcgggcggcagataacacccgtttggttacgtcttccgtacgaagcagaaaacggacatacaactccggattcggcagctcttcgtcaaggctacgtgcaaaaaagccatctttcagataatcatgttccacagaagagtgttgctggatactactgaaaccacaatgatgattggtaaacaccagaccgtcttcggaaaccaccactcccgaacagaaacctccaaagctgacaacagcatctgaaagagagggtttcttcggattatatattttattcacaggcatttgcaaaccaagttctttcatcacccggtctgtctgtttgtttttgcgtaggtttcccagcagccacattccctcatcggcaaatacatttgacagacagagggaaaagactatcaagacggttagtctgaatttcatattactatttttagattcattattcggtaatcagcctcaacttcttcgctcctacacgggctttcagccattcgctgattttctgtttctcggcagcagacggatgtctgtcgaatttcaaaacagccaatgttaccgtatcggtcttcatcgagtcaacccgcacttcgagcgaatgagcgatggagagcgtagtgatggaagggtaaagcactttcagttcaggcactaatgtacgactcattgcatcatacgttctgtattgttccaacgttgtctccagttgggaaatcttcactgcctgttgctgaagtcgctgctcgctgtttttgtagaagtcttccatgaccatggcacggatagaagtcacatctaccgcttcattgttcatcccctgcaatacaactagcttcgtatcttccaacttatattctttcatcttgctacgggcaatagaaatcgaagcatcgggcacttcaggaccaatcaaaacaacccgcacttctttatgctcatagctgatctttttatcaagtacctgtgtattttcaaagctcaactgatcgctaataaaacgattggctgccgcctcatagaaggtgctttttataattccaaatgtcagataaaccgcagggcacatggtaagcaccacaatcaaaacgatgtatttacgtacggtcttctcacgggttttatctacaaactcttttcgttggaaatgcatcacacgaactccgaggaaagtagccagactgataaaaacagagttgatgaagtaaagataaaaagcacccaggaaataaataagattaccggaagccagtccgtaaccggccgtacaaagcggtggcatcaatgcagtagcaatggcaacgcccggaatcacatttcctttttccttggtagagagagccaccacgcctgccaaaccaccaaaaagtgcgatgaatacatcataaatagtgggcgatgtacgtgccagcagctctgactgtgaaccggcaataggggcaagaaggaagaagatagtggccgtcgtcacactgaaagcggtcgttatgagaaagctctttaaagagcgtttcatcaattcgaagtcgttcagtccgacagagagtcctactcccataataggtcccatcagcggagaaatcaacatggcaccgataattactgcggtagagtttacattcaatccgagtgatgccataaagatggcaaaaatcaggatccataaattggcacctttgaactctacacctttacggatagaatccacggtggccagttcattatccttgtcttttttcaagtccaggtattctcccagaaaggacttgatagcaaacttattacgttcatctgtcttcatagttatttcttctttataaagcgattaataacaggaatctgactcaatggtaaatccttcttgataatataagctataaatagcaataaaagtacggtacggaaagcgagacggagcaccagattagggataggcacctgttctccaataacgtaaagtaccgctgccagcagaacataaagtccgaggcttttcaaatcataacgaatcgggtattctttctgtcctatccagtaggataacagcaagattaccgcatagcctgcaacagaagcccatgccgaagcaagatagccataaaccggcacaaataatatgttcaatacaacaataatgacacagccgatcaccgagaagtaagctccccaataggtcttatccgtcagtttataccaaaaggaaagattgaaataaatccctttacagatttctgcaagcatcacaatagctaccactccaagaccttcccagtaaccttttgctacaagataacgcaacaaatcgaggtagaacattacagcaaggaaagccaacaacgagaagataagaaaatatttcatcgcagccgcatacatttttcggttatctccttcgcggtctttaccaaatacaaacggttcgtaagcgtaacggaaagcctgtgtaaacatggccatcaccatcgctattttgctggttgccgcataaatacccaattgtaccaacccttcctgtcgatcttcaaagagaaacggatagatcatcttgtcaacagtctgattcagaatacctaccaaacctaagattaataccggaaaagagtatactaccattcgcttcagcaacacccggtccaacttataagcaaaacctgtcagctctggaataaagaagaacatctggacaaccgagataatcaggttgctgatgaagatatatcccaccagatagtccggatcataaaaccaggagatggttgccggacaatgtacattcagccacggacacaccaacaggaaaaacagattcaaaccgatgccgccaatgatagagagcagtttgatagctgcaaacttgacagggcgttttttatatcgcaaataggcaaaaggaatgcattgaaaagaatctaaagctaccacaacagccatcatcgctataaattccggatgatcgccataatccagcaaattggaaataggttgcaggaataacaggcaaaggagaacgaaaatcaaagatacgcctcctactgacaatagggagttggcatatactttcatcgggtcttcccccgatttattggcgaaacggaagaatcccgtttccataccgaacgtaagcagtacgagcatcagggctgtaaacgcatacacgttcgatacgactccgtaacctccggtggaagccggtaatacagctgtatacaagggtaccagcatgtagttaaggaatcgtccgacaatactacttaacccataaatcgcagtatctttagctaatgattttagtccagccatgttttattagtgattatcattcagattggttcaacgtttcttcttttgtttgaacaaccaatccataaatccgggataattgaaagccggattccagcttccatgattacaaccgggaaattcaatatattccacatctgcaccggcagctttcagtgctttatatgcttcgcgagaacctttcaccggaactacatcatccgcatctccatgaaagatacggaacttcacatctttggcagccgacaaccggcttggattgactataccgcagataggaattgcagcagcaaatatctccgggtagcgtattactaaatcatacgttcccatcgctcccattgaaaggccgataatataaacccgttgcgtgtccacttcgggcatcaccagataggaatcgagcaactgtttgagtgtctgcaatataggactgatctcctgttctaccggcatttcagcaggtataaaagacttcggacgttccgtataagcccagtaaccgtctgtcggacactgcggaatcagcacaaaagcaggatacttttcttgattgaccggattaagaaacatctgtccgccatgagtcaactgtttctcattatcatttccccgttcgccggctccatgcaaaaacagcacgagggggtacttctcacccggtttcaccgattcggggtgaatcatccggtaaggtaaggaatctcctttagaagaaacaaaaatgtctcttccatatccctgttgagccgataaagaaaggctcaaaaagagaaaaacaaataaagtaatccattgcttcatcatccaactatgctttataaagttcttttataccgttaataccacttgtcacatgacgctttatgtcagtcattaaacagtgttttctgactattataaagacttcttcccaaatgcttataggcaagttcggttacctcacgtccgcggggagtacgtttcatgaatccttcttttatcaggaaaggttcgtaaacctcctcaatggttcccgcatcttctcctaaagccgtagcaatggtcgttataccgacagggccgcctttaaacttgtctataatggtacaaagtatcttgttgtctatctcatccagtccgtacttgtcgatattcaatgcctccagcgcaaactgggcaatctccgtatcgatagagccggtgcctttcacctgtgcgaagtcacgtacccggcgaagcaaagcattggcaatacggggcgtcccacggctgcgggaagcaatctccgaggctgcacgtaccgagcaaggtacatccagtatggacgcagaacgacggatgatattgctcaaaatatcatcgtcataatactccaaatgaaggttaataccgaaacgtgcacgaagcggagccgtcagcagaccgctacgcgtggttgcaccaaccagcgtgaaaggattcaaatcgatctggatgctgcgtgccgaaggtcccttatcaatcataatatcgatgcggtaatcttccatggccgaataaagatattcttccactacgggcgacagacgatgaatttcatcaataaaaagcacgtcgttcggttcaaggctggtcaatacaccagccaggtcacctggtttatctagcactggaccagaagttactttaaagccgactcccaattcgttggcgataatatttgaaagagttgtttttcctaatccgggagggccatgcaacagcacatggtcaagtgcttcgccgcgcagacgtgccgccttcacaaaaatgcgaaggttttccaccaccttgtcctggccgctaaagtcttcaaagcttaacggacggagtgcattctcgaaatcccgttcttttgaagtaagctgatgttcgcgtatgttaaaatcttcctgttccatttatttcttgaaaagtaggagacaaagatagagatttacattcattttcagtataagaaagacgaagatttagtttatttgaaacgtaataactacttttgcactatctatatacacgctatcaactatggttctaaattacatttggataggattctttgtcgtcgcctttatcatcgcccttgtaaaagtgatttttctgggagatacggagatatttacggctatcatgaacgctacattcgattcttcaaagacagctttcgagatatccctgggacttacaggcgtactggctctttggctgggtatcatgaaaatcggagaaaacagtggattgattaacgcactggctcgctttcttagtccggtgctttgccgactgtttccggatattcctaaaggacatccggtgttagggtccatcttcatgaatatgtctgccaatatgcttggcctcgacaatgcggccaccccattgggactgaaagcgatgaaagagctgcaggaactgaatccgaaaaaggacactgcttccaatccgatgattatgtttttggtgattaatacatccggccttatcatcattccgatcagtatcatggtatatcgtgcacaaatgggggctgcacagcctacagatgtatttatccctattctgctaagtactttcatttccactttagtaggagtcatagcagtgagcatcgctcaaaagataaacttaatcaataagcctattctcattttaatgggcattatttgtcttttcttttccggcttgatttacttgttcctaagcgtttcacgagaggatatgggtacttattctacattgatagcgaatattctgctattcagtgtcatcatcctgtttattttgacgggagtcagaaagaaaatcaatgtatacgattcgtttgtggagggagctaaagagggctttacgacggctgtgcgcatcattccttatctggttgcttttcttgtaggaattgcagtgttccgcacttcgggagcaatggattttctggtgggaggcatcggctatatagtaggcttatgcggagtggacacgagctttgtaggagcgctgcctaccgcattgatgaaatcgcttagcggtagcggtgcaaacggattgatgatcgatacgatgaaagaactgggacctgattcgtttgtaggacgtatgagttgtgtcgttcgcggagcttcggacaccacattctacattctggccgtttatttcggcagtgtggggatcaccaagactcgtaatgcggtgacttgcggtctgatagcagacttctcgggtatcatagccgctatcttaatcagttatttatttttcttttaaatcataacattcaattatggctgtaacttatcaaacagaaggcgtaaaaatgcctgatatcaagaaacgtgagactacggaatggataaaggccgtagctgcttcttacgggaaaagactcggtgaaatcgcttatatcttctgctcggacgaaaaaattctggaagtaaaccgtcagtatctgcaacatgattactacacggatattattactttcgattattgtgaaggcgatcgtttatcaggtgacttattcatcagcctagatacgatacgcaccaatgcggaacagtttggtgcttcatacgaagacgaactacatcgcgtgattatccacgggattcttcacttgtgcggcatcaatgataaaggtcccggagaacgggagattatggaagctgcggagaataaggcattggctatgcgacaagtgtaaacaagcctctgtataaatactgtaaaacgaatacgcctcatcgtaatcactacgacgaggcgctttcattagcaacaacatgctaatattaaacactaaattatttaagagagagatttattacttcttatcaggagctacttccggagtaaccaatttcttgattgtttttttattcacatacagaaaaaccagccgaggacttgattctttcatcaccaaccgcaacgaatcagatgtcagtttttcaatacgttcccgcgttttatacacttccgttcttccatcatcctctgtgctaaacccttcgattatcaaataaccgtccttgtctatcttccatgttctaagatctaaagatggcacgttgatagcggaacatttgccattcttctgaaaatggaatcctttgagttcaccggtagactgataagtataaggattacaccacttacctatcagttgtttttctacatttttttgagcgtagctcgttaatgcaaaacaggctaaagccataattactgttaataatttcttcatcttttgtcaatatttattcatttagtaatcatatttctgatcaatcccgcgttctctcaaatgaatgccttctttcatccaacgcggttcttttgttcctttcagataataatcgaagaattgcatcatccggatagtccagtccttctgagccgcctgattgccaagaaaatggccttcacctttataattaagatgccatgccggtcgttgtaagcggcgcatagccaaatacaaagcacgcccttgctcataaggaacagcctcatccttatcattatgccagattaacaagggggtatgtatcttatccgcctccactatagccgagtttgccaaatacttgtctttagcttcccacagagtttttcccatacgactttgcgtctcttcatacatgaagtaacgtggcaaaccgctaccattgcgaatacctaaatagccggttaccatatcagtaataggagcaccaatattagcacaagcaaataaatcagtctttgtgactaaaaaactcgtttgaaagcccgaccagctatgcccctgaagaccgatcttgcccggatgtgctatccgctgctctatcaagtatttcgttccgctcactacggcatcataacagctctgccctggtgttcctatggtgaaatgtacatccggcataaatacaatataaccgttacttacaaagtatattacatctgccattgcactactcagcataggagcatgatacacattcaatccgccagaatgtgtttcataaaattgcaccaatacaggatattctttatcagcatcatagtcttccggaagataaagtattcctttattagatttattctcgtagttagtccattccaccagttttgcagttccccacttatattcactttgttgaggattgacatttgttatgcgaacaggatcggaaaaatccgatttactccaccacagatcacggaattcagatatgttctgacgattccatatacaatatttccgattgtcagaaaaacgatgaacagtgtatagataagaaccttccatcaacctctttagacgacctttcatatcaatctgatacaccccttgatctttcgtatcttcgtcccacaagctcactactattttttcatccggtgcaaacacttccttatcaatattactagtcattttacggatagatttccgattcttacgaccatatcccttcgtaaaacattccggctgacactcaccggtcaggtctatcttccaccaatcatacgcatcgtaaatcaacacactgtttccatcagcagtccaacccgcaataccgtaagcaggtgcaggcgcaggtttatcataatcctcgtcaaacaccggatagccgattgcagtcgaaatatcagtcaccctacccgtagttccatcaaacttattccaatttttcgcaatcggatcgtacatgactgcccactttccattcaccgaccatttcggagtactccgatagctacgtcccaccagtttcttttctccgctatgcacatttacagcatatatgtcaaatggcactttatcaagccactctttctgcatacggtaaggagtctcatccgtataaagcacataatgaatctcatccgcccaatccggctcgaataaatcaacatgaccgggagctacttccgtcaattttttcgaagctatatcgtagatatatttagagtactcgggacgatagtaacggcttcgagtctgcaaagtaggcacctcatattcattccaagtccataactccaattcaaaacttttatccggtttcggttcatcttcctgcttatccttgtccgtttttggaagcaatggcctaatttgcagcgtcagaaacttctgttgacgagacaaattggcatgaacaatctccattccggcaggaatagcaatctctttacggtcgaatattagatcacaggtattattcttcaaagaaaaattataccatagcgagtcatttaccgtaaactctccgttcatccggttctcgtcaaatcggaaagaagaaggttctttcttgacagcactttcataaatagttcggtaaggacctgccaacggaccataacacaaagcatttccttttgcctgtttacggatgaaaagaatagagcgaccttgattatataaactatgataaccaatactgtcaatatgaaaagccactcctgtcttcaaatgacgaatcaccaaacgatcaaatgacggaatgtggttcaatgtatcctttggtacgttggtcatagaaacagagtaaggagctcccgctacaggccggaaagcttccttgtatacccactcctttctgattcccgaaggaagttccataagcattgttttcatatttcctgcggaatctgccatctgataataggcagcctgatccgaattgtaaaattccaatctttctacattcggcaacaatacctcctcccgtgtacgcgaatcaaacaagtgtaacgttttcgcctccttatcttccggattatattccattgaaacaacgcgatacgtaacccaccttcctgtcgaagatatctccggagaatcaacacgcttccatgacatacaagcattgatatctaaagctttcttttgctgttgcgcatccgtactttgagtaagtccgaacaacaagcccactcctaatcctactattatccgattcatcatctattaccttcttttatcaccgttaatcatattcttgttcaaatcaacatccgcttcagccgaatcatcatgcaacagcaaacgagcgaaatggcgccacatcttatgctcaaaaaagtcttctgattctccaaagaaaccatgagtagatttaggcaacacatacatatcaaaatctttaccggctttaatcaaggcatcagccatacgcaacgtattagccgggtttactgtcttatccatggcaccggtaaacaataacaaaccatgtttatagttcttcaccagttcttgattaggacgggtttcaacactatattcataggtggtatgttccactcccaaactatctttgaccgttttcaccttttcctttactccaaagtgaatctccacccaccctttattgtaaatccggttatcatgattgccggcagacgaaactgccgccgaataaaactcaggatacgtacaaatagcagaagcagacatgaaaccgcctcctgaatgtccgtaaatccccaccttcgtaccatctatgaacggataacgggttgccaattgctcaatcgcatatttatcatccgccagcggatagtcgcgttgcttgccatatccataggtatgataagcctttccccgtataggagtaccgcctctatgcccaacggttatcacaataaatcccaattgtgccaaacgagtattataatcgtcattaattgtgaaacgcgtaggcacatactcataaaacggtccgggatagacatttgaaataatcggatacaccttggtcgaatcgaaatccgcaggtttccacataaccccataaaggtctgtaaccccatcggcggctttcactttaaaccgttccggtgctttccatcccaaatcatacacaggtcgcaaatccggtttctccaatgtcataatcaccttcccctttcggttacgaaccacattcaccggctctcgtgacacggtagagtatgagtccaccatatagcgtcccgaaggagagatatgcacatcatgcgatgcgttttccgcagtcagttttcggagaacattcggacgatcaagttgcgcttcataaagaatatagtaataaggatcaatccctttctcacgaccaaacccataaaagtacattttccgccctaccgtatcaatcttcgcgaccggaccggctacccaagtaccgtcagtcaattgattcttcaagcttcccgttgctgtatcatacaggtaataatgtccccatccggtgcgttcggaacggaacaggatttcttttccatcatttagaaaagaaacgttgcgcatctgataatcaagatatggtttatcttcctcatgtatcaccacacgtacttttccagtttcaacgtctacctcgcaaatatccgattgattccacggacgattataacgctggaagtacaaacgttttccatcttttgacatatatagcacatcaatatactgatccggccaacggttaatatcaatcttcttcacttcacgggtatcaacatctccaatcaataattcatattgggtgacatgcttatcacctgccagttcagctttatatgttttcaattcaggagaaggagtagacaaagaattaatcagccataaatcgcgtactttcctgttatcctcacgcaccgcataaaaacgatgagtgcccggaatccaatgagcagattcagctccacatcttcctcctgactcaccttcgtcttcacgattaaaagtataattcgtaacaccatcagtagttaactgtaccgggatcgtatcctgtccttttttgccattaccaacaaaatacaaattatgccgttccgcatacaaaaagaaaaggctgtccggagaatatttcatccaatatgggtcgcttttcgcacaggatgatttctctcctaactttttcacctttttcgtacgcatattatacgtataaaactcacggtcaaaatcaaaacgcatcgtttcattgtcactttcaaacgtgaatgacaaatacacattcgcaggagaataagatttccctgtatagacagcaatcttactcaacaactcaggggtatcaaacaataaacgtttctccttcttttgcggattgacataataatatttttttccgtcacttgtagtaaaagaatagtaaaaacaatccgtatcgttgataaaggtcggatgaatacttgtcgaatacttactaatagggttctgagttaatagacgaaacttctcccccagctgataattcgctttctgctgtgcacctacaatgccgcatattgacataaacattatcaagcacaaacacctaaaacgagcgtctttcataaacgttatatcttaatcttatttattacggttgatatctccccaataatctgaccgtgtatcacctagcaaatgcttggcgaagaagcggaacatctttttctcaaaatattcatcagcagaaccatatccatgtccagctccgggaatcacaagcatatcaaagtcttttccggcttcaatcagagcttgcgccaaacggtaagtatgagcaggattcacattcttatccatgtctccggtcacaagcatcaaatttcctttcaaattctttgcaagttctgcgttagacttcacgctgaatttatactcatactctttcttttcattcccaagactatctttcaccaccttttctacttctctcacaccgttgtaacattctccccaaccacgattgtagatactgttatcatggtttccggagcaagagactgccgccttgtaaaagtcgggatatgtaaggagagacgccgccgccataaatcctcctccggaatgtccgcaaatacccactttatcgatgtcgatatacgaatgacgcttggctagctgctctatcacatatttatcatcggccaacggataatcgcgcatatttccatatccaaaacggtggtatgcttttccacgcatcggtgaatcaccacgatgtcccacagctatgacaataaatcctaattgcgccatacggtcgcagtatctttcggacaaagaaaatgaagtaggaacaaaaccgaaataaggtcccggatatacaaccgagataataggatatttcttattcggatcaaaattggccggtttccacatcactccatacagattcgtcctattgtcggccgcttttgccacaaaccgctccggctttttccatccggcatcatatacagcttttaaatccggagtagccaaatcacaaataaccttaccattgttatccttcaacaaaaatttaggttccatatccactcttgagaatgaatctatataatagcgttttgatttcaagaaaatcactcgatgttg

SEQ ID NO: 8146 - DNA, 13180 bp, Unknown
  gut microbiota DNA sequence
cccatattctctaaatttattggcagcgaaataagtgataaatccttagagcgcctacgaaaaaagagaaactttgcaatttctgttgataagtcgcctgttttgttaataactgtcggacgaaacggttaccaaacttcgacaggttcatcatctacctttctctttatgagcttgcaaatatacatatttatattggatatttatttctttttttgctcgcttgcagaagattaagatttgtaaacgggtaggagtgggggtgaaagagacttttcgatctgatgcggggaggtgtttggtggtacggcttctttttgttacttttgtgcgaatataaaaaaggaaaggattgaatatatggaaaaagagaagccgttgatacttgtttcgaatgacgatggcgtgatggctaaaggtattaatgaactggtgaagtttcttcgccctttgggtgagattatagtgatggcacctgatgctccgcgttccggtagtgggtgtgcactgacggtgacgcagccggttcattaccagttagtaaagaaggaagtgggcttgactgtttataaatgttcgggaacaccgaccgattgcatcaaattggcacgaaacacagtgctcgaccggactccggatctgatagtcggcggtatcaatcatggagataactctgccactaacgtgcattattccggtacgatgggagtggtgtttgagggctgtttgaatggaattccttctattggcttctccttgtgcaatcatgcacccgatgctgattttgaagctgccggaccttatatccgcagcatcgctgccatgatcttggaaaaaggacttcctcctttaacttgtctgaatgtgaacttccccgatacagccgatataaaaggagtgaaaatctgtgagcaggcgaaaggacgttggacgaatgaatgggctgcctgccctcgtctgaatgatcctaactatttctggctgaccggtgaatttaccgatcatgaacctgaaaacgagaagaacgatcattgggctttggcaaatggttatgttgctatcaccccgactacggttgacgtgacggcttatcactttatggacgaacttaataaatggtttaattagttgaaatttgaaagttgaaaaagaaagcatgacgccctgttagtcatctatccctaccaactctcaactctcaactctcaactctcaactctatgaagtattatctgattgtcggtgaagcttccggcgacttgcacgcctctcatctgatggctgccttaaaggcagaagacccgcaggctgatttccgttttttcggaggtgacttgatggcggctgtcggaggaacgatggtaaagcactataaggagttggcatacatgggatttatccctgtattactccatctgcgcactatctttgcaaatatgaagcgttgcaaagaagacatcgtttcctgggaaccggacgttgttattctggtagattatccgggattcaatcttgatattgccaagtttgtccatgcaaagacacagataccggtttactattatatttctccgaagatatgggcgtggaaagaataccgtatcaagaatataaaacgagatgtagatgagcttttctccattcttccttttgaagtggaattcttcgaaggaaagcatcaataccccattcactatgtaggaaaccctaccgtggatgaggtggcagcctatcaggcagctcatccgaaaaataaggagcactttattgcggagaaccaattggaggataagccgattatcgctcttcttgccggtagccggaaacaggaaatcaaagataatctgccggatatgttgaaggctgcttccgcttttcccgactatcagcttgtcttggccggtgcacctgccattgctcccgagtattataaacaatatgtaggagaggcgaaagtgaaaatcattttcgatcagacttatagcctgttgcagcatgcagatgtagctttagttacttcgggtacagctacgcttgagacggcattgtttcgtgttcctcaagtggtttgttattacactccgatcgggaaagtggtttcttttttgcggcgtcatatcttaactgtgagatttatttcgttggttaatttgattgctgaccgtgaagtggtaaaggaactggtggcagatacgatgaccgtgaagaatatgcagagcgaattgagaaatatcattgaaaatgaagcgtataaaaatgagatgctttcggggtatgaatatgtagccgaacggttaggacctgccggtgctcctcgtcatgcagctcgtgaaatgctgcgtttgttgaaaaaataactttctttttctgaataaacgtaaagccgatgcagtaaatgcacggcttttttatttataaagcagaagactaaaataaagaaaggaaaaagatatgaaaaaatttaagtggcttttaggaatcttattattggcattagtaccaatgttgcaatcatgtgatgatgatggttattctattggagatttcagctgggactgggcgactgttcgtgcaaccggtggaggaggatattatttggaaggtgataattggggggtgattgatccggttgctacttctattccttggtttaaaccagtggacggtgaacgtgttgtggcttttttcaatcctttgtatgacatggaaggaggaaaaggagttcaggtgaagatggaaggcatacaggaactgttgacaaaagaagtggaagatatgtcgacagaggaagaagcggaagaattcggaaatgatcctattctgatttatcagggtgatatgtggttgggaggaaagttcctgaacgtaattttccgtcaggagttgcctcgttcggagaaacatcgtatcagccttgtgcaaaataagatggaaccgggagagccgggcgaaccgtcagaaccgggaacattgaatgtggatgaagatggttacatacatttggaactgcgttataatacgtatgaggatgtgactgactattggggatggggacgagtttcttataatctggaaaagttcttccctacgccgaaagattcctgggtagcacctaaagggtttaaggtgacaataaactcaagagaacatggagaaggaagagtgattgtgcttgatctggatcatccggtcggtgtaccggaagcagcaaaggatgttcattccacttcttcgatccgataacctaactatgatttactgtgtgtgaaaaaggtcgggatacttctgtagaagttcccgaccttttgtattttgtttcagctctaatcgattgagaaagaatcccccgttagaaccatgttaatgcatatagataaacgactgctgccggtatagccatcagggaactgtcaaagcggtcgagcatcccaccgtgtcccggaagaatggttcccgaatccttaacgtgcaactggcgtttcaataacgactccgtcaggtcgccccatgtaccgaatataacaaccaccagtgccagtcctgcccattcaatcattgacataaatgggaagtagtgagcgagtataaaagatactccgattgctaccactccgccgccgatagaaccttcccatgatttcttgggagagatacgttcaaacaaccggtgtttgccgatcaatgaaccgatgcaataggctcctgtgtcattcagccagaggaaaataaagatagatagcggtaggataggattgtaacttacgctactgtattctgatcccggatcgttatggaatgccaatacatttagcaaagcaaaaggcagtccgatataaagttggctaagcatagaataagcccagttaagtaccgggttttcctttttcagatacaactcgctaatcatcatgtaaagcaataaaagcacatacgggatgaatatcttcgaatcggccgcatcaatgcagaatcccatgactgcaaggaataggtaagccccgccgagcatattaatggtcttgtttatcttcactccttctgcgcgcatatttaccagctgtccgaactcataaatggtcagtgcgctgatagcggtgaacagaataccaaagctgaatgcgtcataaaggatgcaccctaccaagatggcaacgaagagtacacccgtaatagctcgttttatgaaattgttaatcaaaatctattcgttttaattagttggacccgttagcttgtttttccccattggatttaccctctacggtaactttgccctccacagtaacctttttaccttctgcggcaactttggtgtctatgggtgcttgtttttcctttgcggtattttcagcttcctcttctttgatttctttttcttcttctttcagcttttgggcaagttctctttcagctcttgcggcatcctggctttctttagcagccatgatttcttccgagcgggaagcccaagggcgtttaccgaagatacgttcaacgtcttccgcgaagattacttctttgtcaatcagtaattgcgtcagttcgttgtgtccttctttattctctgacagaattctcttggcacggtcatactgctcgtttaccattctcttgacttcttcgtcaatcaattcggctgtcttttcgctgtatggacggttgaaagaatattcatcattgttgtaataacataagtttggcagcttgtcgctcatacctaaataagcaatcatgccgtatgcctgcttagtcaccctttccaggtcgttcatggcaccagttgagatgcggccgaggaataaatcttcagcggcgcgtcctcccaaagtagcacacatttcgtccagcatctgctccttggtagtgatctgacgttcttccggcagataccaggcagctcccaatgcacgtccgcgaggaacaatcgtaaccttaatcaatgggttggcatattccaacaaccaggagatagaggcgtgtcctgcttcatgcaaagcgatggagcgtctttctgcttccgttgtaatcttggttttcttttccagaccaccgatgatgcggtctactgcatccaggaagtcctgcttgcttacgaatttcttcccgtggcgggcagcgatcagtgcagcctcattgcagacattggcaatatctgcacccgagaatcccggtgtctgacgtgccagcaagtccacatctacactatcgtctattttaatcgggcgcaaatgcacgccaaatacttctttacgttcgttcaagtcgggcagatccacgtgtatctgacggtcaaaacgtcctgcacggagcagtgccttgtcgagtacgtctacacggttggtagcagcaaggataatcacaccgctattggaaccgaaaccgtccatttctgtcagcaactggttcaatgtgttttcgcgttcgtcatttcctcccattgcagggttcttgccacgggcacgtcctacggcatcaatctcatcaataaagacgatacagggagctttttctttagcctgtttaaacaagtcgcgaacacgggatgcacctacacccacaaacatttccacgaagtcggaacctgccaatgagaagaaaggcacattcgcttcgccggccacagctttggcaagcaatgttttaccggttcccggagggcctaccagcaatgctcccttgggtatcttacctcccaaatccgtatatttctgcggttcttttaagaactctacgatttcctccacttcttgttttgcttcggccagccccgctacatctttaaatgtaatcttgatggctccgcctttttcaaaaagctgggcttttgattttcctacattaaatacgccgccggggccaccactgccgcctccgctcatacggcgcatgaagaatatccataacgcaaccagcaagacaagcgggagtacctgaatcagaattgcggggaaaatatccgatttgggcggatagtcggatgaaccgtcaaaatgaccggcttccttttctgcctgcaaaaactcttccagtttatcggtagacggggttctacttgtaatgacagggttgcgtcccaccttggtagagtcggctccaaaaacagcccctacggcagtcggtttgaggaaagcttcgattgatttatcttcataacccaatactttgctgacataaccctttttaacatagtcctgaaactcgctgtaagttacagctttgcttcctgctccttttgaatcactgccccaccagaggccgagaagcataagggcaataatcatatacatccagttcaggttgaacttgggcatattaaccttattgttaggtttattgctattgttattattgctattattattgtccataatcattaattagtctagatcggggatttgagtaagtttagcatctgcccagaggtgctcaagattataaaaagctcttgtctccggcaaaaaaacgtgtaccaatacatcggcatagtccatagctacccattctgcatttcggagtccgtcgattgcataaggcttgctgtccgcacctttgcgtgtaaattccttgattgaatctactattgcactcacttgactgggagaatttccctgacagataacgaaatatttacagatggtatcttctatgctggttaaatcggcaacgactatctttttaccttttttctcttgaattccttcttttattttttcaattaatactttagtatcgttcattcctgtaattgggattaataattcatgttctctatttgtttataacaaaaaaaggtgaccctttgtttctgataataaacgtgatatttttgacaaatatacgctgatttattggatacaagaaagttatccctcaatttttgtgttttttagtggagatacttttgtttggaaagcttatttggacatttttgcaaaaaaaatatcggatttgttttgaattcccaaaatatttgtatctttgcacccgcaaacgaaaatcattgggctatggtgtaatggtaacactacagattctggtcctgtcattcctggttcgaatccaggtagcccaacaaaacaccagctttttactgacaaaaacccgctaaaaatgcaattttagcgggtttttttgtgctttgacaaataccatccgaaaaaagttgacgctaattcggtggctaattcggtgacacgaatgctcttttttgatatttttttgagtggttctcaaaaaaaataacgatgagccaaaaaaagcaaactttcaatgttcttttctggataaggaaaggaagaacgaatgaaaaactgtcacctctttcatgtcgggttacgatttcgggacaaagatacgaaattcccacgaaactatacctacggtctgaatcatggtcggcagttgcgcaaaagtcacttggtaagaccgccaatgacaaagaagccaaccggtatatcgaagatttgaaaatcacgatcgaagataccgttaccaaaatcagacagaaaaactaccctctcaacattgagaacttcaaactcatgtttcagacacaggataatgagttctctaccatcagcacactgtttgattaccatgaaatcatggagaagaaaaatctccgtgccagtacatttgtcggctatcacgtaacgaagaaacacctgctcaactttatacgtatcaaataccatgtctctgactatgatttgaccgccattgacaaagctttcgtttatgagttttacgcctatctgcaaggctataagagggaaggggagaccgtatgcgctgtcaatggtgcattgaagcatatccagcgtttcaaaaaggtgatgaatgtcgccctgcaaaacgaatggataagccggaaccctgtctgcctgctcaacgccaagaaaacgaaagtagaaagaggattcctgtccgaaaaggaactgaagagcatcgaggaagtccctttgcccgtcaacctctccatcgtgagggacgtgtttgtatttgctgtctacaccggactgtcatttgtcgacatcagtaacctgacgaatgaaaatataaatgtcggtatcgacaaaagcttgtggctgaactactatcgtcagaaaacggacatacacgccatgctgcctttattgcaacctgctgtctgtatattaaagaggtatgaagcataccacaaaggaaaacggactaatcatgtattcccggtaccgcccaaccaggtggcaaaccgatacctgaaaaaagtggtcaaggaagcgggagtagagaaaaatattaccttccacatggcccgacacacttttgccaccactatcaccctgtctcacggcataccgattgaaactgtgtcaaaaatgttgggacataccagcatcaagacgacgcaaatctacgctaagattctggacacgaaagtcatggacgacatggcggctctcaaagaattgtacaccagaaaggaatctcaaaaatcaccagataataaagccgtaaacggatgaaaacaaccgcaaccatcagccaggaagaactggagcagaaagctgtcgatagcatgatagcatacgagaagagccttatttccggacagaaaatgaaggatgcagtcacccgcgcgctgcatcactacgccaacagggaaggacaccgggaaatcgtcctgaaagggtggattataaaaaccatctacgccctcgacagcagccaactgaaagacctcgaccgggtagctttcacctgcatggataaacagccggttaacccctgataattaactcacataaaaaacaaaatcatgaaaacagaaaccaacagcatgagaatcgtgaaacctgaaaaggaatctgaaaaagcagtcgtggaaccccaaaaggagaaagccaccggaaaaccgaagtacaaacccgtggaacccgtcacactcgaaactgttccggaagatgccgtgttcatccgctccacggatgtatgcaaattgctcaacatcagcaactcaacgttaaggaacatgcgtgcggagcacgcaatcccattctacaaactgggtgggatatttctctacagcaaagaagaaatcatgaattacctcgcatccaattacagtagaagaatctagcgaaaatggcaaaaacaggattatcatattatcaggcggaaaccgaccgctttcaggacatcaaggtaaaacgcctgaagaagcggtacggctgcgaagggtatgcagtgtaccagtatatccaaaacgagatataccgggttgaaggctgttatatccgtttcacggacgaccagctttttgatgtttccgaatactggggcattgaagagcaacgggtagaaaaaatcattgaatattgcacggaagtggaattgttcgacaccatcacctggcatacgaatcatgtacttacttccgtagatattcagcagagatatctcgaaatctgccggagagccaagaagaagattgtaataccggaagatatacggcttgtcgagatacaagacgtggcttccggtgtgacaggtgcgtcgctacctcttttctccggtcaggaaattgagacgaaaaccggaaaaacagtttatggttctcccaaactggataccggaaaacagaccgcaaccgatatcggaaaagaaaccgtaatcactgccggaatatcttccggcgtcattattccgcagagttctgcggaaattccggaaactccgcggaattctgcggaaaaacggcacaaagaaaaagaaagtaaagaaaattccccctctatcccccggactattccgccggcaagggatgatgaggacaaagtttcactctctccggacgggaataggggaaatgtttccgcagaatcctgcgggaaacgtccggaacatggcgaagaataccgtttgaagttgcagcggctgggtgaaacctgctacaatctggggtgttcgaaaggagatgtccgtaaggttctgatgatagaaaatattgccatggacgacagcccgatatggcaactgattgaagagttgaaggcgagcggcggacgttattcgttcaccggagaggtgttgcccgccctgtggggactggtgaagacggggcgcctgcggatgatggaagagcatacggatgaggtgaaagagggcgttcataacgtcaggcagatgctgtcgggtatcggcgtgccgagctacgacatggacgaattatgcggagaggcgaaaggcaaagaagatgtcctgcaagaggttatacgggaaatacgacgatcgaaagggcggattctttcggtgagctgtttcatcaggtcacggttgaaaaaagcgaagaaaaacgaattgcaaaaaacggcgtaagccacacagttatgagtgaagataaaaacaagacgccgctctactacccccgcaaaatgcgtacagggtggtgcgtggcgcacgaagtgacagccgcgggcgtcactatcgagagatacggaatacactgccagacgtatgcggaagcataccgacgggcggaagtgatgaaccagcagcaacaggcgcaagcccttcaaccagccaactctgacagcaagagagggggtgaacgatcatgagtgaaaaagtaagcacgatcaccttgcgactgacagccgaagaagccgcccaactggagatactcaaagacatcattgggaagaagagcgggagcgaagcgattaaatacgtcgtcaaggaatacccccgtttctgtacccactacaagcaggaagcgaaggaacacggagaactgaaacgaaagtaccgggagcagggcgaagccgtgcggggttttctgtcggcactcgacaggttggagaaagcgggcagggagaaagagtaggggaaacgattgctagcaaaatacgctccggaagatcttggccaatgaaatatttgctagcagatgtttccggatcgtgtgctcgagctgcgtaaaagtgctagcggattcttccggatcgtgtgctgcagatcgggaataatgctagcaactgtttcatcctggaagaatccggctgccggattctgctagcggattcttgttcccggttcgttccggagcaactaatttgctagcaattaacggggatatcaggttgatggagccgggatcccgacaggtatgtgatagcaagtgaaggtaataggcaagtgccgaaccaagcggattactttcgcgagtggcttatcgtctgactgctcaccgtgccgccgtgtggttcgtggcaatgcgtgcagcgggaataccgccgcccacacagccccgtcccccgcagcagcactccgtcagtgtttaatcggaacattccttcaccggcagcgtttctcggacgttcagtgtttctgtgcaccgtgccgctttccttgctttcccgtagccgtcggactggcgcaaagaaagccgccctctgacagtgtttttatggaacattcttgggggaagtctccccaaaagttgctccggtgtataacagtcgaggcttgccaagtgggtgattacagaagttacttcctcctgacgcatacggcttcggctcccgctcacaccccggcaaagccggactacaagcgacaacctatgcggcggaaacccttgcggaacggtagcccatgcggtacgggtgaccgttgagaagcccgggcggtttcgctccgcccggcactaacgccgggactaaggcgagaatccgctacctctcttcgtctgactataggaacgggctgttagtcaggagtgcagccctgcggtgcggggttcccgtgtttacggttgagcgggtttgcattgtggaagtaagcgcccttcgccgtccttcgggcgcgtgctgacgtgatgctgcgtgcgccgtgacagcaattgttttctttccgccttcctttttgggggacacccaaaaagagaccggcagaaaaacaaaggggtagcgatattcaacataacgggtcattatgctcgcacgccttgccattcaggcaaggcgggtgcataatgcgtggttatgtttaatatggattgttttatttttccgcccccaggcgaaaaaagccatgcggagtggaaacgccaccactatggcggcaagccgccaccccgaccaccgccccttagttacttctgccagtcccgagccgtgcggttttctgacctgttgcgggtgcttcctgcgggttgcgcctggcggcgtgcccggctgactgtttacgcctttcggaacattggaaattcccggcggtcggcttcgccgtccgctccatgaagcggggcgagacgccccgccgaaaagtgcaaataacaaatccgtgacaatcgggcaaatgtcacaaaataaaatagtaaaaaacgtaagttctcaaaacttatattaaacagaatagaaatgaaagaatcacatacaggtattggtatctgccgttgctaccaatgccgaatgaaaaaaaagaactgcagcacatcgggacgtaaatcgctcaaacgggcaatcaacaagtttcgccgcaagcaattgaagttagacaaagtaaccaggcacaatcacttcggcggatattgggcctaagactaatacatgcttttatccgccccacactgcacaggaacacatttttttccttttttcatctacctctccaagggcatggatgaacggcagacaagaaatttcagataaaaataccgcacgacgtaggagcgcaggatatttttatctgaaatagcgtagcggttcttgactgacgggcggccgtgacctatctttgtagaagaaaagaggaaaaatacgctgtaaaacagcaaacttatcatttatcctttcccgtcactttatagataattgcgtttctgtctgtgtcattctatttatttacggatagaaccatacgggaataaaacgtaaaaaccccgaaaacagtcggaacggaagtaaaaacgtacttgaaacccttcgtgatgttttcaaaaattcatcagacgttttttttatttcgtcagacgtttttcgaaaaactcctgatgttttctatgagactttcagaagcatattccgttcaccaaatacccgcaaatgaaaagcccggtgaaatgatttctcattcatcgggctttttctttgactggtttgcgatatgcgaaacgatgataattaagctgccgggt

SEQ ID NO: 8147 - DNA, 859 bp, Unknown
  gut microbiota DNA sequence
tgctcctgcttttgagaaagaatacattgcaacggcttctttgatttccgtagaaggaacgtagatgacacgtgctttcttgacgctgtttgcgccgcacttgctggcatcctcgagacctttaccggaaacggaaggacggaaagacccaaggtctcccaggcggacgggtgaaccgttggctaagttgcgcttgatgacggtcatcaatgcgtcaagaacagctttgatgtcagaacctgtcagcgtacaacggtctgcgatttgttcaacgatttgtttcagtgccatctccggggcgagtactacttgtgcatagtattttgcggcggcgtctttgttctgcggattcttgcgcaaagcgggtttgattgtaattgccatgttaattagtgttttaatgattaataatgttgcaaatctacatatacgtgcgtgggcgtgcagacgtatgttcttatctgtgatgatacgtgtttcatcatacgattatgtacatgaaaaaagggctgcggtttgtattccgcagccctcaaaacaggggttttcactccgatcgtaaagtttactccttaatagtttctcctttcatcatctttcacgggactgtctgccccggtgagccaaacaaaaattttaccgataactttcaataccttcaacgtcgttctccaaaatggtttcataatgacctcctttttaattgtttcccgcaaaggtagaggaaatgaagaatgaagaatgatgaatgaagaattggctgcgctttcatacatttacatctgcatagtaattcttcattcatcattcttcattcatcatccttcattcatcattcttcattcatcattcttcattc

SEQ ID NO: 8148 - DNA, 4039 bp, Unknown
  gut microbiota DNA sequence
gaagcagggacattgtttgatgtactcgcaggattctatggtaccgttgtggttgaggtcgggcgagaggtcgcggtgaccgcaaatctttgctcccggataggtgagcagcaggaagcggagaagggtttcaaggctttgtttttgtgcgtcggtgcgggtgtcggcggcacgtccggaagcgtccaggcctccttcgtaggcaactcctatcgacggggtgttgtagcctttggcgtgggcgccgacatgggtgatgtcgcgcatgtgatgtatcgttccatctttggtgatgtaatagtgatagccacattcggcaaagccttggcgtttgtgcatggagtcgaggtcttccggggtgaggttgcttgtacaacgggatgcggtgcagtgcaccacaatcagggtgatgtttctttgtttaatcattgttttttgtgggtgatttttagttgtgtattcttgttctaccccccttccgtccccctttgggggagacgcttgtcgggggaagtgctcttcccccttgccgcagggcgttcccctagcgaagagggttcgggctgtagccgtaagagctgctgcactagggcttaaaagggtgagccgaaagagatggttatcagttccttttgtttgggggtgaggatacggttacttaactggtagtttgtttcctgcaatgcttcgagtagttcggaatcgtcctttatccactgtttgaggcggatagaagcggatgcaggtgcaatattcgggaaatagagaacggccagttctttgaaaccgtagctacggttggttaaactttggcagttgttttgttggtgcacgttggtatacataattatagtgttggtttacagatgtaaagatagactttttagtggctggttgttacctgtatacttggtagatatagttatatatgtttgttggcagaggaaatttgtgatattcgggcaattgtcacgaatttcttttgtccgtaacttttcggcggggcgtctgccccgcttcgtgaagcggacggcgaagccgaccgccgggaatctccgatattctgcaaagactgtccgcagggtgcaaacagtcagccgggcacgccgcaaggcgaagtccgcaggaacaggaaacccgcaagatgtcggaaaccctgcagggaaccgggaaaggcaggggtaactaaggggtggtggtcggggtggcgacttgccgccacagtggtggcgtttacattccgcagggcgcagtccgcaagggtgaacattaaacggagtaactttatgcccgttcctgaaacaacggaaaagcccgcaaacagcaggaatatttggaagatgctgttatgttgaattaaagcacaaaatccggaacggttttgtgactaattaaacataattgctcttccggatttcctgcgcaaaagctgcactccatcagaaaaaccggaagaacacggcgcaagcagcatcacgtctgcacggcggcggaagcttgcgccgccttctatccaaacagactgaaccgctcaatcgtaaacacgggaaccccacaccgcatggctgcactcctgattaacagcccgttcctatagtcagacgaaaagaggtagcggattctcgctttagtcccggcgttagtgccgggcggagcgaaaccgcaccgggcatcgcagctgtcacccgtgccacaagggcttacattccgctaaggatatcatccgaaagggtgcccatcgcatagggtgctgcttcctttgctgtattcggcaagtgagggagcggcaaccggagccggatataagacgggagtaacttctgctatcgtccgcaagggtgtccaccgcataggctgtcacttgtagtccggctttgccggggtgtaagcgggagccggagccgaatgcatcaggcggtagcaacttccgtaatcacccacttggcaagcctcgactgttatacaccggagtaacttttggggagacttccccccaagaatgttccatagaaacactgtcagagggcggctttctttgcgccagtccgacggctacgggaaagcaaggaaagcggcacggtgcacagaaacactgaacgtccgagaaacgctgccggtgaaggaatgttccgattaaacactgacggagtgctgctgtggggagcggggctgtgtgggcggcggtattcccgctgcacgcattgccacgaaccacacggcggcacggtgagcaatcagacgaaaagtttcaagcatgacttttttccagtttgctagcacatacctggcaggatcccggcttcatcaacctgttatcccctgccaactgctagcagaatccggcagccggcttcttccaagacgaaacatttgctagcactattcccgagctgcagcagctgatccggaaaaatctgatagcaaatctttcctactgcagccgatgtgagttatacagccatcggttcctctttgataatcgagatttccagtgcgttttcaatcttggtcaaagtttcgagtgaaaggttctcccgtcctctcaacacctttgagatgtattgcgggctgcaattcattttttcagccaattgcttttggctcattcctaattcttccatcctgtccagcatcagcatggcaatattttgcgaatgtcggagccaagacttgtttgtttcaaggaagtcaaacagctcacgccatttcgaaggcgttggagaagcatgttcttcaagcctttgtgcgatagatttcatacgattttccatatcattcctcccaaattataattcactaatatactctataaacccttcgtcgtcaatgattccttcttcaagcaagtagcgtcgaaccctgtctattttcacaagttcctgcctggtgtgctctctttcctgcatcgtagccgtcagcttgatggcgcctccggtgatgatgtagttgccttgaatcaatttgatagcgtatagccggagccatgacgagtgaccgtatttacgttttaaccgggccttttctttttgcagcatcatatccgaagcctggttgttgtccagcgggcggaatatcttgcttaaatcggtttccggggagatgtccattatgatgtatcgaaggcgttcactatcttcaatagtatcgctgatagcttcttttatatccgttattttaaaataggcgttcaagtcgtcaatgttctccttgaagaaagtgcgtagccaaaccacgtcggtccagttgttgaacaccttataaaattcgttatcatcctcaccttcaaagtgtacagcccataattttctgtctccagtaatgtcgtcaaatgtcatatctccttgttttatagtaagacaaagatacgcaaaagtaacgagataataaacttataggttgattatttagcaagaaaaatgttttatttagttggtttagtggttgtatggtagatggtggtgtctgtgtcccagtcattaatttcatcattcgtgtttatttgcagactgtcaatgagagttttttgatgagttatttccggttgttcgcagcctcctatcagttgtataatgaatattattcctgctataacgattcctgctatagtgttattgataacatttctttttaagcctttaatataagaattctgataccttttattttgcataatttatattttttacgctgtgaagttaataaattaaatgcgatatttatcattatttgtcacttttattaggtttatccgattaaaaacgatacctttgtattacaaaacttgaatccttaatgggatattaaaagagggtttttgccaaagtcggtgtctaattcggtgacatcacgaaaataggaagctgttaattcattatgaatgagactataaaggaattaaagtttgagggcaggtagcccaacaaattataagacaaaataagctaaaagccgttattacctagtaataacggcttttttgcatgtttaacagtatgtgtctctaaacttcggctcagtctgaaaccttgggggattaagt

SEQ ID NO: 8149 - DNA, 18831 bp, Unknown
  gut microbiota DNA sequence
tgtatctgcgaaattcctggtatcataatttaatgaaggaatatatccagcaaggggaaatcggagagctggctattattcgtatttgtcacatgactcccggcttggcaccaggtgaaggtcatgagtatgagggacctgctttccatgattgtggaatgcactacgtagatattacccgttggtatgcaggatgtgattatagaacatggaatgcccagggagtgaatatgtggaactacaaagatccttggtgggtgcaatgtcacggaacttttcaaaatggggtcgtttttgatattacccaaggatttgtttatgggcaattatctaaagaccagacacataattcgtatgtagatattataggtacaaaaggggttgtgcgtatgacgcatgacttcaatactgctgttgtcgacctacacggtgtcaatcagaccatccgtgtagagaaacctttcggcggcaagaatatagacgtgttgtgtgacctgtttgctgattcggtagaaaccggaaaacgcagttcacgattaccgctaatgcgcgattcggctattgcatccgaatatgcatggacattcttgaaagatacccgcaaacacgatttgcccgctattggtaatttgcgcactttggagcaaatacgcgaacgaagaaaaaatatgaaaaatggatatggattgttgcacggcaaccttccaaagattattaacccttaaacaaataaaatcatgtcaaacatttcgaggagaaaatttctcaaaacgggagccgctgctttagcaggtataaccattgctcccagtacaattttaggtatgagtcacgggcatatttcgcctactgataaactgaatcttgcagctgtgggtattggtggcatgggacatgccaacattaatcacgtaaagggcactgaaaatattgtggctctttgtgatgtggattggaagtacgcaaaaggcgtgttcgacgaattccccaaggctaaaaaatactgggactatcgtaagatgtatgatgaaatgggtaaatctatcgacggtgtgattatcgcaactgccgaccatactcatgctattatcactgctgatgcaatgacaatgggaaaacatgtatattgtcagaaaccattgacccactctgtttatgaatctcgtttgttgacaaaactggctgcatcaacgggcgtggttacccaaatgggtaatcagggggcatcggatgaaggtacggatttagtatgtgaatggatttggaatggtgaaatcggtgacgtaacgaaagttgaatgtgcaacagaccgtcctatttggcctcaaggattgaatgttcctgaaaaggttgataaaattcctagcacattgaattgggatttattcacaggtcctgctaaaatgaatccttataatgctatttaccatccttggaactggcgtggatggtgggattacggaacaggtgcattgggtgatatggcttgtcatattttgcatcagccgtttaaagcattgaaattgcagtatcctaccaaagtggaaggttcatcgacattattgttgaatgcttgtgctccacaggcacaacacgtgaaaatgattttccctgctcgtgaaaatatgccgaaagtagctatgcctgaagtggaaatacattggtatgatggcggtatgatgccagaacgtccgaaaggattcccagaaggaaaacaactgatgcagagcggtggtggtttgactattttccacggaacaaaagatacattgatttgcggatgttatggacagaatccttggttgctttcaggtcgtaaaccaaatgcaccgaaggtttgccgtcgtgttcctaaagcaatgaatggtggtcacgaaatggattgggtacgtgcatgtaaagaagataaatctaatcgtatcatgactaaatctgacttctcagaagccggacctatgaatgaaatggtagcaatgggtgtattggctattcgtttgcaagctctgaataagactctcgagtgggatggagctaacatgtgttttacaaatatcggtgataacgaaaccattcgtactgttatcaaagacggattcaagattcataatggtcatcctacatttgataagacatggacagatccgatcaatgcaaaacagtttgcggctgaattagtgaaacataattatcgtgaaggctggagactgcctgatatgccaagataaaagtagattaaaaattaaagattaaaaattaaatagttgatatcatgaaaaaagtattttatccattagcttgttgttgtcttgctgcaggcgttttcgcttcttgcggtggtcagaagaaagcaaatgctccggaagagcaaaaagttgcgttgacttactctaaatcattgaaagcggcagaaacagatagcttgaatttgcctgttgatgaaaatggttatatcacaatctttgatggcgaaacatttaacggatggcgtggttatggaaaagaccgtgttccttctaaatggacaattgaagacggttgtatcaaattcaacggttctggtggcggtgaagctcaagacggtgatggtggtgacctgatctttgctcacaagtttaaaaacttcgaactggagatggagtggaaggtttctaaaggtggtaactccggtattttctatttagctcaggaagttacatcgaaagataaagacggtaatgatgtgcttgagcctatttatatttccgcgcccgaatatcaggtgttggacaatgccaatcatccggatgcaaaattgggtaaggacaacaatcgtcagtcagcttctttgtatgacatgattccggcagttcctcaaaactctaagccgtttggcgaatggaacaaggctaagattatggtttataaaggtacagttgttcacggacaaaatgatgaaaacgtacttgaatatcatttgtggacaaaacaatggactgatatgttgcaagcaagtaagttcagtgaagaaaaatggcctttggcatttgaattgctgaataattgcggtggcgaaaatcacgaaggtttcattggtttgcaagatcacggtgatgatgtttggttccgcaacatccgcgtgaaagttttggactaatcgaatagtaataaagaaaggcacgggttacgtgtatttcacgttttttttgaatggcgattgccatggagtaaccgtgaagtctgtgtaatccgtgcctgttttttctatgtaaacctgaataattgtaacccactaatatctattatatgaaaactagaatttatatctgtgcattggctgctctttttattattccactggcagtaacggcacaaaccaagaaaaaagctaaaaaagaagtagcaattcagctctattctgtcagagatatattaaacaaggtagacaacaaaaatggtaagtgtgaccccacttatactgctcttctgaagaaattggcaaacatgggatataccggtgttgaagcagccaattataacaacggtaagttttatgaccgtactccccaacaatttaagaaagatgtcgaatcggcaggattaaaagtcttgtcttcacattgtacaagacaattgtctaaagaagaattggcttccggcgactattcaaagtcacttgaatggtgggatcaatgtattgccgatcacaaagctgccggtatgaaatatattgtagctccgtggatggatgtacctaagacactcaaggatttagaaacatattgtgcatattataatgaaataggcaagcgttgcaaacaacaaggtttgtcgttcggatatcacaatcacgctcatgaatttcagaaggtagaagataaagtgatgtatgattatatgttagaacatacgaatcctgaatatgttttcttccagatggacctttattgggtagttcgcggacaaaacagtcctgttgattattttaataaatatcccggtcgcttccagatattccatgtgaaagatcacagagagattggacaaagtggaatggtcggttttgatgctatctttaagaatgcaaaaactgcaggcgttaattatctcgttgctgaaatcgaaaagtatagtgttccggtagaggaaagtgtagaagaaagtctggattatttattgaacgctccctttgtgaaaagttcatacgctaaataacgtgtggcttgctaaaataaaggcataaaaaaaagtctgtgcatgctttcgcatggcagactttcaattctctctaagctgtttctgaattattcagctacagtttcagttgcagtgctatcagcattcaaagaatctgctgctgcggctgctgcttgttcagcttcaagagctgctgcttctactgctgcgattgagtcagcgatacggatagaatcctgagttgcttttgctgcgtcagctgctttgttaccacatgatgcgaatgatactgctacgatagctacggccatcaaaactaattttttcattttctttgctttttaaaaacgtaatacaatcaattgctttattaaaacgatgcaaaggtatgtactttttcaatatgttgttctcgaaacgccaactttttttatatttttttttgtaactggccacttttctcccctttttatatgttttagaacatgctaatcgacagcaatactgttatataagtatctttttatgcttcttttgggcgttttttcaaattcagtagggtagagttggatcttgctgattttctcataagcggctacgttgctgttcaggttcttaagattttcatccatgattgttttcaggttatccggattatttaatccgagagaatccaacgcttcgtaatcggcataaacaagtgccactaattttttattgcgttcgataacaagactttcgagaatgaaaggtaggttattcagtttggtttccaactcttcggggaagatattctgtccgctagaacttaagatcatagttttgagtcgtccccggatgaaaatatttccgttgctgtccatggaaccgaggtcacccgtacgtagccagccgtcctgcgtgaatacttcctgtgttgcttcctggttcttgtagtagcccaccatcacattttctccccgaacctggatttctccggtttctgcttccggggtttccttatagatacgtgcttccattatatctagaatctttccggaagaacctagtacaaattcatcccagggggcgtagctgataagcggaccgcattctgtcattccataaccgatggtaaaagggaatttgattttgtagaagaattcttctacttccttatccatagcggcgccaccgataatgatctctttaaaccgtcctcccagtgcatcaatcagtcttttacgtatctggttgtagatttgggtgtcgagcagagggatattgagtgcccacttcataccttttttattaatgagtggctggataatattcttatatatcttttcaatcactaacgggacagtaataataaggttgggtttcacttcttcaaaagccttcattataattttaggagaaggcgtttttccaagcaaagtgacatgggtcccgacagcggttgctgtcagaaagtcaaatgcacaaccgtatgcgtgggcaaggggaaggaaagacagcactttatccccttttttaaggagttcggtacgaataccgaaagtgacattgccggcaagattgtttcctgtcagcatcacacccttactgaaaccggtggttccggaagtgtaatttaacagcatcaccttgtcattggataaagtggtgtactgaacatcttcacgggtaaatcctttcggatacaaagcatgcatctctttatcggtatttttcagaaacttctgtatggtttccccgtcacgttgataaagacaccggaaatcagtcaatgagaatactccccgtagccccgttaatttttcctcttccagattctcccaaatgctgtcgctggtgaacaggaatacagattcggaatgattgacgatatgatgaacgtcattaggcgtaaaatcttgaaggatagggacaatgatcgctccgtatgtgatcgttgccatataggcgatgcaccaatgagcgttatttttgccgataactgaaatcttatctcctctgcgaaggctacaatgtttgaataacagatgtaaacgggcgattttttcagctacctcaccgtatgtgtattgggtatcttctccataatcagtataacaaggcagatcccaattctcacgaaaactattttcgtatagtttaatgaaattctctttaatcattgcacgttttttagtgaattgtgcaaaaataggaataaactttcgtatcctaaagtgttttactgataataatgtgtaactttgcaaagttaatgtgtttataacagcttatgatagataccactgtatttcaaaataagacagccgtttattatactttaggctgcaaattaaatttttcagagacttcaactatcggtaaaatcctgcgtgaggcaggagtccggactgcgcgcaaaggagagaaagcagatatctgtgtggtaaatacctgttcggtgacggagatggcggataaaaaatgccggcaagccattcatcgtctggtaaagcagcatcccggtgcttttgtggtagtgaccggatgttatgcgcaattgaagcccggcgacgtggcaaagattgatggagtagatgtagtgctgggagcggaacagaagggagagttacttcaatatctgggcgacctccaaaagcatgaaaaaggagaggctatcaccactacaaccaaagatatccgttcgttttctccctcgtgttcgcggggagaccgtacccgtttcttcttgaaggtgcaggatggatgcgattacttctgttcatattgcacgattccttttgcccgcgggcgaagtcgtaacgggactattgcttccatggttgagcaggcccggcaggcagctgctgaaggcggaaaagaaatcgttctgaccggagtgaatatcggagattttggtaaaacaacaggagagagtttctttgatctggtaaaagcattggatcaggtagagggaatcgaacgttatcgtatctcttccatagaacccaatctgttgactgatgagattatcgagtttgtgtctcactcccgcagttttatgcctcattttcatatccctttgcaatcaggttgcgatgaagttttgcagttaatgcgccgtcgttacgacactgctctttttgcttcgaaagtgaagaagataaaagaggtgatgccggatgcttttatcggagtggacgtgattgtgggaacccgtggagaaacacccgaatactttgaacaggcttatcagtttattgatggtctggatgtgacgcagttacatgtgtttagctattccgaacgtcccggaacgcaagccttaaaaatagaatatgtggtttctccggaagagaagcatcagcgtagtcagcgtctgttggcactatcggaccaaaagacacaggctttttatgcacgtcatatcgggcagacaatgccggtgttgatggaaaaatcgaaagctggtgctccgatgcatggatttacggagaattatattcgtgtagaggtggaaagtgatgactcgctggataatcaggtagttaatgtacgtctgggagagtttaatgaggagatgacagcacttaaaggtacaattttgatataagttatgagatcaaaacttatctattggttggtatacagtggaatgtggctgttttcagctcttccgttccgggttttatatatgctttcggatttaaattatctgctgatgtatcgtgttggaaaatatcgtcggaaagtagttcggggaaatctattgagatcatttccggaaaaaactgatgcggagagattacagatagaacgcaagttttatcgctatttgtcggattatatgcttgaagatttgaaattgttgcatatgtctgccgaagaactttgtgagagaatgacttataagaatacggaacaatatcttgaactgacagaaaagtatggaggtattatagtaatgattcctcattatgccaattatgagtggttgataggcatgggagcaatcatgaaaccgggggatgttcccgtacaggtttataaaccgttgagggataaatatttggatgagttgtttaaacgtattcgttctcgttttggggggtataatattccgaaacattctacagcccgtgaaattattaagctcaaacatgatggaaaaaagatggtagtcggtttgattactgatcaatggcccagtggatatgataaatattggactacctttttaggacaggaaactgcttttctgaatggtgcggagcgaattgccaaaatgatgaatttccctgttttctattgtgaacttagtaagaatcgcagaggatactgtgaagcggagttcaagttgatgacggaaacaccgaaagaaacaagagaaggagaaatcacggaaatgtttgctcatagattagaacagacgattcgtaaagaaccggcatattggttgtggtctcataaacgttggaaaatgactcgtgaagaagccgatcgattagaagagaaagagctgaacaagaaaaaagaataataatgaaagtttcagttgtaattttaaattggaacgggtgtgatatgcttcgtacttttcttccgtccgtcgtccggtattcggaaggggaggggatcgaggtctgcgtggctgacaatggttctacggacgcttccgttactttgcttcaacaggaatttccttctgtcagaacgattgtactcgatcagaattatggctttgcggatggatataatttagcattgcagcaggtcgacgcagaatatgtagttcttttgaattcggatgtcgaggtgacggaacattggttggaaccaatgattgcttatcttgataagcatccggaggtagctgcttgtcagccgaagatacgaagccagcggcaaaaagaatatttcgaatatgccggggcagccggtggctttattgataaatacggttatcctttttgtagggggcgtattatgggagttgtggagaaagacgaaggccagtatgatacggtaattcctgttttctgggccacgggggcagcgttgtttatccggcgcactgattatgtgaatgtcgggggattggatggacgtttctttgctcacatggaagaaatagatttgtgctggcgactccgttcgcggaatcgtgagattgtctgtgtacctcaaagcattgtctatcatgtggggggagctactcttaaaaaagagaatcctcataagacttttcttaatttccgtaataatcttgtcatgctctataagaatcttccacaggaggagttaaataaagtgatgcgtatccggacttgtctcgattatctggcggcgttcaatttcttgttgcaagggcactgggataatgctagtgctgtgatgcgtgcgcggaaagagtataaacgattatgtccgtcattttctttgtcccgtgaagaaaatatgagaaaaaaaactttgaatccgatacttgaacggacaaaaagtagtatattgtggcagttttatgcgaggggatgcaaacgattctctcaattgtcggatttaaaaggatagcaaatggaatcaaaggttagaagaggcatcgggctggtagcgcatgatgcaatgaaaaaagacctcatcgaatgggtactgtggaactcggaactgttgatgggtaataaattctactgtacaggtactacgggtactttgatattggaagcattgaaggagaaacatcctgatgaagagtgggattttacgattttaaaatcaggtccgttaggtggtgatcaacagatgggatcacgtattgtggatgggcagattgattatctctttttcttcacggaccccatgacattgcaaccgcatgatacggatgtaaaagcattaacccgtttggccggtgtagaaaatattgttttctgttgtaaccgttctacggcggatcatattatttccagtccgttatttatggatcctgattacgaacgcattcatccggactattccagctatactaaacgttttcaggataaacctgtggtgacggaagctgtcgaatcggtaaatcgaagaaaaaagaagagaaaataagttggttcggagtgtaaataatagaagcggattgcctattatttaataagataatgcagataatacagattaaaattgtattatctgcgttgtttataaggcaattatcccctgtttatacttaactggaaataatggatcaattgagaaaagttgttggtgagttccctttataaaatagtgacgctatccagtaaggatagtgacggtatatgacaacgatagcgtcactatcacaagcatataccgtcactatcttttctacttcaattaggaagtttgcgtttgcatattgtgtatgctaacaacaattcccaattgttccgaaataatggcaaggggagttcttgcaagtgattttaatctgtattctgctagtttacgtcatatcatttatagagcaatatatcattcatctctgctacattgcagttcaatgcctgctgattctatatctgctcccattggcggattccgtttggaaagccggagttctattttctcaatgcaagggaattggtcaaagagtttttgtataatccgtccgctgacatgctccagtaactttgacggaatagccatttcattttttatcacctgatgtacttcggcatagttgacggtgtcggtaacttcatctgtccgggcagctttgctgatatccactttcagtttcaggtcaatgagatattcatttccaatcagattttcttgcggtgcgactccatgataggcgtaacaacgaatttccttcaaaaggatatagctactgtttatcttcatatactgtctttttagtgtgatcttgtttgacttttaacaggtctttctgtgcaaccatttgtggaatcactttaagaaagacgggtgtgagcagaaggcagatgcttaatgttataagcagaagtgcgcttgcctgtgcccaactattgtgaatataacggctgactaatggacctaaaaaatgaagtatcggtccatgaatactcaaggtgatgattgaatatcgtcccaagtaagaaacaacctttatctttttcacttttttgcaaagtaacataatcataaatattcctgcaaacgcagcgatatatacttgaaaaatatttcccgtataattgttggtacgcatacccaatgtggtagcggtaaagtacattactaccagtgccaatacaacaaaaaccggtatcagtttgtcgaaacgatggctgggatatagaaagaaattataccgtcggatccagaaaccggccacatagaaggggagggcagtcatggaaacatctatatacaggggtaactctatctgtaattttccgagataaaatcctgcgcaaccaatcaggattgtcacagcgaacatgacaggcagatgcttttcgcgcagaaagtgaattagataaaataggatgttgcaattgaataatgcgagtagaaaccagatcggtggattgaacttgataaggtcgtgtccatgaaatacaaccaagagttcattccacgacacaggcagttgaaacactcctggagcaatcttccaaacaatgtatttcattagaaatgcacttagatagaagaaaagaaaaggaataatcaatttgtttatttttcgtaggatgaatccgagcaggccttcgtatgatttgaaaaacactcccgagataaagaagtaaagcggcatgcggaaacaggataacatcgaattcgtatccagttgttcgaaggcccctccaacgtgtgccattaccacaaggataatgcagactcctttggttaagtccacaaaatcaatacgtctgctctggttgccttccattatctcttttaatttctctttttcggcgcaaagatactttataaatcggaataaaaagaggaacattgaaaaaataaacgaatgatgcgaaaagcgaaaaagtatgatatatagtaatgatattattgcgaaaaaaatggttgactatgttttgaaactccttattttacttctgttatcaatatatccttgaaaaacgaatgacgcggatcacatagatttttagcgttcttaatctagtgttatccgcgtcggtagtgtccggaaaatatcctttctgaaagttacttgtaccttttattctatttattcggatctcttcctgtgtatttaatcaattcactaatcttatcattaagtgtttttgctttcatcaactgttccagagtgagatgcatccggtatctccagtagtttcgtggattggatggaacattaattcgctcttccgccacattcggatttctccatttcccgtctatcgataaccaatcctggaaagacaagatacagagaatggaattactgttgagatggttgcgtacgatttcctcgcacaactccggggtggcagttgtcggtgcaactccgtaatgtcctaacgttgcattatagtaacgttgggtctgttgataatcttcttcccaccagccacgcaacgtagacatatcgtgagtggagattgtgcagacagaccggtacggatactcatttaaatgcccgaattcatgcatcggattcttaggcattcgctgaatttccagactaagaatccggagatcattcatcaccgatgacacacaagcaggaatcatccccaaatcttctccacaaaccaacatgcgggttgattgtgtcagttgaggtaacttcttcatagcctgttgataccagaactcgttgtgccggtgataataatactggtcgtatagtctgttaaacgcatttttctcttcttcgttcagcgaccggaatacgaaatcccgttgcacaccgatgcgcgggtggtatttaccttcctctttcttatccgcaacaaataagacgttgctgattaatgaataaagcccttcccgaatccacacactatcttcatcatttctaccggcgaagaattgctctacctcccgttgtgtttcgaatcccggtttcatccgataaagtccggagttatcaaccgattcaaggaaatcttgtttgactaaatgggtatgcggtccgaacaactgtccgaggaaagattcatggatgaatggtagcagatattcatcccggaacgttagaccataactttcgatttcttcccggctcatcggtaaagaaggatcaaactgacctaacaatccgtgtacagcgtgcattggtatttcccaaatacggaagaacccgaggatatgatcgatccggtaagcatcgaagtattccgccattttctgaaaacgcttcatccaccagcggtatccgtctttttccatgacatcccagttgtatgtggggaatccccagttttgtccgttgatcgagaaatcatcgggcggagcacccgcttgtccgtcgagattgaagtaatggggttctgtccaggcttccacgctgttgcggctgataccaattggaatatccccctttaatacgacaccgtgttggcgggcatattcggttgcagacaacaactgcaggtgcagatgatactggatataataatacaacgaaatgtgaggataatctgccgttcccggttggcacattttttctatatcttccgcttggtaaacagagtgtctcggccattggcggaaattgggcgttttgtaggcatcgcgcagataactaaagactgcataaggttgcagccattccttgttcgtttcaaagaaatctttgaaacctttggaagccgataccttttctccttcctgtcggaacagtaagttgaaaaactcccatttagtttggttgaccgcttcgtagtcaatagcagggaggctgttcagttccttttgcttcttgctgaattttgatgccgcttctttatctttcagagttcccatttgcctgatatccgcatacatcggatggaaagcataaatagaaatgctgttataaggataagagtccgtccatgcatgagtcatggtggtgtcgttgaccggtaaaatctgaataactttctggcgagtatttactgcccagtctaccatacgtttcaaatcgccgaaatcacctactccgaaacttttctctgattttaaagaaaatacgggtatagcgattcctgcccctttccatgcgggaatgtcgaaataaacatatcggtcggaaatcacgagcgtttcgttggtcttcagttccgggtctgccagatagcggttagggtttttctcccagcagtctgctttcttttcctgtttgttgtagaggatgaatttatattccagcggatattttagtttgctggcgtccagttctatctgccattccgggaaattggtatcactcatcagcaccgctttctccgggtcccagtgacctaatgatttctggttgccacaaattgccaggcaataatctttgttgatacgtggggcgtaggccttgataaccagtcccttcttatatctttgcgggatattctctttttcaggatgtgccagtaaggcttctgtaaaagcagaactataaagatacagttgttccgggatatttttccagcaatcattgattctgtatatcttcctggagctgcctgataagaaaatagatctcgaaaaactgtcccattccttgcggataactattccgttttgctctatctgatagctataattgatagtcatcccttcttgagggacttcaagctcaagttctgccgtccaatagatcccatcggtggtgtgtaaaggaattgattccggaaataagccggaaatccttacttcttctccccaattggtgcggtattcaatattaaatgatagaatcatatatattagattttgattgtatatgtaagacactgcaagtataagacatttttttgaataaaaaataaaaggagccgcaccggactccttttaatcttttgtttatatattaattaacatacgtaggactattatccacatctggaagcgccgcaagtagtacaaatcagacagccttcctgataaaccaatgtctcgttgccacagttcgggcacttcttacctttggcttccgttccatcctgaatatacttcttcaatgcacgttctacaccgtttttccaagtgttgatactttcactgttcaattgcagagagccaaccagtttgataacctgttcaatcggcatccggtagcgaagcacgccggaaatcaattttgcatagttccagtattccttgttgaacttctctgacaatccttcaatggtcgtcttatatccgcgtttgttctcgaattggaagtcgtaacgtttggtaccgtcttcatccacatttttgatgatacgtccgcaagtcacgctcttaggcagcaagataccttcgtcgtcatcttgcaaaccagtgaatatttcataagggtgtccgtccaataatccgacaaaagctacccatttttccttgttgttctggaaacggacaacgtctgcttccaatattctcggacgtacctctacaaccgtaggcggtttgcaaggaggaagtccttctttcttgtctttatccgatttcgtagagatcagcactccggagcgtgaaccgtcacgatatacggtacaacctttgcagccggatttccatgcttctacatacaggcggtttactaaatcctcgtccacatcgttcggcagattgatggttacgctgatagagtggtctacccatttctggattcttccctgcatcttcaccttcatcaaccagtcgacatcgttagaagtcgctttgtaataaggagatttggcaaccagttcgtcaatttcttcctgggtgtaacgtctggccggatcgtatccgttagcttccatccaagtaacaaatttatgatggaatacgatgtattcttcgaatgcgtcccctgtttcgtctacaaagtctacatgaacattcgtatcgttcgggttcacctttcttctacgtttgtaaacaggcaggaatacaggctcgatacccgaggtggtctgcgtcatcaaactggtcgttccggttggagcaatcgtcaggcaggcaatgttgcggcgaccatatttcttcatgtcctcatacagtttcgggtcggctgctgccaagcgttggatgaacggattgttctgttcacgttcgctattgtatatttcgaaggcaccgcgttctttggccatttccactgaagaacgataggcgccgagagctactgtcttgtgtactttttcagagaattccgttgcttcttccgttccgtagcgcaatcctaatgcagcaagcatatcaccttctgcagtgatacctacgccggtacgacgaccttgtccgctcttcttgtagattttctcccaaagtgcacgttccgcatgtttcacttcttcgttttccggatcttcgtcaatcttggtcatgatacgttcgatcttctctagttcgaggtcgataatatcgtccatgatccgttgagcgagagccacgtgtttttggaacaggtcgaaatcaaaataagcatccggtttgaacggatttaccacataagaatatagattgatagccagtaagcggcaagaatcgtaaggacatagaggaatttctccgcatgggttggtagataccgttctgtaacccaggtctgcatagcaatcaggcacagattcacggataatcgtatcccagaacaaaacgcccggttctgccgatttccatgcattgtgaacgattttcttccacaaggtagaagcgtcgatttccttggtgaatgtaggttgggcagagtcgataggatattgctgtacatacggcttttcgtctacggcagcctgcatgaaagcgtcgtccaacttgacagaaacgtttgctccggtcactttaccttcggtcatcttggcatcaatgaatgcttccgaatccggatgcttgatagacacgctcaacatcaatgcaccgcgacgtccgtcttgagctacttcacgagtggaattcgaatatcgttccatgaacggaacaagaccggtagaagtcaacgccgagtttttaacgggagaacctttcggacggatgtgtgataagtcatgacctacaccaccgcgtcttttcattagttgtacctgttcttcgtcgattttgataatagcgccataagagtcggctgcaccgtccactccgataacgaagcagttggatagtgaagcaacctggtagtcgttaccgattcctgtcatcgggctaccttgggggacgatgtacttgaagtgatccagtaaatcatacagttcttttgctgtcaacgcattcggatacttcgattctacgcgtgccacttcatttgcaattctccaatgcatgtcttccggggatttttcatagatattaccgaaagaatcctttactgcgtatttgtttacccaaacccttgcagcaagctcgtcgccttgaaaatatcgtaaagattcttcataggcttcgtcgtaagaataaatctgtttttccacgattcaatttgtgttaaatctcgtttttaataagtaatatgtagaagtttacttatcgttaacaaatgtaggcgcaaagctaagaatgttttttcatctatcaaaataaaaatgaattaatttattaacaggttgcaagttttccatttgtttatgctaagtgtttgataaacagttagaattgaattttgttcaaaggttaaagttctccaaaaagaaaactattctattccactagtgtggtggattatttttttctttttatatctttgcaaaaaaaagatatgtttgaaaccgtaaagaacagaagaactatccggaaatatctgcctaaagatataaatccgattttgttaaatgatttgcttgaaacctctttccgtgcttctacgatgggtgggatgcaactttatagtgtgattgtgactcgcgatgcggaaatgaaagagaaactttcgcctgctcatttcaatcagccgatggtaaaaaatgctccggtcgtattgactttttgtgctgatttccgtcgtttcagcaaatggtgtgaacagcggaaagctgtgccgggctacgataatttaatgtcttttatgaatgcgtctatggatactttgcttgttgcgcagactttttgtacgctggcggaagaagcaggactcggcatttgttatttgggaactaccacttataatcctcaaatgattattgataccctccaactccccgaactggtattccctctcaccacaataacggtaggctatccggatggtattcccgcacaagtagaccgcttgcctttggaagctgccgtgcacgatgaaaaatatcatgactatacaccggaagaaatagataaactctatgcctacaaagaatcattgccggaaaacaagcagtttatcgaagaaaataaaaaagaaacattggctcaagtctttacggacgtgcgttacacaaagaaagataacgaatttatgtccgaaaatctattgaaagtacttcgccagcaaggattcttgaaataagtattaagtatttttcaagtattaagtataaagtattaagtattaccctggtgcgaaaccgcataataaagcct

SEQ ID NO: 8150 - DNA, 37043 bp, Unknown
  gut microbiota DNA sequence
aaggtttcagactgagccttaattttctaaagtcatgttttgtttcttttcctctataatatgtatttcaatagaaaaggggcttggaaataaaaaaatcaggcagtgtatttaagttaactgtctgattttcaaaagagcggtaaacgaggctcgaactcgcgacccccagcttgggaagctagtgctctaccaactgagctattaccgcatatttactgtgtttcccgacttaaaagccttatgaaacggtgatgcaaaggtaaacataatttttatatctcaaataaaatcacagaaattttaatgaaagaaaaaagtaatgtcaaagttgcttttactcttttgttttgatgaaaaaaggactggaaccgaaagagcgtgaacaaacctctcttttcatctgttagaatatctcgaaatcagatataacctaaccagtatgaaaaaaaataagcgactttttatactattgactttgtatttctccatcagtcagatagatgcacagacaccattaagttttgaagaatcactgcatctgctgaatcagggaaatcagagtttgaaaattgcagataagagtattgagattgcgaaggctgaacgtgataaactgaatgctttctggtatcccagtcttcagtctacgggtgcgtttgtgcacatgtcggagaagattgaagtaaaacagcccctatcgcagtttactgatccggctaaagactttgtacattccattattccggatgatcaggtcatttcatccatactagatcaaattggagcaaacacactagtgtttcccctgactcccagaaacctgactactgttgatttatcagccgagtgggtgctcttttccggtggtaaacgttttcgtgccaccaatatcggaagaacgatggtcgacttggcacgagaaagccgagcacaggtgtcggccaaccagcaaaacctgttggttgaaagttattatgggcttcggctggcacaacaaatagtaactgttcgtgaagaaacttataacggattgaagaaacattatgaaaatgccttgaaattagaggcagcaggaatgattgacaaagcaggcagactttttgcccaagtaaatatggacgaagccaaacgtgcattggaagctgcgcggaaagaagaaacagtagtgcaaagtgctttaaaagtcttgctgaataaaaaggatacagatgctaatatcattcctacctctcccctttttatgaatgactcactaccgcctaaaatgctttttgatctttctgtaaacagtggaaactatacgctcaatcaattacagttacagcaacatattgccaaacaagaagtacggattgctcaaagcgggtatctgccgaatatagcccttttcggaaaacagaccttgtattcgcatggtattcagagtaatttgttgccacgtaccatgataggtattggttttacatggaatctctttgacggactggatcgggagaagaaagtacggcaatcgaaattgacggaacaaacactggctttgggacagatgaaggctcgcgacgatttggctgttggtgtagataaactttatacgcagttggaaaaggcacaggataatgtaaaagctctaaatgcaacaattgctttaagcgaagaactggttcgtatccgaaagaaatctttcacagaagggatggcaacctctaccgaggttattgatgctgaaaccatgcttgccagtgtaagagtagctcgtttggcagcgtattatgaatatgatgtggcacttataaatctactctcgctttgtggcacaccagaacaatttgtaaactatcaacctaaaccgtaacaaataatgaaaccaactagtaaaaccctatcatgggcttttgttatcatccttttggcggtcggtatttttaccggcttgggagttatactaatgcataaacaacagctagttctgcaaggacaggctgaagcaacagaaatccgtatcagtggaaaacttcccggtcgtatcgatactttcttcgttcaggaaggcgattgggtacaccagggagatactcttgtcgttattaatagccctgaagtatatgccaagtatcaacaagtgaatgcattggaacaagtagcagtacagcaaaacaagaaaatagatgccggaacccgtcgtcagattgtggctactgcattgcagttgtggaataaaacgaagagtgacttaactcttgctcaaacaacctacaaccgtattctcactttatataaagacagtgttgtcacttctcaaaggaaggatgaagtagaagcgatgtataaagcggctgtagcagccgaacgcgctgcctatgagcagtatcagatggctgtagacggtgcacagaaagaagataaagcatcagctgccagtatggtggatgctgcacgaagcacggtggatgaagtttcggctttgctggtcgactcccggttgacagctccggaaaacggacaaatagcaacgatctttcctaaacgcggagagttggttgcgccgggaactcccattatgaacctggtggttatggatgatatacatgtcgttcttaacgtacgggaagatctgatgccacagtttaaaatggacggaacattcgttgcagatgtacccgccatcggtaaagaaaatatagagttcaaaatctattatataagtccgttaggcagttttgcgacctggaaatcaaccaagcagaccggaagttatgacttacgtacatttgagattcatgcgcgtccgactcaaaaagtggatgacttgcgtcccggtatgtccgtgctattgactttagactaattgacatcaaataaaccagcgaatggatgaatcacaaacatactcccctttttgttccgtattgttaagagaatggcagcgaatgacttcgcggcgcctttattttggcgtctgcattgttttgccgttgttcacccttttctttatggctacgatttttggcaacggacagatggaaaatattcctatcggtattgtcgatcaggataacactgctacttcccgggctattgccaggaatatctctgccgtaccgacttttaaagtgacaaagcattttgcagatgaagcggctgcccgtgaatctgtacaaaagaaagagatttatggttatctttccatacctccccaatttgagcaagatgctatcaccggaaaaaatgcaacactctcctactattatcactatgcattattgtcggtaggcggtgagttgatggcggcattcgaaacatcattagctccggtggctctttcccctgtggtgatgcaagccgtagctctcggagtagaacagaatcagattaccacctttttattacctgtgcaggctaataaccatccgatatataatccaagtttagattattcggtatatttgagtcagccctttttctttgttttgtttcaagtcttgatcttgttgattactgtctatacggtcggtattgaaattaagttccgtacagcaaatgattggttgacgactgctaaaggcaatatagtaactgctgttttgggtaagttattgccttataccattatatatatattgatagggtggttagctaattatgtcatgttcggtattctgcatatcccttttcaagggagttggtggttaatgaatatcatgaccgtgcttttcatcattgcgacgcaggctttagggctgtttttattctcgctgtttccggcaatttcgttggtgataagcgtagtctctatggtaggttctctgggggctaccttgtccggggtgacctttccggttcccaatatgtatccgttggtgagggatgcttcctatttgtttcctgtccgccattttacggaaatgatgcaaaccatgctctatggaggcggtggttttatccatctttggccgtcggctgtgatactctgtatctttccgttgttggccctattgttgcttccccatttaaaacgagctatagaaagtcataagtatgaaaacattaagtaagttacaacagttatcattcatcattcgtcgtgaatttctagctatcagtaccagttatgcagttctgcttgtgttgatgggaggaatctttgtctacggattactctacaattatatgtatgcaccgaatattgtaaccgatgttcctgttgccgtagtcgataattcgcatagtgaattgagtcgtgattttatccgttggctggatgctaccccccaagcagagatttatagccaggcgatggattatcacgaagcaaaagaatggatgaaagaaggcaaagtacagggaatactctatctgcctcatgattttgagaagcgagtgtttcggggagatgaagccgtattttctctttatgcaactacggatgctttcctgtatttcgaagctttgcagggggcttcatcgcgtgttatgctggctattaatgacaaatacaggtcggatgaagcggtatttcttccaccacaaggattgcttgccgtagctatggcaaaaccgatccatgtagaaggaactgcactttacaattatacggaaggctatggctcttatcttattcccgcagttatgatgattataatcttccagactttattgatggttattggtatggtgaccggagaagaacatagcaacagaggaatccgcgcttacactccttttggatatggctggggagttgccattcgtatagtggcgggaaaaacgtccgtatactgtgctctttatgctatctttgctttctttctattaggcttgctcccccactttttcagtatccctaatattggaaacggactatacattgtattattattgattccatacctgatggcgacctcttttctggggttggcagcttccaggtattttacggattcagaagctcccctactcatgatcgccttcttctctgtaggattaatatttctttccggggtttcctatccgatggaactaatgccctggtattggaaagctgcacattacattcttccggctgcaccaggcacacttgcttttgtgaaattgaattctatgggagccagtatggcggatatcagaccagaatatataaccctttggatacaagtacttatttattttataataagtatatgggtttacaagaagaaactggaatcagatccaattagttaatttaacaaaagcaaaacatacgctaattatgacatacgattaaagaataccttcaaataaatcaacttctcaatgtgaataatcaactttggaaataaaaaagtttccaaatgaatgtttttttggagaatctcttctatttctttgcttttctcattgcttttgtataatttcgttaactgtaatatttatatgatcgctagaagtagcttaaaaaacaactgtttatatgaaatatattgtatatattctcctctttttccctatctgggttacagcgcagacatacaaatacataggtatagaaaaaggtttgagtaatcgacggatattcaatattcagaaagacgcacaaggatacatgtggtttcttaccaatgagggaatggatcgttataacggtaaagatataaaacattataaattaaataaagaaggtactactttagatgctcctgtacgtttgggatggttgtatacaggatcacaaattggtatatgggtgattggtaagcaagggcgaatctttcaatatgaagcaaacggagatgatttcaggatggtatataaacagccaaccccctctgaaacaatcagctatggctatttggatcaaagtaataatatctggttatgttgtaaggattctatatcactatataatattaaagatgctcacatacttcaattctccaatatgttgcatagtaatattacagcaatagaacaagtagatgaccatcatttctttatagcaacagaagtaggcgtccgatatgtaaaattggaaaacggtattttagagactattcctgttgaaacattggattattttcatgcacaggtaagtgaattgtattttcataagcaattaaaaagactatttatcggttcatttgaaagaggagtttttgtgtacgacatgaatacacaggaaattatacgaccggaagctgatcttagtgatgtaaatatagctcgtatcagcccgttgaatgaaacggagttactgattgcaacagaaggaatgggagtatataaggttaatgcaaatacttgtgaactggaacattacattattgctaattatcaaagttataatgaaatgaatgggaataatatcaatgatgtatttgtggatgaagaaaaacggatatggcttgctaattatcccacagggattacggtgattgataatcgctatgagaattatcattggatgaaacacgctatgggcaatgtccaatcattaatcaatgaccaggtacaagcggtcattgaagaccatgaaggtgatttgtggtttggaactagtaatggtattagtctttataattcaaaaacaggtcagtggcattcattcctaagttcttttaatcagcaactaaaagacaagaatcatatttttattactctatgtgaagtgtctcccggcattatatgggcaggaggatatacttccggtatttataaaataaacaaaaatactctatcagttgaatacttctctccttacctactttctcacgtcaatatgcgtccggataaatatattcgtgatatagttaaagattcaagaggacatatctggtcgggaggatattataatctaaaatgttttaatctggagaccaacagtgcgcgtctatatccgggattgaattccattacatccattgttgaaaaagacaaagataatatgtggatcggaaccgctaacggattgtatttgttaaatcgaaatactggcgaatatcagtatattgaaatggagataggagctatatatatcaatacgctttatcaggcagataatggtttgttatacattgggacaaatggtggaggcgtatttatctataattctcaagataagatttttgagcactacttttctgataattcggcattagtttcaaacagaatatttacaatattgccggaagtagatggacgtataatgatgagtacggagaatggaataacctgctttcatactaaagaaaaggtatttcgtaattggactagaggagaaggattgttgcctgcttactttaatgcagcagcaggaacagtgcgtaaaaataagaattttgtattcggtagtacagatggagtaattgaacttccgatgaatgtaaagtttccggactataagttttccaggttgatatttagtgactttcatctttcttatcaacctgtttatccgggtactaaggattctcctttggagaagagtattgatgagacagatgtattagaattagaatatgatgagaatacgttttcatttgaaatttctacaatcaattatgattctcccgggaatgcactatattcatggaaattagaaggtttttatgagaaatggactcaaccgggagcaaataacttgattcgctttaccaatttgcctccgggtagatatactcttcatgtacgtgctatatccagagaagaacatgacatcgtttttcaagaacgtactatgaaaattattatcacacaaccattttggttgagttggtgggctatcctgtgctatatcctgttggtaatcggaggatcttatttcgttctgcgggtgataaatctaagaaagcaaaagaatatatctgatgaaaaaacgcagttcttcattaatacggcgcatgatatacgtactccattaactttgataaaagcacctttggaggaattgttggaagaagagacgcttaccgacaatggaatcactcgtacgaacattgcattgaggaatgtagaagtacttttacgactggtcagcaatctgattaattttgaacgaacggatgtatattcctctaaaatgagtgtttccgagtatgagttgaatacctatatgaatgagatatatgatacattttcttcttatgcagccatcaggcgcattgaatatacatacgagagtactttcagctatatgaatgtatcgtttgataaggagaagatggattctattttgaagaatataatatcaaactcgctaaaatatactccggaaaatggcaaggtcagcatttccgtatccgatacgaatgattcatggaaagtgataatcaaggatacaggtataggtattcctgccagtgaacaaagtaagttgttcaagcttcatttccgtgccagcaatgctattaactctaaagtgacgggtagtggtatcggattaatgctggtaggaaaactggtcagccttcatggaggtaaaattagtgtagatagtgttgagcatcaaggtacgacaatcaaaattgtttttccgaaaaagaataagatttctcaaaatgtcagtgacgaagcaccttctaaatttgaggcgttggctcctgtactgcccgctccgaatgtaccagcaaagacaaccgctacgatagataatccaaatttacgacggattcttgttgtggaagataatgatgagctacgctcctatctggtcagttcattatcttctatatataatgtacaagcttgcgctaacggaaaggaagcgttgattattatcaaagaatattggccggaactggttctttctgatatcatgatgccggagatgcgaggagatgaattgtgtgttgctatcaaaagtgatattgagatttcacatattcctgtgttgttgcttactgctttgggagaagaaaacaatattctggatggactgtcgattggtgcggacgaatatctcatcaaacctttcagcgtgaaaatattacgggcgaatatcgctaatctgttggcaaaccgggaactgttgcgcatgagatatgccaatctggatatagaagcgaaatcaatggttccatctgcaaacggtactaacagcctcgattggaagtttatatcaaatgtaaagaaaatcgtagatgagaatataaacaaccctgaattttctgttaatgtgctctgtgaatcaagtggcatgagccgtaccagtttctattgtaaattgaaagcattgacgggacagtctccgacagagtttattcgggtgatgcgtttgaaacgtgctaccgagttattgaaagagggggaatatgctattaatgagatttcagacatggttggattctctgaaactaaatatttccgggaagtattcaaaaaatactataagatgagtccgagcaggtatgctaaaggaggaggtaatcccgctgctactgatatggaagatgatgatgaagattgataaatagaaaaatagatgaataagtcctattattataatatgttctcccctactatgaatatctttagcagaggagaactttctttttcaagacttaacaagctgtattttttctcatactttatttcgtgtttcagttatctctttcttacttcctacttctgattttttccaggaaatcgcggatcagtggtaatatttcttctgctgattccacttcgctacacatagtttctactggacatcctcctgtacggtcgcggttccagataaaagcaacttcctgcgcaaaatcgactttcacatctgatttccggaatagctccaaagccttggtactgataatatccgtatataattcttttataccacccagaattatcagggcggcagctcccttgccaaccactttgtcggcaatcaaagctcctttaagaaactccggttcctgtgttagcaaatcatatagatcggctacgccacgttgagtgaaagtgcggatttttcctccgttggcaatggtacaggaatatcctcccgtatgtaatagattaattaattcttccatcgtttcttttataaagtaccttgtttcaattgttctacaaactggtctatccggtgcagttctttcggaatatcaatgttttgcgggcaatgagccacacactgattgcaaccgatgcaatggcttgcctgacgaagtttaggcacgctacggtcatatccgacaagaaaagcgcgtcgggctttcgcataattttcatcctgtccgcttctggcgacattaccttcattgacacaacggttgtaatgcaacaatacagcaggtatatccagcccatacggacatggcatacagtatttgcagtcgttacaagggatagtaggatatttcagcattaattgtgccgtttcttcgaggaattctttttcttcatctgttaatggttccaaaggagaataagtgcgaagattatcctgcagatgctccatataagtcatgccgcttaatacagtcagaatatccgggaatgaaccggcaaaacggaaagcccaggaagcgacactgctttccagacgacgttgtttgagccgtgccaccagattatcattcaacttggatagacgtcctcccaaaagtggttccataatgatggcaggaatcccccgtttggccagttcgccatagaggtattccgcatccgtatttcgagtattggtctctttggcatgtttccagtctacataattgagttgtatctgtacaaaatcccatttaaattcatcgtgtcgtgagagcagataatcatatacctcaatatcaccatggtaagaaaatccgagattccggatacgtccggcttcacgctctttaaccagaaaatcaagtattccgttatccaggtatcgtcctttaagggcttccattcctcccatgccgatgccgtggagcaacatataatcaatgtagtcgacttgtagctccgcaaacgatttgtggtacatcttgagcgaggcttcgcgagaccacgtatcaggagagaaattagataatttggtagcgatgtaatatttatcacggggatggcgacttaatgcaatacctgttgccttttcggaaaatccttgtacatacgccggagatgtatcgaaatagtttactccgtgagcgattgcataatctatcaatccattgacggcatcctggtcgataacttcaccattaccatcgggagcaggtttgagcggccaacgcatacaaccatatcccaaaagtgaaacacggtcaccggtggttggagatgtgcgataagtcattttatcggtgggcacctctccttctcctgttgtgctacttgcagaagtagttccctttgaagagcatccgtatagcagacctgtcgatgtggctgcactgatacctacaatcttaataaaatctcttctatttatatctttcttatttttttcttccataatcttatactgatttagatcaaataattctgtgcatctggtgtccgctcacatatatggcgctgaaaggacgggatggacaaaggttctcacacgctccgcaaccaatgcatttttctacattcactaccggaatctttagagaatccgctttgtcaggatcggaagccaccatttgtatagcacctgtcgggcaatggcgggcacagttgccacactccattccatccgtcaaaggtacacagttctctttaatccatacggcatgtccgatctgaatagccgatttctcggcaagactggtcagatgaatagcatctgtcgggcatacttccgcacattttgcacattcgggacgacaatatccacgttcatacgacatttccggttgcatcaacgtcatcagattgtccgaaggacgcaacacctgattggggcaaacagatacgcataattggcaggcagtgcaatgttgagcgaaattgcgcgcgcttaatgcacctggaggataaatcggattttctctgttcgggatcttcttatcctcaatagtggctaacccaccgtccactttcttttcctgtgctttcaggacagaagttgtcgcaaagattgccgatgccgaaaggaaactacggcgggcattatcaatctgttcggtagtgacagcctttgctttcatatcttcgcttgtagcagtttcgtttttaggtttccgtcgagtgtatttaatggctccatgcttacactttccgatgcaatccatacaagccacacaacgactataatcaatttcatgagcttttgaattgatacatgatgctttgcaattacgggcacataaaccgcaactattacatttggaagtatcaatcaccggtttgaatatcgcatatttggatataaatcccaatacagtacccaccggacagatggtattgcaatacgttcgtccattacgccacgccagaatgaaaaggacaatgagagtgacaacggcaataatcagtgttgaaaggctcttcatccatacatctacctcataaaaagcataactatccattcgttcggcaaagtatgccaacaggttgtttccccactgccaaaccggcgcgaaaaggctggaagctatccgtccataagcactatacggagccagtaagatagccaaagaattcagccctgcaaccatcatgataatgaacactcctaaaacgccataccgcaaccatttcattgccgatgaatagcggaaccggtttttcttttgtttaccggatatccacgaaacgatgtcctgaaacactcccaacggacagataacggagcaatagatacgcccgaacaggaatgtaagcacaattaaaaacaatacgacacctatattcaaggctaataaagccggcagaaattgaattttcgccaaccatccgaaccatgtgtgcaatgtacccgtaaagtcgagaaaaagcagggtaataagcgtaaagcacacaatggcggctgtaagtctgatagtacgtagcataaacttttttaattttcaatttatagtagttatctctaaatgtccaaaacagtcaggattgaaccatctgtatttcaacgttgcaaatttaatcagtgaaatttgtttttcaactatacagattacagaatgttttaccaattttactgataaatagaaaagaaacgtttaaccgtattaggtgaagagctatttttctaatgtcacgacctctccgatctccggaatcaatacattgaggtaatctttattcttcatctcttctgcattcttcaaaggctcgtcccaacgatgtttggctaacgcatatttagaatgatgtacggtcaggactctcttcgcttttaagtctctggctgtctgcgccatatattggggcatgaggtgaattaagctccactctttgtcgtattgcccgttttcgaggattgcaaggtcgatattggggaagcggttgcctatttccgcataatgtgtatcataccctccgtctctataattaggagatttcatgactctctccagccgttccccgcgaggagttctgccgaagctgggttgattgataaaaacaacgactgacacagccagcaacgctattacagctaatatacatcctacaatcatacgtgttctgaatttcttgaatatgatacgcatataattaatgactaaattatttcacgcagcaaatatacaggtattcagagagcccgttagtatatagattacagattgttataccataattactgaaagcaattgtctgttgggtgtcagtctattgtgtgaacaaaccttttcttattcagtgctttagaaataaattttgtagctgatgttcggaatcagtcccgatccgtctttttcttctactacgcttgttctttcattgtattcatagaaatgcattccggtgcgcatacctacatttagtatctttagagagaactcgtgagacactcttttcttattgatccggaagctgatagagacatcaccgttgatggaaggattgaaacgtttggtatatgccttgctttcgtcaaaaacgatgtcgcgttcttcttggcttttttcttcatccacaggagtgtagcgtccccctccctgaaaaaacaggcgtccgtttatacttaatacattttgtttgagtctgccgaccatccattcttttccggcgagcaagttcactaaataacttttgtccagtcttgtatttcgccagatacgatctcctcccctatacttcgacttgaataatgaacctgtaatcatatagtagaagccatttttcatgtactgctccaatgttatatctattccatagtttttcgctgttccggtgcttgtcaggatccggtctaaatagaattcttcgtaattaataatcgaaaaagaagaattcttttccaccggtatgtggaacaggtattgataatagggctctattttcagatgcagactttgattaatattccagtcataagtaaatccgaaatgatgtgccttagaaaaatccaggtatcggtttgattcctttttaccattgattatctgttcgacaaaataataatcgagcctttccctatggctgtgcaaaccgtaagctaccgctaaagaatgtgcaggatttatttcccatttgagcgcgactctcggttctatcgaccagttcttatttaaagtaaagtattgtccggtaactcccaaactggttgtcaggttattgctcaagttgattacggaactgctatacgccgaaagaactgtactttctccactacctttcgaaagctgctccatgggttggtttaatccaaaataaggactgaccttataatcaagatcatatttaagttccgtaatggtaatccccgttctattggtgtgcctcgaactgaatttcttgttcagataagaattgaacacaaaattccatctgctgttttgaatatctcccacttggacaatggttccatcgtcagtctgtaagttgactagtgaatgatctttcgaataggttgcagatagagacgaacggatataggtattttcattaattacatatttatgagttagcccgcctgccagtttatccagtttgttagatcccgacgaccggtctcccattgtttcccattcggaacgatccaaaacctctgccttgttcctgtcgagcaatcctaatccccagatcgaaaaggttccggctttacgtgtggggaaattcagtttaaaggctaaatcctgatatttcaggttgatgtcattgcccgacgccagcgaggtagtggaaaaacggtaattaatcaggtaggaacttccccgctttttattgatagggccttccgaagccaaatctatccccatgagtccgacttgaaaagcgtgttcgtacttctgattattgccatttcgcagatgcatatcgaaaactcctgataaggcattgctgtattccgcagggaaagctccgttgtagaagtcggagttgccgatgacttgcgtactcaaaccggacaggaatcctccgcccaaacctgataaatcggcaaaatgggtaggattaggtatttcaattccctccagtctccattgggtaaattgtggagcgtttccccggatggcaaccgcattggtaccgacatctcccgctactcctgcaaatgcagaactcaaccgtgcaggatcgtcaaagccattagcaaatcgtgacgcttcttcgatactaatcatacgccctcctgtgatggccatcgggttgacagtccggtctttttttatttccggtttgacaagcacctcggccaaatcctgtacattttcatccattggaatctctacaaatacttctttggaagaagtgacagatacttcggtgatgatacttgaacgataccccataaaagttgcctgaatattataacgccctaccgggacattattaatccggaaatttccccgttcgtcagtcgaacctccccgcgagggatcttctgttatacagacagaggcatattctatcggcgtattggttttggaatcaacaacaattcctcttatggtttgagtcagtttttgtgtatcattgttggcgggattttgcttgttatcctgcaaagagataataatatgatatccttttattttatatgcatatcccgttcctttcaatagttgggtcatggctttgtcgacagttacatttttgagagataaagagtgcttcttttcgatatccagcttcgattgctcataagcgatgctatatccggtttgtgtctctatttgtgcaaaagcctcttttaatgagatctttttattttgtatggtaatctttttttctttattctgtgcaacagttgtgagagagagaaaagtaaaaaataaaaaaatggcgagcatacctgctcttttcttcgtatttattcgattcattattctatatttgtatgttgatacttcattttacgtcacttgttgaatgagggtagacatttcagaactgggaagagggtctcaagctacttcccggttctttttattcataggctgtttctttttatggttgggttactactattttcttttcatactgctgataatcaaagccgattatatctttcaatatattcagtatttcatccagactttcatctttcagaaatttgactgtataccgttttgatgcggggatagttgctgtattatcaatcgtggtgttgtagtgcctttccagggttcggaatatttctccggcactggcattggtaaagaccagtttccccaccatccagcagttggtatcattggtatctatcattgatatatggatgtctgatgattttttgtcgtatgtaagctgctcattgggctttagtatatggggaggttgggactgaacgctcacttccaccttaccgctagtcaatgtagtagttattttctcatcattaggataggctttcacgttgaatctggttccgagcactttcaccgaaagttgggatgcttctacaataaaaggacttgcggtatcttttttgacagagaaataagcttcgccgtcaagcatgaccaagcgtttatctttggcaaaagtttccgggtataaaatggtacttcccgcgttcaaccatacttccgaactgtctggtaagatcaggtgtttctgttctccgtaggcaacggatacttctatcatttcgttttggggagaaagatagtagaacattcctcctgcaaataaaaacaaaggaataataacggcggcaatacgggcaaatttctgataagaaactatgttggtgagatgctccttattatatcccgttcttaaatttacccgttccaatgaagcataagtattcgaatcggcttctacgtccaattcattccaaaaatccagtgaagccttagctttcgcctgctgatttttatctttgatgatccacttctgcactttttcttccgtttcggatggaaaacgggcggagaggaacattttgatgattttactgatattacttttcttcatttttgctgcactttactatatatacagtttggtggcaaaaagctcaataagaaaatgaatatttttttgaaaaaagcaggatgaagacgaaaatgatcctataacaatgataccaaaaaacatgaaatcaccttccgtatttctttcaaagcaaggcttaactggctttcaacatttcttttggtagtatttaggcgttcggcaatttcggcattggataatccttcgttacggctcaatgtataaatcattctccgttgttcgggcattcctccgacaagtttgtcaatcagcatttccagttccttggcaataaggtcttcttcggaagtagagctatattctgtatcttggttgttgttcagataggcatcacacacatatttatgtttcaggaagttgatggctgcatttctggcaatggtgtgcaaataagaattgaatgatttggatgtatcaatggaatgacgattgatccaaagattaacaaataaatcctctgtcagctcttctgcatcggactccgattttatatatccgtcaatgaatgttttggttttgttgtagtatgctataaaaatagtctcaaaggccttgtgattcccatcctgaaaggcctccagcgtttttatatcaatgttattactcatactatttcccaactttcatttcattaggacaaaagaaacaataatttatcttatatgaatgctcttttttgaaatattaatgatattaggaggatttattttattttaatggccggtaaagaataccaaatacattcagcagatagcctaacaaacagactaaaggggcaatacgtatgcgtgtttcgctaaatatatcgggatgataggcggcaagggtactcccctcgccgctcatcaatatatatcctgcgataatcaatatcgaaccgattattaaaatgatgtaattctttttgcttaatacagtttcctgttctttctcttttactattttcgttttcatctttcttgagtttagttttgataattcattagttgagcgagtcgcatgtatttctcttcaaactgctgattactctgtttatacctctctttatccatatctttcagtaattcattacactgattccactgccagaacttatacaggcaatcccgttgaaccatcgctatccggctatctcccagcgagaaagcccagtcgatataatctctcgattctgctatcagatcattcaataaagtgatcgctttcccgctttctcctatggaggcataagctgtggctatctcatacgaaccactttcgtatacttgaggtacattatacgccggaatagcttgttcggcatacgccaatactttttgggcacgggcattgtctccttgtttcaccagttctttagccagttgggcaaagagtcttcggtgggagtagcagatgcgcatagtcgtttcgtccagataaagtccgggagtatctaatcctccatatttatatctgttcatcacattctcgtagaatttctccgtatctattgcatatccattgtccccttccgcatctccccattttttataattaaacggggtaaaccggaatgccaatccttcctggacaaagtaatcatcaaacttcaatttagtggcatttcccaccgagatagccatatataacggacgttcccagttgcagttagccaatatttcaagtatgagcaaatctactttagtcagcagacgcatgtctttcagagaaatagatagtttatccggtattgcatttttcaattcttctccttttaaatgacgaatggctttaggtagcatcattcccgaacgaagcactgcatccttatcgatgtgaatgtttattgtatcggtaggtatcacatgaaattcctgcttctctgcaaatacccaatgtttcaagatgttctttatctcatacggatcatctccaaaactgtcacgggcttcttcgggatgcttttgatacaattcttctatttgttttttcaactccggacgaacggctacatattcgttctttccctcttgatattgattttgtttccagctgatcggtagtccgggagcattgtatagaggacattgttgctgataaatataccagtcggtttgcgcataacttaagttgcagatgcgtgtatctctgcgtacctcttctgtgtcctgattataccacaaggggaacgtatcattgtctccgttacagaatataatcggatttcctgtatcgggaagcgtcattagataattagccccaaagtcacggcaagtataccggttgctccggtcgtgatcgtcccaagtctggcttgccatttgtacggggatgagtaggcaaagcagcatgagtaagctgaccgggagaactttaaagtgcttccgacgaagcatatcacagcatccggcagctcccatcccgatccagatagcgaaggcatagaacgaacctgcatacgcataatcccgttcgcgaggttgtccgggagtctgattcagatagagcacaatcgccaatccggtcataaagaaaaggaaaaacaagacactgaattgttgcttgcctttcttcccacgtgcccattgccaatagataccaagtagtcctaataaaaacggcaagccatagaaaacattgtggcctttattctgctgcaaagattccggtaaaagcttctgatctcccaagcgcagattgtcaagccaggaaattccggtaatccagttgccgtgttccggttcaccgcttccttgaatatcattctgccgtccgacaaaattccataggaaataacgtacatacatgtagttgagttggtatgtaatgaaataagtcaggttctctttttgtgtgggtacatcattcgtgcttcccgaccatcctttataagaagcagccaaacgatcattccacattcgcggaaacaacatattttgagtgtagcacacattttctttatagccgatgattttatacttgccttcttctttatcttgtcgatatatggcactaccttttttcgtttttactttgtaatagtctccttcgggcacatactccggttcggaagcgtaggttcttccgtaaagtaaaggggcactttcatactgttcgcgattcaggtagcttttgagcgtgaaaatatgatccggtgcattttcattaagcgatgtattggcattggcacgaatcaatatgaccgcataagtggtatatcctatggtgagcatgagtaggcaccataaaccggtatgtactatgcgttttctgaatcggtagatggctcctatcaacaaagacaggactaaagtcagaaaaatgattaatcctgtttggaaaggaaatcctaatacattgacgaagaatagctcgaaccatcctcccatatcagccattccgggtatataaacaaagagaatcaatacaataagaagaccggacagcgcaatcgttccgatcactcccttgagtgatacagcttggtatttccggtaatagaacaccaatacaatagcaggaatacaaagcagattgagcaggtgtactccgatggaaagtcctataatataggctatcaggataatccagcggtcgccggatattgaatctgcttcgtcctgccagcgaagaatcatccaaaaaaccaaagctgtgaggaaggaagagaaggcatatacttcaccctctaccgcactgaaccagaatgtatcgctgaaggtgtaagccaaagctcctacaaaccctgctcctaaaatgataattacgtcggtcgttgatagcttccgtgcatcatccgtaagtatgcttcgcaccaatcgggtaatactccaaaaaagaaacaaaatgcaccctgcacttaacagtgcatttaaaaagttgaccatgcgcgatacctgcgaagcatcggatgcaaactgggtgaatagattcccgacaagcatatagaaaggtgctcccggtggatgacctacttgtagcttttcggcacatgaaataaattcgggacaatcccaaaaacttgcggtaggttcaatagtcattccatacacaaaagctgctatcagaaagacaatccaacctcctaaatcgtttcctcttttaaataataagtaactcattgttctgtcatttttttgtttgcaaagttacagaacatgcatatatgataagtgtttttagtcggacagatacggacaggatgatttcgtaatttattgatattcagacttaataggagtctaaatacagacaaaagcagacagcatatatataggggaaaattatttattctgtaatttcattgtttcttcaattttagcttatttctgcacgggttttcaccacagaggacacagagggtacagaggtgaattttattcatgacttacggttttgagcataattgtgatgcgtaatcctctactataaagttgaaaaacgtaaaaacatctgccacctgcaacgaaaagcgtgtaatgtgctagttgataaatagttggaacgttgcagatacctgcggcagataggttgcagatactttatctgcaacacagtataaactttacataagctaattctctaggagcgcaaaagtttatttgaatacataacttcctgtatccaagcggggaattgtcgtttcctgcattagaaactacagtttccacggtaggaaacgagagttcccaaggcaggacactacagtttctacgtaaggatactgtcgtttctccgtagggacactacaaattatccatagagccatcccaattatcccatagctttgcataaaggaatcaaggctttttctttgattatataacgtgttgcagatactttatctgcaacctatctgccgcaggtatctgcaacgctccaactatttgtcaactagtgtattacacgcttttcgttgcaggtggcagatgttttatgttttttcaactttatagtagacaaaactttcattcatttctgcactgaaataaatttctccgttaaagtggtgaagcccccaatgacttaacaatatcttccaatgattctttcgaatttaccagcatcagtttctccgtttttattctggaaattcttcgtgtcagtgtttcggtagtaagtttcattaaatcagcaaaataagccggttgaactccttcccgtagaaaagcacatacccttaaatcttcttccgtgagttttggacttatctctttcaatttagaaacaagtccatagacattttcttgaagtcgcagcaactctgtccagtctttctcggagaaagaagggattttagaagacaaaacattccgttccttaaattgccgtacttttgagacaaccggagaactttcatagatatgtaactgaagagactgatacttctcttcgagatgattacaccgcaacatcagcttatccgattcgacatctttcttcagtatttcctctttgaaaagattcagttgggaaagtgcgtgccggtttttcttccagagtagtccaagcaacaaagacatcacaccaaacatacctaaagcagaagacagaatgaccgaagaatcacttttgttatcatttaatatcaactgactggcgtatgcctttctttccatttccagtgcttcatcaaagttaccgtatttctgataataaagactacatcgtttgcatatttttgccagatgatcgtattcctctgtttctttggcaagtttgattgcctccttaaagtggatttctgcatcctctttctgttccaaatcactttctacacaggcaagataataatatactttagatttttgatattcatcaccgtgtttctcataataagatgccgcctgcctaatctgcttatcagaggaatgaggaatgtttttatcctcgttgagctgggtacacaataaattatactctgccagttgagcctcattcatttggcttgactgaatagtctcaagaataatggatgctgtatcagggtcctgctccatcagttgcgcagccttgtccagcccttgcttcacgctcgtcccttccggatggcaggcagctagtgaaaggagcatcatatacaataaaattcgaagattattcataactctatttttgtctttgcaaagggttgattggatttgcaaatataaaaaataatcggcatttatgcttctataagttacacaaaatatagtgacgctatcctgttcttatagtgacactatccttgctaaatggcgtcactatcctgacaggatagcgtcactatgtttttttgacaaatatcaagccgatgcgggctattaattaagaagataagccgtatctttgtagcaaacaagaaaattatatatcatgattaaaaacattgtatttgattttggaggagtgattgtagatattgatcgtgacaaagcggttcaggcatttatcaaactgggactagcagatgctgatacccggctggataaatatcaccagaccggcatctttcaagaactggaagaaggaaagctaagtgcggatgagtttcggaaacaactgggggatttatgtggccgtccattgacgatggaggaaaccaaacaggcatggctgggctttttcaacgaagtaaatctaaataagctcgattatatattggaattgagaaagtcctaccatgtgtatattttaagtaataccaatccttttgttatgtcgtgggcatgcagccccgatttctcatcgaagaaaaagccgttgaatgattattgtgacaaactatatttgtcttatcaggtcggtcatacaaaacctgcacccgaaattttcgaatttatggtgaatgattgtaatatcattccttccgaaactttatttgttgatgacggcgcttcaaatatccatataggcaaggaactcggatttgaaacgttccagccgaagaatggtgaagattggcgggaagaaatgactgctatcttggagaaatgataattgagcagttagtatcataccgcaaataagaaatatgcaaccacaagtcatacttatcaccggagcatcttccggattcggcaagattaccgctcaaatgttatcggaacgagggcacatcgtttatggaacaagccggaaaccttctgaagacatgaatcacgttaagatgcttgttgtcgatgttacctatttcctttccgtttgtcaggccgtagagcggattctatcggagcagggacggattgatgtattgattaataatgctggaataggtatcggcggcgcattggaacttgccactgaagaagaagtgaatatacaaatgaatacaaacttcttcggtgtagtgaatatgtgtaaagctgttttgccatctatgcgaaaggcgcgaaaaggcaagattatcaatatcagttctatcggtggtgtaatgggaatcccctatcagggattttattctgcttcgaaatttgcagtcgagggatatagcgaagcattggctttagaggtttatccgttccatataaaggtttgtgtagtagaaccgggagatttcaacaccggatttactgataaccggaatatttctgaacagacaagactggatgccgattacggagaaagttttctgaaatcattagagattatagaaaaagaagaacgtaatggatgccatccgcggaagttgggtgctgccatctgtaagatagtggaacgtaccaatcctccttttcggacgaaagtaggtccctggatacaggtattgtttgcgaagagcaaaaaatggttgcctgatgcagtgatgcagtatgccttacggatattctacgcaattaagtaaacgatacgatatataaaagaaactgttctcaaagttcctaaaagaaaaatcgtccttactacagtctatcgtagtaaggacgattttataaaatcaaggcttttttgaacggcctctttttttgatttgaatatcttctatgtttccagattaactcttcggaaccaattccaaaaacatggtagtagtcagcaacacggccagtccgacgcaaacgcttatcaacagccaattgatatattttgctttcggcttggtgtcggcatgcagattattcaggaaatactccctaaagaaaagatacaggccggggattgtggcacttgccaataagaaatcttccggaatctgaaagaaataagttttggataatccgatcagcgaccagtggcaaaggaacaataccaaaaacatattgaccttttgcgcaaacagcaataacaatccgatggtaaacaccactaccgaacaaggcatgaccggagaagtcatttccgggaatgaaagtccgcgtgccaatgaaaccaaaggatatataaaaggcattgccaacaggacataagacagtagatcatatttgtgggtacgttcaaaggtagtatatcccgtaatcgcatcccatatccaaatgatagccatcacaccccaaaacatagccattactccattataactacgctcttcacagtagatataatagtagaccagagaaatccacgtatacagacctatcatatagaacttcatcgccattttcacccacggacgtggtcggccgataagcaatccggtcaatgcaataccaatcagaatgataactatctgtaaaagccaggtagctgaattataatatgcaattgttctccaaaaaatctccataaaagttcgttttagtgtcttgttaatgaaaaggctctatgtgggaacaggaacatcgggaacgtagctcctactgccaacatgaaaatcactgtgcttgctatcagagtattagagaagaacatcgacataaacttgtccagcttatccggatcattcacattttgcagacacatgataagtgaaaataccatgttgtatgcaaactttcccggaatcatgggaagcaacgctggaatgtacaataccgtcatcgggcaatatacttttttccctaaccacaaactaccgaagccgatgactaatccggcaaacaacgaacctgtagcaatatccacgcctaaataggtcatcaaacaaaaacgacaggcgtgtcccaatgctgccagtatggcaatcatcttgaatgcacgcaaaggaggatcggaaattgcaccaaatcctatacctgctactgctgcaaaaaatccatccgtaagaatgtcaagtgctatcatatcaaattaaactgttttttaccattaataatgtgaaggaaagtccgatagcgatgctgacaatcaacaaagaagcctctgtcagacgggcaaatcctgttaatacatatccctccactatatcaatcacgccattaatcaagggaaccccaggcacaagataaagcacgctggttgccatggcaatctccgaagttgtatcgaaaatcagtgcggtagaagcacacagggaagcaacaaaagccgaaacaataaatacaacataatgattgatctttttcgcctgcatttgttgtttcaggtagaatcctgtaatggtagccgagaacacgattcccatcgaaattaaatcaccaccaaataatttacagaaagaggcattggcaaatcctactaataataatacgaaaagagagtgtatccgcggagcagaaataatcttcttgtatttgtctttcaattcttccaatgacaaatgattgtctactgcttcccagcttaatgcgcttaactctgaattatgttcaaaactgatcgggtgtgcaggaatgtctataacctcgttacaagcctcgtttgtttctttgtctataatagtcagaatgatgtttctatgaaatacgcttaatttgacatctagtccgaaagcctctccaatacgctttgtgttgcgtaccacccgcgaggtgtgtactccggcccccattaaatgggctgaatattctgcaataaatttacctatggataataaagattcgcctgtcttcatgaatatgatatttttaaatcgggcgcaaaagtacaaaaaaaatagatacctttgccgcgattaaaaataaaaaatgcatgaataaccaatttacgcatcctaaagagagaatacgttttgccatattgacttttttctttgcccaaggactttgtatggcaagttgggctagccgaatccctgattttaaagacgtttttgctgcaaattatgctttctactgggggctgattttatttatgatccctgtcggaaaatttgtcgcgatccccttggctggctatcttgtttcgaagttaggaagccggagcatggtacaggtcagtatcctgggatacgcttcatccctgctttgtgtcggactggctcatgaggtctatcttttaggctttctgctcttttgcttcggggtgttctggaatttatgtgatatatcattcaatacacaaggcattgaagtggaacgtttgtatggtaaaaccattatggccacttttcatggaggatggagtctgggggcatgtgcaggagcacttatcggcttcgtaatgattttggcaggagtctcccctatctggcattacacactgatatttatcatcatccttataattgtactttccgggcggaaatatttgcaggagagcgcaccgcaggaagcggaagtttctgatacaaagctgaaggaaagaaatacagccaaagctcccaatggctttcgcctgttatttcaaaaaccggaaatgttgcttttgcagttaggacttgtcggactgttcgcgctgattgtagaaagcgcaatgttcgactggagtgccgtttatttcgaatcagtggttcacgtacctaagtcattgcaaatcggttttcttgtatttatgattatgatggcaacgggccgtttcctgactaactatgcttatcagctttggggaaagaagaaagtcctgcaactggcgggcagctttatctgtatcggcttttttgtttctgccctgttaggaggagttttcgaatctatggccatgaaagtaatcatcaattctttaggtttcatgctggtcggcttgggaatatcctgcattgtgcctactttgtacagcttcgtgggagccaaatcaaaaacaccggtcagtattgcacttaccattctgtcaagtatcagttttataggttcgttgattgctcccctgcttatcggtgccatctcgcaggcgttcgatatccgtatcgcttatatgcttatcggcatattgggcggatgtatcgtattaatagtcagtttcagtagtgctttcgatattcaggaatctggcgataaacctgaatagaacaaataaaaaacgcagcctttcacagtgtttaaaattaaacttcctgtgaaagactgcgtcaatcttttaatgccttaactaacctaactactttatcttaactatactaacctatctacaaaatacccgaaaaatcttttatactactaataatcctatctttcaattcgttattttcaactattgagaagccacagtctacatttgccggagccaataatacagctttagcttcttctgcatctgccatctcttccgggtgctctctgaaataagtttcccattgggaagctgattgcggagttacacccagcacatagttgataaaatcatcatccgtcaaaaaatccattacctttgagcacatatcgcatcctttttaagcgtttacataagtaggacggcgttatcctgtctatgtactcaacccatttacctttttactaaaattaactcgccagactacgcaattttgtcaatccgcgatgcatcaagttgcgtacagactgataattcatattcataatctcgcaaatatcctcgtatttcttttcttctatataatataatgtaagcgcttcgcgttggcggggagataattggtctaagagacgtcttaccaatgagaattcattcttgcgttgctcttcttccatataatcatcttctacatctgtaggagtggatatgctaacttcttctactgccgtatcagacatatacatacgtctgcgaagttcatcacacaacttattctttaaggagatgaataaataagatctcaaattatcgattgttcctaattcatctttctttgtatagagtttcacgaagatgtcatgaatacaatctttcagtaactctttatcaatggtcaacttcaatccgtaattaaaaaggacattgatgtgcaagttatacagctgtgaaaaagctgccatgtttcccgcttgaaaagaagcgagcaaagtgtcggttgaatgattagtctgttccatcatagcattaattcgattgatttgatgttgcaaaactaagcagtatcgaccgcaacgttaggtaaaatctggtttgtggattgaaaaaacaagtatcatgttttataacactcttttactagaaattaccaataaaaagcaaaaatcccactgaatggtcttcaacgggattctctgctttataacttatggaaccaataaatgccttctttcttatctggtacctttagattgtataaaccgtttattttcagtgatttatttatcgtttcgatctttccggaagcagggtggatgtactttaatacatactttccggacgataattgaacaggaatttctgttccggacttggaataaatgatacttccaatatcagattttaccattttcttgtactcatccgtatttgtttcttccacttccattgctgctgcatccttcaggaacgctttatctgtgcacggaattacaggacatgaacctcctgccataaacacagcccatcccatagccggataattctgtgcgtagaatgtcactgccttttgaggaaatttctgacgatactcattgacagctttatatgcttctgtgaaagtcacctttcctactttcatcttacgcatgtgctgacgtggcgccatattctttccaccttccggcgcaaagattccatccgtcttataatgccagtatcgaatatcaataatatctactacggcagcgcgtttgggatctgcaaggattgcatcctgtacgtctttcgttgtactcaatgccactttcgttttcttcccggtttcagcttcccattcagctatcacgtccaaccaaaattgtacgaagtgcaacgggcctgtaaattcggcgcttgtcaactgaataacattcgaattgtctgcgaagttattcaggcactgacggatatattgtctgtgcaattcacgacgaacaggatgactgatgtcatagaacatatccgccacaaagattcgtttgtctccggcaaatggagcaggttcaggaaatccggtctgattgatgttattgctgcttctccatggagaatctacccaatgcgcaccggcttccaaaatattatgctggaaatagttttcatggaataaaagtaatccatctttatttcctttttccgcaaattcttttaagcggctccagtaccatgcattagggcgtttcaaatcatatttgctcaatccttcccatgctgttccctgaccgctacgaccgaatggctgttcatagaaaggcccccatacatcaccatcccgacggcgaacccgttcgtggtcatcccggcgacggtcataccaaagaccgtaattctgatcgaaaacaagaatgtttttctgtttcataaagtcgactacagaatcaatgcggtcggttaatcccaatccttcgcgtcccggcacaaagcgggtgatggccggacttgcctttttcagataattggttttgagctttccgttccaccaaggggtggtatgactacctccaaccaatagagctccgtccatctgaatacgtccattggttacagttacttccggttgggttaataatttagcagcagcagaaaaagaagaagaatttgcaagtgcagcgctctttttctctttaatatcatcaattgattttactccggttgatgccaccgaaggagcaaacttattatcacctatccaatgttccaacgtcaaccgtggattatatgcttctttagcgagttccatagctacttccactgtaggactactggttgcacttgtatttctgggcagaatacgtgcacgttctgcacattctttgtttaaccgttcttccaattgagcataaaaaatactgcgaggttgtacatgattgttggattgtgcccattcaccgtcaccggagaattgtgcccaacaaccgtatgcacggttcatcgcatcttttgccggggcataacattcgatttccgctgcggtacattgccaaaacaaactgtttgccgtattccaaccggctccgtttttatcttgtcccaaattcttgaaagtcaggttatgaccgtcgatatttactacgtcaaacagcagtccgcatgcccaggcatcaatagaaccgctgaatcccaaagattcatacgaatcacattgtacaaaagcattgggaccggctgcacaatatccggcagcaaagtcatgaataccctgttccgaatagcagcgttgaaataaagtttgttgtcccagcgtatggaaagtgcaacgacgcatccctccgatttctgaaacgggttctttcgagatacagtcttcaacggtaattttggaacctgtacgctgaacaattacagcacttcctgcaaaatgcttgaaattaaccagtctcacccaacagttttccgcatcttcaatggagatacctgtccagcaatgatcctcgtctttaggataacgcttgtcgtaatcagaaatcagtgtcatattttctacgccacaatcgtgaatacgtccgttccattgataagtcaacagggaagaagttccatagttggcatccaaagccacggtcagcggagcatccagtgttatctggttgccgtttacttcgcagactgttctgtcccaagtcagatccatgtcaccttctttccatcccaaagcactgatacctcctccaaaaatatcacaacccaaagaggcaatccattctttgccggaaggacgggtaaccatgacgcgatctccttttttcagagaaacacccgaagcaacttccaatcttctcgcgtttaccggaacatagtgggaaagcaccttcaatgtgtcttgcacattcaggtcgtccactccttccatatagataagcgcacctctgtctacgccctttttcagcagtattgttttttctttatccgttccccgcaatacaattccggatgcggagatacgaatactgccggacagggaaaattctccctgatcgagtaatacggctccccgaaaaccggaagcgtcaggagccagcgaagctacataatcaatggcacgttgaatacgcgcagtattatctccggctttccagggtacaaacaccacattgcggacagaaggaatatcctgttcggaggatttatatccgcatgtagagaaatcgagaatccggtttccccgatcatcattcaggtaagtgatctggtcattcttaacctgtaaagcaaaggtttgcgcataactttgcacaaacccaatgctcaataatcctaaaaggatcgttcttacttgtatattcattataataaactttaatctcttttcatccggttacaacagacttttccgtttagacaatgtatcgtaattgttcttcaagtctgtccagtccactttctttctggtgtctataccattgatgtatttttcaatattggtatatccgtcaccgttgcagtccatgttggcgtcggtcgggtcattcggattcaatccgttagctatttcccaagcatccggcataccgtcgccgtccgagtctactaccgcttcacctttatattcgggcagtccgcctacctgacgaatatctgtgatgataccttgcttgtaagaatcagccggtaaccgtctcttcacgtaaggagagacaaactccggtgcatctttcgcataaatggcctttcctgtttgtacggttttaatgacacgtgcatctactgcgtcacgtttcggaaaattagctcctacattatctaatacaaaggtataagcttttttggtatccattacagttaccggtggcattttgaaagcctcgtccgatttaattagcggcaaaaactttgcggcgtccacgtcttcattaagttgtacgcctccgtcccagttatcttttgtaactttggcattgccatggataatatttccgtttacgtatgcttttccgaatgaaagcggtctgtttttgtcacgtcccgcttccggtttgagaatacgataagagatcggtttacctatcggagtgatcggaccgggcttgaagtagttgtttatcatattgtagaaactgttgtgatcgcctccgtctacggaacggttccaccagttgaaaacaacattattgacgaagttaaagtcgccgtccatacctaccgaactgttccggctgatgttggaagcaaagagattacggcagaacatactgttatgcccaccgatggttgcaccgaaagcatggttgtaggtatccaatgcttcagagaaaatagaattctggatggtaatgtttaccgtcggaagtttcagcccgtgtccgtctgcccctctgttgtatacatgacggtagatagacatattttcatccaatccccaactggcggagcaatggtctaccataatatttccaaccgcattccctcctactgcatcatcacggaaagctacgtcctgcgcaccgcggcggaagcgcatgtggcgaatcacgacatcgtgtgtatcgatcaggaaagattgtccggtgacgcagataccatctccgggagctgtttgtccggcaatcgttacataaggggcacgtacgctaatcgggcttttcaaccgaatcactcccgctacattgaatacaataatacgtgcacctcccgtttcgcaggcttcgcgtaatgttccgggaccggaatcttccagcgaagtgactacgatcactttaccgccacgaccaccgggggtatacatacctccgccttccgcgccggggaaagccgggatattactttttatcaaatcttcgggtttggaggcccaaggcttatagggacgacctttctttgcttcttctaacactgtcggcaaagctttttcccatgccgcatccgatttccgttcaaactccgcttcttgttttgctcctcttgcttttaccgagtccggaattacaggatactgggctgccacaggtagtacacaggcaaccagcatccacgctgataatactttcttaatgttgttcattcttttgaatcttaattaggtttctaaaaggacgattaagaaagcattttgtaatcggttatctctctcctttccgccattcattcatatattcgcgaggggactgattatattttttccggaaacacttactataatatcccgaatccttgaatccgacagcaaaagcaatttcggaaacacttaaatccgtgtttttaatcagttcgatagatttattcaaacgaatctcttttaccaggtcgacgggtgccaagccggtaagactcttcagtttcttgaagaatgccgaacggctcaatccgataccggatgctatggtgtcaatgttaaagtcactgtcatccatattttcttcaatgacctgatgtatcttttcgaggaactgtacgtctttctttaccaaaaattgttcgtagctgtcttcttcggtcgtcgtctggttttccatttgctgacggattcgttcacggaacagtttccgttcggcaagcaactggtcgatacgtgccaacagatattccttactgaaaggtttggtgatgtaggcgttcgcccctaaagtgatcgctttggtcttggcgccttcatcattcttcgcagtcaggataatgacagggatatgactgatttggaaatctttgcggatggattgcaacatttcaagcccatccatttcgggcatcatctgatcggtcactacaatatccggatgatacagatgtactttcttcaaaccttccactccgttattggcaatatggatattgaacttgtcttccagctgaagctttatcaactggcaaaggtctttgttatcttccaccaacagaagggtcggtaatgaagcgtcgatttccggttcttcttccgtaccgtcttcggatatggcatttgcaacaggatcttgttctaccgaaacaggggctgtctccgtatctcccacatagaagtctacttccgatgggcggtaatgttccttatccatcaggagttctacaataaacaccgctccttgtccttcgggactttcggcacgaatctgtccgtgatgcagattgacgatctcttttgaaagtgccaatccgatacccgtgccctgataataggagtttttcgcgttctctccttgcgagaatcgttcgaaaatctcggtcagtttattttgtggaatacctactccgttatcttccacccgtacataacaacgtttaccgtcgtccgtcaatccggtagttatataaatacttcctccggaatgagtgaatttgaatgcgttggatatgatgttgcggataacaatgctcattttttccttgtccgcccataccataatcggttcatccggcaattggaaagtaaaactgatctcgttttcttcggaaagtacccggaattctttctggaaagaagctatcatctcattaaaatcaattaatgacacatgcaaacgcatcttgccgttctgaatcttccggaaatcaaggatctgattcactaattgcagcatttgattggtgttcttctccatcagatccacatattgcaatcctttcggagagagcttttcgcgttctcttagttcctgtatcggaccttttatcaatgtcaaaggagtgcgcaattcatgggagatattggtaaagaacttgattttcatctctgataccttctgctcaatataaatatcattcttcattttgagcatgaagaaagccaggcgcaggctgaaatagagagctgccaaacctagaattacatatataagggttgcccaccagctcaaccaccacggtggaaggatagtgatggccagtgtacagttggaaaccagctccggattggcttcatctacggtttctacacggaatgtatagtctccgggaggtacgttggtataagaagcgatacggttctttccgttataatgccattctttttcatatccttcgagtatatatcggtaagatacccggttctgattatagaaattcaatgcggcaaattcaatcgtgaacatggattgattgtagttcagttcgattgctttggcgtatgtgatggattctttcagaatcggacattcgcggaaactacgcagatcgcggttggaaactttaaagtcaacaatacgtgtatcgtagttcgtatgcaatgtttccagtttgtcgggagagaatgtcaggattccctgccgggtaccaatccacaa

SEQ ID NO: 8151 - DNA, 2610 bp, Unknown
  gut microbiota DNA sequence
caaagaaaaattcaaggctgacttttttctcctactcgcttccttcacttcgctaaagggcagaaactcgctacgctcaaacagtctgcccttcttgacgctacgttacgggcgctcgcttgacggagaaaaaagtaggccgggaaaccatgcggggtgcaggtcattgtgatcgtatgtacgatgggggggctggggtatggttgtaatgatgtgttttgcaatgatgtgttttccgcagcatagttgctgcggaaaggatttgatgttagctgttagttttgtttagccagtcgtagaaggtgtattgggctcggacggcaggggtgccgggtgttctttttttgaatatgttttgcagcttatcatctacccagcaggctttttggttgtcggcgagttggatgtcgagcatttcgatcaggttgtcacgcaggtcgggggcaagaacgggggtgatggcttcgatgcggcggtagaggttacggcgcatccagtcgggagagcccatgaatactttgggggtgccgtcgttgccgaagtaccagatgcgggcgtgttcgaggaaactgtctacaatacgggtgacacggatgttacgactgtatgactgtccggggatgaggcaacagataccacggacgataaggtcgatttgtacaccgtgttcggaggcttcgtagaggcggtctatcatggtagggtcttggagggcgttcatttttaggatgatgcgtccttgcttgccttcgtctgcaagggatatttcgcggtcgatcaggcggttcaattcgggaatgaggttgaaacgggctaccaaaagggtggtgaacttcgggtcttcttttccttgcagggtacggaagaggttatagaggtcggccactatttctttgcgacaggtgaaaagaccgcaatcggcgtaaagggtggcggttttttcgttaaagttaccggtgctgatgtaggcgtagctggggattttctcaccgtttaatccgcgacgacggatcagggctactttggcgtgcactttcaagccagggatgctgtagattatcttgataccggcggcttgcatcatttcggcggtggcaaggttgttttcttcatcaaagcgggctttcagttccacaaatacggtgactttcttgccgttttgggcggcggctatcagggtgttgatgacggcggagttttccgctacgcggtattgagttaccatgatttcacgggtttccgggttgtgcacggcttcatatagaaagtggataaagtgctcgaaagagtgataagggtaatataataacaggtcctttttggcgacgtaattgaaaatggattctttctcatcgaggacggtcagcttcatcggcttcggtttttcgaggctatgaagggatttgttcgggttgggaagatgacgcaggtcttcgaggttcaaatgcttatcaccggggacaagttcgtcacgctgaatacggaaggcatccacaaggaagtccaggaattcagaaggcatagcacggtcgtagacgaaacggcagacgtcaccgatcttgcgtttcttcactttcttcttgagttgggcgacgaggtcggcactgctggcggtgtcgtcaatcagtatatcagcatcacgggaaattttgatgcagtagctggagtcgacatcgtagccggggaagatcaggttgaggtttgccttgatgatgtcttcggtaaacatcaaataatgatttttctcgcgagacggaagttcgatgaagcggggcactttggcgtagggttgtttcatcacaaagtaaaggggttgtcggaggtctgttacatttggccttgctgcttccatacctacttttataccttctccgtcatttctttcatttatgcactctccggtatatttttctatattttctttaggttcttctcctttgtttttttcttctttcttcggatagactcgtattgccaggtaaaggcggttatcccgcaggaaggagacaattttatctttggatacaggcacaggttgcaggtagggaaagatttcctcccggaaaaagtctttgataaactgttggtggaacggttctacatggttgtcctgataaaagatgatatgatttttgcgcagggcaggcagtattttttgttcatagatgcgtacacggtcatccagctggcgggtgacttctttatttatttcctctaccagttcgcgggctgactgtacggtttcttcatcgctttccgtagcgccggaagcaacagctttatggtcggctacacggattttgtaaaactcttcgagattggaagagtagatagagatgaagttgatacgttcgtaaagcggcagacgctcgtccagagcctccaacaatacgcggtaattgaatgagagccaacttatatctcgcttgaaataattatatttgctttccatgtgctttaagatttttccaaatatagtatctttgtgggattaaacaaagaattttatgacaagaattggattattatctgatactcacgcttactgggatgagaaatacctggaatattttgaaccgtgcgacgaaatctggcacgccggagacatcg

SEQ ID NO: 8152 - DNA, 10035 bp, Unknown
  gut microbiota DNA sequence
gtacctaaagactaccgtttgcataataaaagtcagattatctatattcttaacagtttcacctatggtttgcaaacgcatacaagttgcatcaaaaatatccatcttatcaggagaagctaagaaatcatttacagaaatgacactaccacatctttctatagttgtattaatacgttcttctacaaaaagaagcatatccaatatgtcagcattagatatagattgcatctttctctatatgattgcgaaataaactacgcataattgcggttaaagacacgacatccacttttgcattaaaacgctcttctaatgactcttttatttccattcgagtaaaataatccggatcttgaagctttacacaaatatcaatatcactatcctctttctgctcaccacgagccacagaaccaaaaagtcccaacttttcaattccatatctctccccaaattcttccttaaaattccggagaatagcgattatttcatcttttgttttcaattgacactattgttataatgcaaatattaaaatttatattggaattagcaagttcttaatcatattttgtagtatcactaattaaaaaaagatgcacaggtcatcgaattttcatcgatcccctgtacacctactactctaaattctacttcaaaacataaatagcctaattatgctgccgaatccattattaacaaccatgttagttttatccatcaaaagtacagaacataattacgtaaatagttcagaagtgcccagaacgccatcatcattgccaatacaaacaaaacgacaagtccgattgccaaagcaatccaatgttgtgaatgatcatcagaatattctttatgaccatcattaaacttgtatattgtccgcactgtctgcgctcctgccaataacccgaacactccggcaaaaataccattatgaatgtttccaccgccacgaagtgcccgcttatcaattaagaattgaggcgtcctgctcgctaccacatacaaaccggtagctattaaagtagaaaacatcataccgactcccatcatccaatacatcaaaatacccacaatgacacctaaccagattaatttcctggaaccatcaaaatgacgttcttcaccactattaatcacatcagtcaatgagtttaagcgttctatgacatcagcgtcagtaggacacataccgataacctgatcaatcaaaagaacagatttcttaatttgcttcatctttgtcggctttctgaattcatcatcatctgttttttcaatcaccgtccaagtagcgaatgcctcatccatcagcttccacgcctccgttatctcttcatccgtcattttctccggcattccggctgcaaggcgtttattcaacattccttctaccgtaaaaacctctttataacgtgcgcccttataccatacaaaaaacatatgccccacaataaataaaacaacggcaatatacaaaatcagttggagaacagccaatatctttactcccaaaggaactccgtcatccgccgcagcatcagctattgcatcagctccactaccgctttttacaagtgtcaatccattaaaggcagcatcttttccgcctttatcaagtccggaaaacgacaacttatcatctttataaacgactttgcattgaccggaaatcccggcatcaacctccggacgtccgcctacaaaagaaagagtcagttcattcccgttcatactctcgacgtaaaactcataagttgccatcaaagattcccttccaccgggttccagcatattcacttccataaatccattgcatctggcattctcattataaggattcaattgccaattaccatcacaattcaatgtgaacgcaacctttaaatcgccttctttatttgctcctagccagtcaccgctaaaaacatcttcctgcgcaaatgcagtcatcgaaataaccatcattacaatggcacacaaatactttttaatattcttcataatataataaaattaatatttcaacactttggctgccacgttcttaaattgcggcatagcaagcccgatagaagctccaatataagtcggatcacaaattatgtacttctttccgcttacagttatataatctccgtcaatgttttcatcaaaacagaccgctgttgccatgtgattgggatattccaacaatacaacatcaagccccataagagtacgtaccaaataagagtataacacagcacggtcttcgcaatcggaataaggatagtagaacagctcatccacaaagaaaggcttttcataaccaaactggtcaccatctgtcttataatcaaaagctgtctgcacgaaattaatcagtatattagcagcttccgattgttttttcccttgtatggcagcttgcaatgatggaagcaccgtctgttgcacttcctgactgacaggagctcccacataaacagaaaagtcacattgcggataatccttatagaaggaaataagtcccgaatttactttcgaacagactttgacggatggataagctttcgcttgtaatgttttctccacgtaagttcctgaaaaggattgaggagtagtgatattcatatttaccgggttcttcgcattggcgaaatcacggttgtaagtgtaaatagaattagttttatccggggtagtatcaaacctgtaatagtttactccattcaaagtaataaaacaggtagcataaatcatgttacccgaagcatagaataaagtaaggcggttatccatacgcgccaccttaaccctatatcccgattgagaaaggagaaacatttgcataagagctatttcatcggaatgagtacttccacatagttcagtagcaactttcctcgtcaacagcagataaccatagtcattcaggacattatcctttttaaaagccagacagtcgtctatcaaaggctgatagttgctacgcgataacgtctcccatccggcagaaatatctttctctgcaatcccttttaaagtgagccggttcttcaatgaagcattgacaacacaatctttactgtagaacgaaaactctacaccggaaagtgagcgtttggccggaacggtttcttcaggcttcacttccggttttatttcagggagcaccgcagaatccttttccggttctacagccacatctttacctcccggtataaccggaaccggtgttttcccttttgaaggagaaaatgtcgcacttggagtcactgtcggaatggggagtcgggtcacctcccctactttaacctcttgcggttttgttaccggcttcttatggtcaaagctgaccggttttacaggctctggtttttgaggacgtaccaccggcttctgcaaatcatactctttccaggtttctttcaggaattcggcaaattccttattctgttcgctcacaaaatcatcaaactctttttgctgctgcttcacaaaatcgtcaaactccttcatgtctttatctatttgcgcaaaaagactaaacggcaaacacaatgaaaaaactaccatagatagtattcgtatcctatttttcctcatttccttattatattttgttgttctgttatctgccaatctacacacagcttattattccgtatatctttgataaaggggaaaatggacaagacggcgacaaccttctcccgatacaaaccacaaccggaatcagtgccaccattaaaacgatcgtccacctgcttgacatttacatcagaaaacggatataacaacagcgccttcactaaagaagacatataggcattccaaaaggcattcctcatatccatcttctccaatccgtcctgacctccggaaccggcatcttcataccaacagccttcttgtgaagaacaaatttcaactccgttcaaatatgaaattatttgaggagatgactgtgttcccttaagctgaaaccatgactggtctgattgctccctacaactatccgattccaacaataaattgaatttcacctcttcttcctcaaccctttctttcgtaaacaaaagcatcaactcactaatggaatgataagaaaaatcgcaactatcattcgatggagtaaaagatacctccagaaatttctctccaaatatagaagtatattcatgctcaatccggtaggaaacatgttgaacgggatgttcgatcactcccagtacaagcattttgtttctttggtcttcgtatgtattactggcagtctccatggtggaaaaaacgtccgagagaagtctcaattgtaccccttgctgcaatgaatacagataagccgctctttgcaaagcaagcatccttgcagcttcggatttcatacaaggatcagatataccaactacccggcctttccgttgagaagcaaacacccattccggcaaagtctcccgctgtcccggtctccagtcataagattggttataaactgtatcaacaggcattgcctgtgaaaacacatcaataccgggagacaaaagcaactggataataaaaataactacccaattatatcttatatccgacaaattaagcttcatcattcaatcttcaaatagttgggtagttattaaagagatcattactatccgcaatgttttaaacaagctgcttattgggcgtttttactcatttcttcttcaaatacctttttgaacttttcatattcaaagtcaatgcgcaatttgtcatcattcttaatacgatttgccatagcattcatgatttcctctcctgccagttcaagagagacatatactttgtatttaccatcaggagtcttcatggttttttcacaaattacacgcgtaccgctcaattcctgttccactaccgtacgggtcaatgattgataacgacttttgctttcatcattttcaccttgctgataagaggaaacataactatcggttaccgatttcacttttgcattgatagcagtagcaatttcagcccgggcctccgtcatcgcttttttctttgcaatagacatatccgtagaaagtcccatcgaactagctctaaaatactctttgttcgtttgaaattccggtcccgaacaaggaacattaatttctacgtcctgttgcactgccggttgctgcactgtttgtgttacaggttttgaactaccgcaacttgtcataacaacaatggttagcaatgctgttcccaataaattaattcttttcatttcaagtcttttttaatgttaatatatgattcatttcaagcctctcaacttcactatattatttttgaaatccttcaattgcagcagtgccacagattgcaacttacttacctcaataaccatctccgtaggcagatcaggcacaatgagcgcagtgactctgcggtcattgaacttagaccccagtttgagactgacaatcggagattcttcacctttttcgtttataaccgtcagatttccactatataagtccacttcgcaatcgtcagcatttgtattcacaatcttaagatgtatcctcgatttgtctcccaaagttgcaagtttgtcaaattcaacaaagacaccatccaaccattcaacccgaattgccttttgattctctggtttggcggacttaaccggaaccaaaggagcaggaataacttccggcaccacaacagggacagatataaccggatcagcttctttttccggtacggaaggaccgactaccggaacaggaacatccggcaacatcttctgtctttccggaatctttccggttctgtcgaatgttattttcttcaattcacgtgcaaactcccggttcagccgttttatcaattcacgcgccgccatattcttgccttgagaagcggacttattttcaggtactaatgtccgttcatcattaatagaataattcaacatggtttgccccgtccggttattttctattttaatccccaacgtagaaaagaattcgatgaagttatacagttcactcggaacggtattgcctttacgacacttattatccaatgtaacgataatgtcggcttcagaaggagatgcaactacgttaaagaaatgattgttcagcaaactcttcacagttcgttccaccgcctctatatcgctctgcgcacttctaacataagcagaagtctgtgtctgcaccgtgttgatagtcaacgttgctccgggaagagaagaaagcatttgtttgaataaagctgcataacttcccttccggaacaagctgaacacatcatcaattaatgaaattccaatttcctgctgtgcctgtttagaagtaatattgcgcacataaagagcggcaactcccgattcgtcggtgggagacatggaagacaaatctcccgacccggaaacaaactcggctttcaaccggatattccttaacggatttccattactgtaaacacctatagcaataggctcccttataccttgaaacggcgtgactgaaacggttgccggattcagaacaatcgttattccatcaaatactccagccaaagccgcatatagttcagtcgccaaattaattgtctttccttcgtaagagcagaacaactcctgattaagcaccgggcgtatagcctccatcccatttgagaataattcaatggcagtcattaaatctccctgttgtaaagtaatgtgtcccttataccaaaaatcgaatccgttacggattgccttctgacgacgtgcttccaccaaggccgcataatcatccttattcagttcataataaacccaatactcattgtcacttcgccaggaatccaccagacgaaagttctctatttccgcccgggcttctgtacgaatactttctgcgaaggtttgtttcacattaccatcgtcctccaacgtattcaacaaagaattggcggcaatcaccacttgaatttcagatacaagatcagacaaagcgttttgctttgccttttgctgataatctccttccgatatttcagccattcctattccgatgtaacttaaaccactaacaggatgctgtttcacccagtcaggacggttcgtttgttgaccggaaagcggaaagcaaaaccatgaaatcacaagaataaataaaagccaatgtttcatacgtccttgatttattgaatagtcaaatagatggtacttccatccactctatgttcactatctattccggaatcattcagataattaaccagattatccgcaaacgtgatgcaatccatcggcaagccgtcgctgtcctttgcaggaatctgtatcgaatcaaatatcagactatcgtccacagcaccttgaatatggtagcgtcctccctgggcattttttcgtacccaattgcgtatatgcgccgaaagagtagtactaccgtttatccgactattcatcgtattgatagcattatctgcgagactaacccgaagaacaaccgtattcccctgttgaactttccgggcaaactctttcgagatatctttcagaaaaccatccagaacatcttgtgccgcgtatgcgcataacttatccacgtccgtcgtcctaaagcggttcgtccagcttttccggctagccaaatctactccggtagccgtttcacgagcagtcataatcaatgagactctacttcccgaagctgcagatatgtctttttgtaaatcaacaatcacatagacgtccgctcccgaattcatcaacaactgcttatcagtggaatcagcattcttactttcccattcggaagcacgcaaagttcctgactgttttccctcggcagccactgtcttcacgccaagcttaacaaatccctcctttaccgtacttacggctatacgaagatcaaaatcattcttcagaatatcagcgtatgagcttcggtcattgcttttataggggactaccatgattgtcggcaaagcaatttgttgccgggtttcctccatcgacatttcttcctggggtctcgtcatcaatttgttccgtatcaagtcttttttaagcgcacctaataagatttgagccgttactgtaccattgtatagcttggaagattgccgtaccggatctcctaccgtttcatagttcttcacaaagagcatataacgtgaactgaaaaactgattcatatagtaagaatcttctttcccgacgagcggctgtccgttttccactccgtcaatgccgttgagaaatatagcattaaagattgacttcaatgccatattatatacatctttctttttttcggctgttccggaagcggtgataacggctatgttatcatctgccttcacacaagttacgtcattggagtatgactcctgtgccatgaaatgaatagtgtatacaactagcaggctcaaaagcagtattcgtaacttcatcatagtccaagtccgcctaaaaaggtattttttcgagaaagaataatcaatttcttttcttctttcgatgctttcattatctcctcaccgcctttgctcacggtacataaagaacgcgttccgctcaatacttctttcacattcaaacgtccgacttctttcaatgacagttctccggcaatatccatctctatgtaaacgataaatttctggcctttttgtacccctctcttggttccaagatcgatatatacagtttgtgctttatcttttttggtactctcaatctgtacaatcgttcctttcattttgaaatactcgtcaacaaaatcgtccatgcttattactacataatccaaagtcttaatgatagcttcatcaggagtatcgccaatattcccggtcaacccctcgtgagtgaatgtctgggttcctttgagtgtaccgttagaagggtctactattttcaacgtgtaagaaacactcccctgataataggtcttccctttactatctgtttttttaactccctgcatactggtaatatttccctgaataagatattgggcgcctaacgtcgtcatgacctcgcttctgcaaacggcatctcccatagcagaagcctcttggcgtcttttcgcttcagtcttcaatgcttcattagaatcaacatcaataagttctacacgatccatcttctggataccttctattactttattacgcaatgcttccgccaaaatattactgatagtaccgggacgagagaaataatcaatatagactctttctttaccgttttcatcggtttgtgcatagcctaacattggaattaggcaaatagagaacaatagtaaaatcttcttcatgtctgtttattatttattattaatgctatgtttgttttttagtgcaatatttcgctcttttaatacaatatagaatgttcttttttttaataatgatttactgttatgaatgattgtgttttctctgactgcaaagttaagcacacattaaggtgtattgtatacacaatatttactacaaccatccgttaaacgaatagttatctccaaatatcaatgagaaaagggaaaagagtggtatgttcaataaaacgaggtcgttttcccgtctccaagctatttgcaccatcgcattttccacagttctctcgaataagtataaaatagcatttgttatatccactaaaattgttacatttgtccaataataaattgcttcccaataacaagatacatggaaacagatttaaagaagatagtaggacatcggctgcaaatgcttcgtatggaaaagaatcttacacaagaacaaatgggagaaaagttgaacttatcaacaagtgcctattgtaagattgaatatggtgaaactgacctcacgttaaccaggctgaataaaatagcagaggtactaaatatgtctgcattagaactatttaataaaatagacgggaatgtgtatgtcaataattccggtactatcggaactaatattggagtcgctaaagactgtagtagcgtgcatatcgaagcggcagatgatcttcgtgagctaataaaagcaaacagtcgg

SEQ ID NO: 8153 - DNA, 11127 bp, Unknown
  gut microbiota DNA sequence
ggaagctgctttcacggaattgcttgaacgggagtttcctgacgtactgaccgttgaagataatcaagcattgcaagaacaactgacgcgcaatgaactcttattcaattatcacccaatacctgaagcagatcacgcgtttgctgattttttggcggcggatgaacagcggtgtctggtggtaacgggcggttgcggtcttggcaagagtgctttgttggctcattggagcgatttggtgaacaatgatatgccgatgattcctatctatcatcgcttggatagtactacattgtcttcttatccggaaacgttggcgagaatgttagcttccaaatgccagaacgcactcaagcatcaatctttgggtgaagaaaatttgttcgcggcggaagtctcaaaagaactggactcgacccaaagcactgccaaatccatcatggacaccgtgaaaaactcggttttgatgggagatgctggcttgaacactttttcaggaaacacacttcgaaacctcaaggagattgaagaagatttgaattctatccaaaagttcagtcagttgtggagtgtgttgggtgcatcaagataccctatcattctgttgattgatgacatcagttatctgaatccgactgaagcatccctgttttctttatttgcatctattcccccgaacgtgaaagtcgtgttgagcttttctgcgtcatccactgcctacctgccctttgttcagaatggctacgcccatttccagttgaatggtttttcacaggcggatgccaagtcgttctcaaagcagtatttgtctacttactccaaggctttgtccgcacaacaggaagatattcttgcttcgtgggtgctggctaaacaaccgcgctgtttaagtgtattgctcaacgagctggtttcgttcggtcagtacgatgctctcaatgaatatatgagtggatattgccggctcaatgaggttgggcaattctatgacagtgtgttacggcgtttgtcggctgattatggtttcgaagagattggaagaacgcttctgatgctttcacttactttagaaggatttaccgaagatgaagtgaagagcatggcagacattaatcagatactttggtcgcagttgagagtggaaatgagcagctggcttaccaacaaaggaggacgatattgcattggtgacacacaaatggtagaggcaatcgaacgctatttcgctcaagatgacgaatgtatagatgatagtcgccatgaaattatttccgctttgctggatgaggaagagattctttcccatccgttgacttttgccgattataactatcgcatgaaacagttctgctaccatgattcgtatcgctataaagtggagattacctatcaatgctataagatgcaagaatgggatatattgaaggattggatttgtgatgtggagattttcgagattctgtatcgcacgaatcgttctctgttggaagatagctggaaggcgatcatgaacgacaatcctgaagttacgcctgaagtctatgccgaattggactttgatgagatcgattcttttttaattcctgtcattgctaatgatatggctactttcttgagcagttctttccatctgacgaaggcggcagctgctgtgagtgagaagagtatggaaggtgctgccatgccactcattgccaagtcggtattgaagatgaatgagggatgccggtatgcccgtaatgaagaatacgaaacggcatgcgactgtttcctgaaagcattggtgatgcaggaaaacattgtaccgactccggaactggagattgccaacacctgccgaaatctagctctggcatattactacaatgagcaatacaatgaagcagtgacctatttgaatagggcgcttgattatcatgcggcttctgctgacgagaagagtcaggcagaagtcattgaactttccgaatatctggcttattgtgattactataaggatgaggaagagagtgctgccgagaaattccggaaagtagctgaaatgcacgagtcgttgaatggcagactgtctggtggagtggctaaatgtttgcgtatgcagggtaaatgtctttattatatcaaacgatacgatgaagcatggatgctgatgaatcaggcgttggacattgctatacagatagacagcaaaaaacagatcgtcgcttgtcataaacagttgtattatctatgcagggaattcaagcggatgatgaatgaacgtggcgatgagcaggcgtctactttattcttccgtgagtctcttctgcatgaaatgtatttcagcgaaaaaccgcgtctggcggaactgactgtccgctacgaggcattgagatgtgatattatgcagcagtattacatgaataaagactatgataacgtgattcgtattgcaacgtctttggattttcacgatgatactgaccttaatgcttcctgtctggtatattattacaaagcacaggcttatgtgaagttggagaattatccaatggcgaaagaggctttcttcagagagtttgaactgcgaaagaaatatctgggatgggaggatgaagatacgattctggcttgtcagaacctaggggttttgcacagcttttgtaatgaacgggaagaggcgctggcttgtttccgtgaggcgtacggtcatgaagtgaaaaagaatggcgaggattctgaaatggcgcaaaagctacttcaatatatcagcgtggttgaatcataacggaggcatacttcccttttttgttaacttttacattcctgctatacggaaatcgactttatttccttacatttgcagatataaactatcaatagaaagaagaatgtctaaatatccccttttaggaatgactcttgtagagcttcaatcattgacaaaaagactgggtatgcccggctttgctgccaagcagattgcatcctggctttacgaaaagaaggtagcctcgattgatgatatgactaatttgtcattgaaacaccgggagttgctcaagcagaactatgaggtgggagcggaagctccggtagatgaaatgcgctctgtagatggtacggtgaagtatctttataaagtgggtgagaaccattttgtagagtcggtttatataccggatgatgaccgggcaacattgtgcgtgtcgtcacaagtaggttgcaagatgaactgtaagttctgtatgaccggtaaacaggggtatacagctaacctgaccgccagccagatcataaaccagattcattcgctgccggaacgggataaactgactaatgtcgtaatgatgggaatgggcgagccgctcgataacctggatgaggtattgaaagcattggaactactgaccgctacctacggttacgcatggagtccgaagcgtatcacgctttctactgtcgggctacggaaaggattgcagcgttttatcgaagaaaatgactgccaccttgccatcagccttcactctccgctgaccgttcagcgtgctgaattaatgccggcggaaaaggcgttttcaatcaccgaaatggtggaactgttaaaaaactatgattttagtaaacaacgtcgactttcgtttgaatatattgtttttaaagggctcaatgattcgcaggtctatgccaaagagttgctgaaacttcttcgcgggctggattgcagggtgaatctgattcgttttcatgccataccgggggtagacctcgagggggcggatatggatacgatgacccgttttcgtgattatctgacgtcacacggacttttcaccactatccgttcatccaggggcgaagatatttttgccgcttgcggtatgctgtcgacagcgaaacaggagaaaaataatgaaagttaatatataaaaccgaacatcatgaaaaagtactcttttattttatgcatcgctttggtagcctttgtcgttgcatcttgtggtctgaaaggaaatcacacctctagtggtcgtgcttacgagcttttggttgtagtagatcacggtgtttgggatcgtgctgccggaagggctttacatgatgcgctcgatgctgatatgcccggtttgccgcagtcggaaccttctttccggattatgtatacttcgccgaaagattatgattctacgctgaagttgatacgtaacattattattgtagatatacaggatatatatacgaaagcctcgttcaaatatgcgaaggacgtgtatgccaatccgcagatgatattgactatccaggctccgaacgaagaagagtttgagaagtttgtggaagagaacaaaaagacgattgtcgacttctttacccgtgcggagatgaaccgtcagattacgttcctggaagggaaacacagtaatttcatttcgcagaaagtggacagtttgttcggatgcgacatctgggtggatgccgaactggctaattcaaagaccggggatgatttcttctgggcttctaccaacacaggtactgccgaccgtaactttgtgatgtactcttatccgtacactgacaaggatacgtttaccaaagaatattttgtgcacaaacgtgactccgtgatgaaagccaatattcccggattcaaggagggcgtttatatgtcgaccgatagtttgctgaccgatgtccgtccgatcaatgtgcagaacagctacacaatggaagcacgtggtctgtggcgtatgaagggcgactttatgggtggtccgtatgtctctcacactcgtctggacgagaaaaaccaacgaattattacagcagaaatatttgtttattcacctgataaaatgaaacgcaacctggtacgccagatggaagcatctctgtatacactgaaacttccgaatgaagttcagcagaatcagattccattgggagaggcatctaaggaagcggaacaaactaataaataaaaacatggaagataacaagataaggataggtatcacccaaggagatattaatggggtgggctatgaggtgattcttaagacattttccgaccctacaatgttggaactatgtactccgatcatttatggctcaccgaaagtagcggcttatcatcgcaaagcgctggatatacaggccaattttagcattgtcaactctgctaccgaagcggggtacaaccgtttgagcgtggtgaactgtacggatgatgaggtgaaagtggaattttccaaacccgaccccgaagccggtaaagctgcgctgggggccttggaacgtgccatcgaagaatatcgcgaagggttgatagatgttatcgtaacggctccgatcaacaaacatacgattcagtcggaagagttctccttccccggacatacggaatatatcgaagaacgtctgggcaatggtgataagtcattgatgattttgatgaagaatgacttccgggtggctttggttacgacacatatccctgtcagagagatcgcgactacgattaccaaagaactgattcaggagaaactgatgatattccatcgttgtctgaaacaggatttcggtatcggcgctccgcgtattgcggtgctctctctcaatcctcatgccggagacggtggtctgttgggaatggaagagcaggaagtgattatccctgccatgaaagaaatggaagaaaaaggaatcctttgctacggtccttatgcggccgacggctttatgggttcgggcaattatactcattttgacggtatcctggcgatgtatcacgatcaggggctggctccgttcaaggccttggctatggaagacggggtgaactatacggcaggcctgccggtagtacgtacttctccggctcatggaacggcatacgatattgcaggcaagggagtggcttgtgaagattctttccgtcaggcaatctatgttgccatcgatgtgttccgtaatcgtcagcgggaaaaagtggctcgtgccaatccgttgcgtaaacagtattacgagaaacgtgacgatagtgataaactgaagctggatacagtagacgaagattaaaaacgagtgatgacgagagcagagatacaacaagtgaaacagcgtttcggtattattggaaataccgaagcattgtcgcgcgccatagatgttgccattcaggtagctcctaccgatttgtctgtgctgattaccggagaaagtggagtcggaaaagaaagttttccgcagattattcatcaatatagccggaggaagcatggacagtatattgctgtcaactgtggtgctattccggagggcacgattgattccgaactgttcgggcatgagaagggtgcgtttaccggtgcgattggcgaacggaaagggtactttggcgaagccgacggtggtactattttccttgatgaagtaggggagttgccgatgcctacccaggcgcgtttgctccgtgtgttggagagtggcgagtttataaaagtaggttcgtccaaagtgcaaaagacggatgttcgtattgtggcagctaccaatgtcaatctgacacaagcgattgcagaaggacgtttccgtgaagatttatattaccggttgaatacggtgcctatccaaataccgcctttgcgtgaacgtggtgacgatgtacttttgttgttccgtaagttttccgcagactttgcagagaaataccggatgcctgctattcagttgacggaggatgcgaagaaagagttgttggcttacccgtggcccggaaacgtgcgtcagttgaagaacatcaccgagcaaatatctatcattgaaaccaatagggagatctctgctgctatcttgcagaattatcttcccgcacaaaatacgcaacgtcttcccgcgttgatgggaacgcgtgagagtaaaggctttgagagcgaacgggagattctttattccgttctgttcgatatgcgccaggaagtggcggagctgaagaagatggtgcacaacctgatggcggaacgtgccggacaggtggggcaggtaggacaaatgggaacggtggttactactccggtagtgacggcgcatcaaccttcggtacctgctatcattcacaccatgcagcccacggtttgcaaggatgacgatgacatacaagacacggaagaatatgtagaagaatctcctttgtcactggatgaagtggagaaagaaatgatacgcaaagcacttgagagacatcatggaaagcggaagagtgcggccaaggacttgaatatttccgagcgtacactttatagaaaaataaaagaatatgaattggattaagaaaataatacgccctttgttactgttcggcttgccgttggtagtcattgcgtgcactgtttcctataagtttaacggatcgtctatcaattatgataaggtaaagaccatttcgatagccgacttcccgatcaagtcggagtatgtgtatgctccgttggcaaccaagtttaatgaggacctgaaagatatcttcatccggcagacccgtctgcaactgctcaagccgaatcagaatgccgacttgcagattgacggagaaatcacaggatacaatcagtacaaccaggcagtatctgccgacggttattcttcggagacgaagttgactattaccgtcaatgtacgttttgtcaacaacaccaatcatgccgaagactttgaacaacagttttctgcgttccgtacctacgactctagccagttgctgactgccgtacaggacggattgattgctgaaatgtctaaagagatcaccgaccaaatttttaatgcaactgtagcaaactggtaatataaatgacttctgttaactttcaacaatggattcagcatcccgagacgctgaatagggatactttgtacgaactgcgcaatcttcttgcgaggtatccgtattttcagtcacttcgtctgctgtatctgaagaatctgtatattctccatgatattagtttcggtggagaactgcggaaagcagttctttacattgcagacagacggcagttgttccggttgattgaaggtgaccgctatgatgtgcaggcacggaaaaagggagtacctctcacggaggtgttgaaagacgaaccgtccgtagaccgcacattagcattgattgacgctttcttgtccacagtacccgaagaggtgactgcccgcaccagcttcgactattcgatggattacacctcttatcttttggaggagactccggccacggaacagccggccgaagaaacgcccaaactcaaaggctacgaactgattgacgactttatagaaaagagcgagagcgactctcccctctgcaagaaacctttaagagaagaaatgccatcttcgccaacctcttcggacgaacttaccgaagaagaaacgatgaaggaagaagaggaagatgacagctgttttacggaaactttggcaaaaatctatgttaaacagcaacgatattcaaaagctcttgaaataattaaaaaattaagcttgaaatatccaaaaaaaaatgcttactttgcagaccaaatcagatttttggagaaattgattattaacgctaattcaaaataactaaaaatgtacttattattcgttatcttaatggttattgcagccttgttgatgtgtttcatcgtgctgattcagaactcaaaaggaggcggacttgcttctggtttctcttcatctaacgccatcatgggcgtgcgcaagactacagattttctggaaaaagcaacatggggcttagctatcttcatggtggtaatgagcattgctactgcttatgtagttcctcgctctgctgttgctaaagacgcagtgttggaacaggcacagaaagaacaacagactaacccgtataacttacccgcaggtacggctgcgccgcaaactgaagctcctgctaccaatgcacctgctacagaaactccggcaccggctgctgaaactcctgctcctgcagcagagtaattcactctgtcgtcaggtaagactttggggtaaaaccattaatgggaaggtgcagacggatgctgcatttctttgatatttaagtgcggattacgcagattacacggattttcaatcttccgcgtggtcagtgtaatccgcacttaactttttcttgtaaaaacaatctctttttgatagaaacaaacgagatttaactacctttgttggtcgtatgaagattattaactactatttttaaatataacaatgacagaacatttgaaacagaaattgaatgactccgccgtactccgatggagtgttctagcattagtcgcatttactatgctatgcggctatttcctcaccgacgtaatgtctcctctaaaacccatgcttgagaaagaactactatgggacagtctggattatggtttcttcacaagcgcttacgggtggtttaatgtattcctgttgatgctgatcttcggtggtatcattttggataagatgggagttcgtttcaccggaatgggggcttgcttattgatggtgtttggttgtggattgaaatactatgcgatttctactacttttccggaaggtgccatgctcttcggattcaaaacacaggtaaccctggctgcattggggtatgctatcttcggtgtaggtgtggaaattgccggtatcacagtttccaagattatcgtaaaatggttcaagggtaaggaaatggcattggctatgggacttgaaatggctacggcacgtatcggaacaactctggcaatggtgcttacggttcctttggccgactttttcggatctacggatgagagtggcacattccataccaatattcctgctccgattttgttttgtctgattatgttgtgcgtgggtacgattgctttcttcctttatactttctatgataagaagttggatgcttctttggatgcagagggattggagccggaagagccgttccgtatgaaagatattgtgtatatcattaccaataaaggattctggttgattgcattactatgtgtattgttctactcggctgtattcccctttatcaagtatgctgccgacttgatggtgcagaagtataatgtagatccgaagttggcgggaacgattcccggattgttgccgattggtgcgattatcctgactccgttgttcggctcgctttatgaccgtatcggtaagggagctacgttgatgataatcggatcagtgatgcttatttttgtgcatacgatgttcgctctgcctatactgaatatatggtggtttgctactatcatcatgattatattgggatttgccttctcgttggtgccttcagctatgtggccgtctgttccgaagattattccggaaaaacagttgggtacagcatacgcattgattttctgggtacagaactggggattgatgggtgttcctttgttgatcggatgggtgttgaatacttattgcaaaggtccggtagtagacggtgcacagacttatgactacacgttgccgatgactatttttgctctctttggtgtacttgctctgattgtggctttgatgttgaaggcagagaacaagaagaagggatacggtctggaagaggcgaatatccaaaagtaactaggaaattcaatacctaaagtaacaaaggaattttgtatcaaggtgtaaacagaagagtagcagtatgaatactctgaaataaaaaataagaagtatggctgccaaagagaaaatcaacctgttagaggtcattccctgtcgcagtgaacatattacagcagaaagggaaggggagacaattgtgctctcctttccccgttttaaatatccgtggatgcaacgcttccttgtgccgaaaggaatgtcgaaagaacttcatgtgaaattggaagaacacggtacggctgtatgggaactgatagatggaaaacgcaatgttcgtgagattatagaaaaactcgcagaccactttcaaaatgaagagggctacgagtcgcgtatatcggcttatctttctcaaatgcagaaagatggatttataaaactggtgataccagtcgcataaataggaatttatatttcaccacagaggacacg

SEQ ID NO: 8154 - DNA, 17884 bp, Unknown
  gut microbiota DNA sequence
agcgcacttctactttagcttgttcggcacatgtccgccagttttttccatccatcgatttttctaaccgccacgtatgtccttcagtagggcgggtaaagtaaaactgacattcgttgacattgcgaatcccttttaaatccaccgtaatgaatgaactgctatccgtatcggctgccatccaacgagttccattcgattcatcggctacatgagcagcctgataagtatgcgttcgagtataattcttcacggaggctttctccggtagaggctggttaggctgtgtttcaatgctaaccacagaagtgcgcggttctttctcgctggaagcataaaaatgtgactgcaaagacaaattcgtccgtttctcttgtggagctgccaagtaccccactccacgcttatcgggaactaaagtcttaattgttccgtcatcattaaattccatccagttggcatatatctgccgggtggttccaccatctccgtattcgagataaagaaagatatactcatctgttctttcatcgtaaaatacattgccatgccccggtccccacacttgattttcgggagaagaaaacaaaaagatatcgttgccctccggtttcacaaaacctgtaagaggagattcgcggctcatcatgtatgcatttgcataattctgatgaccgctcaatgtataaatataataatagatacctttacgtttaaacattacgggaccctctgaatatccctgacgggctgttttcaatgtcaccggttccccatccagatgaagccggtcagcagaaagacgtgccgcattccgacgacgccaaaagatatatcccgtaccgtcatcatcaataaaaggctctccgtcgatatcattaataatggcggggctatctacttcttctccggaaacaaaaagcccttttccttcggtaaaccggaaaggaccctccggacgatctgcaacaagcacataagtccccatcttatcaccgggcttgacaaaagtgacatataaataaaactttccatcgtgttcaatcactctcccgggagcccaataccggaaatatccttttttcttttcacctttatcattcgtatattcatatcctttcgaccagtcgaaaccactaatatgagaaccctcaaagctccagtttacaaaatctttcgacttccacacaacaggtgttccggcacgttcaagaccataatccaaatcagtggttccgtagagataataggtatcaccaaacttagaaacggaaggatccgccacattatcggggattaaaggattataagtacgattggctatcaatgcctccaccacggaagcatctaccgcaaacgccgttccatgacggatgcctctcggaaaagaaacttgatcggacacgtcttcccatgtttcgccatgatctaaagagcgaacggcaccataacgatgatcgcggtatttatcgaaataaacataaagcgtatcaccgacaaaaagaggagcaggtccttccgcccaatactttcctgtaataggcgccgatactttggtcggaaatcctttttcgaccttttttgtacgcgtaacgcgcaaattcttttccggcggattggagttttcattcttgactatcattatcaggtctcccagcttcggatctttcacaatagcagcgtcaatcacactgaaatcagggttgaaaaacatctttgtctttgagaaagtgcggaaatcctttgttgtcgcataataaatacgatgattcaatcccttctcgctttcgctggtaggtatttccttgtgacgaccggggatggtagttgcccaaaagatatagtaagtttgcgaaggttcgtcataaaagagttcaggtgcccaacaattatgggcagtcggctcgtgcatcatcaccggaatagcctgttgttcactccaatgaattaaatcacgagaagaagcatggccgataatccgatcagtccaactggaagtccagaccatgtggaaagttccgtccggagcctggcaaatactcggatctcgcattaatttatctttaccaacggaaggtgtcagataagaccgtccgccattcaaaggcatccagttcaacccgtcataactataagctaaatgcaatccatctttactgtcattgatgaaataagaaaagagataagcagtcttaccggcgaagattgtcattaccgagcaaagacttagagccatccaaacaactacttttttcatggttccttttaagattaaaaagtttaccccgcaaagataaggtatctcccaacctcctcaaagataaagagcatggacaatatttcaaatccatgtagttttgtacaccatccgtcctataagtgcattttgatacaatattctatgtatctgtacatctttctatttactaaacccttaaaaagctctactttagcggcagattttaaaatagagatgaaaaacatatcaattctatatatcatgaaacaacttttagtaagtattgccatcgtatttgcctctatactgaccgtaacggggcaaaatcattctttcagtttatccggcaaatggaatttccagatagaccgggaagatatcggcaccaaggaacaatggttcaaaaaaagccttgatgatcagattaatctccccggctccatgcccgaaaagctgaaaggagatgaagtaaccgcccgcacccggtggaccggaagcttgtatgacagctcttactatttcaatccatacatggagaaatacagaatagaaggacaagtgaaacttccctttttcctgactcccgacaaacattatgtaggggtagcctggtatcaaaagaaagttacaataccttccaactggaaaggagaaagaatcactcttttcctggaacgcccgcacatcgaaacgaccgtatgggtcaatcaacaggaactcggtatgcagaacagtctttgtgtccctcatgtgtatgatctgacttctgctgttactcccggcaaaacctgcctgattactatccgcatcgacaaccgcatcaaagaaatcaatgtaggtcccgactctcacagcatcaccgaccagacccaaggtaactggaacgggatcgtaggacgaatcgaattacaggccactcctaaagttcattttgaagacattcagatataccctgatttaaacaatcagaaagcactggtacgcatgaacatacagtctgcctcttccaccaaaggagatattacactttctgccgaaagtttcaatacggacactcaacacaaagtagctcctgttcagcaaagcttccatatccgtccgggagacaatgcaatagagatggaacttcctatgggaaaaaatttcctcacatgggatgagttcaatcctgcactgtataaactgacggcaaaattgaccaacggtaaacagtccgacatcaaacaggtacaatttggtatgcgcgatttcaagatagaaggaaaatggttctacgtcaatggtcgcaaaacaatgcttcgcggcacagtggaaaactgtgatttcccattgaccggttatgctccaatggacgtagcttcctgggagcgggtgttccgcatttgccgcaactatggtttgaatcacatgcgttttcattctttctgcccgccggaagctgcttttatcgcagccgatctagtcggtttctatctgcaaccggaaggtccgagttggccgaatcacggaccaagattgggtaacggtcagccaattgacaaatatctgatggacgaaacaattgccctgactaaagaatacggaaactatgcatcttactgtatgctggcttgtggtaacgaaccttccggacgctgggtagcatgggtgagcaagtttgtcgattattggaaagcgacagatccgcgtcgtgtatatacgggagcttccgtaggaaacagctggcagtggcaacctcacaatgaataccatgtgaaagccggagcacgcggtttgagttgggcaggtgcacaaccggaaagcgaatcggattatcgcgcaaggatagacaccgtgaaacaaccgtatgtatcacatgaaacaggtcaatggtgcgtattcccgaatttcaacgaaatccgcaaatataccggagtcaacaaagcgaagaactttgagattttcagggatattctgaatgataatcacatgggaggccaaagttatgattttatgatggcttcgggcaaattgcaggcactttgttataagcatgagattgaaaagacattgcgtacccccgattatgcaggtttccaattgctggctctcaacgattactcgggtcagggaacggcattggtcggcgtactggatgtattttttgaagagaaaggatatatcaacgcggagcaattcagacgtttttgcagcccgactgtccccttagcccgtattccgaagtttgtatatgccaatgatgaaacattccatgccgacatcgaagtttctcactttggtgcagcccctctgcaaggagcaaaaactagctataccatcaaagacaagttcggaaaggtgtatgccaaaggaactgtcggcacacaaacgattcctattggaaacctttgtgcactaggcagcgtggatatgaatctgaaagggatcgatactccgcagaaactaaatctggaagtatgtattgaaggcagcgatgccgtcaatgactgggatttctgggtatatcctgcacaagtggaactgacacagggaagtgtatatactaccgacacactggatgaaaaagccgtttccgtactgaaagaagggggaaatgtcttgattacggcagccggcaaaatacaatacggaaaagaagttaaacaatactttactccggtattctggaatacttcctggttcaagatgcgcccgccgcacacaactggtattttcctgaatgaatatcatcctcttttccgtgaatttcctacggaatttcatagtaacctgcaatggtgggaattattaaataaagcccaggtgatgcaatttaccgactttccggcagaattccagccaaccgttcaaagcatcgacacctggttcatcagccggaaaatcggaatgttgtttgaagcaaacgtattgaacggtaaactgatgatgaccagtatggatatcacttctcaaccggagaaacgaatcgttgcccgacaaatgcataaggcaatcctggattatatgaattcagacgctttccgcccgtcagcaaccattgccccggaactgatacaagcattgttcaccaaagtggcaggagatgtaaaatcttataccaaagattcgccggacgagctcaaaccgaaaattaactaaatgggaaattatcaggcacggattacataaaccaatatacattcatattatttataatgaaaactactatcataggcttactactcttggctacaataaccgtcaatgcccaagaaaaagtccgaacctaccaactgtcggacgcaccccgatatagcgaggagacgagatacggatacgacctcaccgccacacccgagaaagggagtaaatcacctttcttcttctctgtccgtgttccggacgggaattacaaagttacagtacgcctgggaagtaaaaaacaggcaggagtgaccaccgtaagaggtgagtcacgccggctatttgttgagaacctgccaactaaaaaaggacaattcgtagacgaaacatttatcatcaataaacgtacccctcgtatctccgaaaaagaatatgtacgaatcaagccccgtgagaaagcgaaactgaactgggatgataaactgacattggaatttaatggagatgcacctgtgtgccaaagtatccgtatcgagcctgccaatccgtcagtcatcactgtttttctgtgcggaaacagtacggtagtcgatcaggacaacgaaccttgggctagctggggacaaatgatccctcacttcttcggaacagatgtttgcatcgccaattatgcggaatccggtgaatcggccaatacttttatcggagcaggacgtttgaaaaaagcattgagccagatgaagaaaggcgattatctcttcatggagttcggacataacgatcagaagcagaaaggtcccggaaaaggagcttactactcttttatgaccagcctgaaaacattcatcgacgaagcacgagcacgtggagcatatcccgtactggttactcccacccaacgccggagctttgactcaaccggacatatccgcgatacacacgaagattatccggaggccatgcgctggctggccgccaaagaaaatatacctttgattgacctcaacgaaatgactcggacactatatgaagcgttaggcacggaaacatccaaacgcgccttcgtacactatccggcaggaacttatcccggacagaccaaggcttttgaagacaatacccactttaacccttacggcgcttaccagatagcccagtgtgtgattgaaggtatgaagaaagccgtacccgagttagccaaacacttaaaaatagacccggcatataacccggcacacccggatgatgtgaatactttccactggaacgaatcacctttcacagaaatagagaaaccggacggaaattaagagataagtattaggtatcaagtattaagtatcaggcattagataaatatgaaaaccaaaagcatctttcccctgttcctattggcaggcacacttttgacagcagcttgcgtcaccccaacggccaaacaggcaggaagcaacagcttcgaatgggggcaagtaccgcaacaaccggatttgtcatgggctgacagtgtaggaagccggcaaatgcccggaaacaatcttattttatccgccaattcttttggcgcagtagcagacagcacggtgcttagcacagaggctatccagaaagcaatcgacagttgttccgtctccggtggaggcacggtcacccttcaaccgggatattatcagacaggggcattgttcgtaaaaagcggtgtcaacctgcaactggataaaggagtgactctactggctagtcctcacattcatcattatcccgaattccgctcgcgaattgcaggtattgagatgacatggcccgcggcagtaatcaacattgtcaatgaaaagaatgctgccgtcagtggagagggaacgctggattgccgaggcaaagtattttgggataaatattgggaaatgcggaaagaatatgaagcgaaaggattacgctggattgtagattacgactgcaaacgtgtacggggtattctcgtggaacgcagttcggacattaccctcaaaggattcaccctgatgcggacaggcttttggggatgccaggttctttattccaattactgtaccatagacggactggtcattaataataacttgggaggacacggtcccagcacagatggcatcgacatcgactcgtctactaatattctgattgaaaactgcgacgtcgattgcaatgatgataatatttgtatcaaatcgggacgcgacgcagacggattgcgtgtcaatctccccacggaaaatatagtaatacgcaactgtatagcccgcaaaggcgcaggcctcatcacctgtggcagtgaaacctccggcagtatacgaaatatattgggatacaatcttcaagcagtcggcacctcggctgtactacggttaaagagtgccatgaaccgcggaggaacgatcgaaaacatctatatgaccgacgtaaaagcagaaaacgtccgccacgtactggctgcggatctaaactggaatcccagttatagttacagcgtattacctaaagagtatgaagggaaagatattccggaacattggagagtaatgctgactccggtaacaccacccgaaaaaggttatccgcacttccgcaatgtgtatgtatcgaaaatcaaagcagaaaatgtagatgaatttatctctgcttccggctggaatgactcgttacgtctggaaaatttctatctttatgccatcgaagcgcagaccaataaaccgggaaaaatctgctatacaaaaaacttcaatttgtctgaaataacattggatatgaaagacaaaaacgctattgaactaaaggaaaatgaacaaagtaatatccacttcaactatgctgaaacaactcctgaccaccgtactgctgggaatcttgctcattgatgcgcaagcacaatccctgactccgcctgccggtactttccggctgggaatatcgaagggaaatgaaagtcactggctgaagcctaaagaaaaagtagaagggatccatttccaatggaaagccctgcccgatagtcatggatttattctggaagtagaagtgacttccacatcaaaggcggataagctcttttggagcttcggcgattgccagccggattcggatatcaatgtcttcagtgtggaaggacaagctttcacttgctattatggagaaagtatgaaattacgtactttacaggctgtcactcccagcgatgatattcgcttgagcaacggacataaagatgaaactcccctgatgctttacgaatcgggcaaacggaccgaccgaccggtattggccggacgttgcaatctctctccacccccctctcaagaaaagtacaccaagccactccgactttacttctgcttctacgaacagaatgaaaaagcggattacaactattatatgttaccggatatttttgccaaaatcgacaaaaaatgaaaagagcttatttattattcactctgttaattggttgcatccatatacatgcagccatttataacgttaaggactttggagccaaagcggatggaaaaaccatcgattctcctgctatcaatcgtgcgattgaagcagctgcagaagcgggaggaggtacggtttacctaccagccggagaatatgcctgttattctatccggttaaaaagtaacattcatttgtatctggagcaaggtacgtgtattcttgccgctttccccgaaaaagaggaaggatacgatagtgccgaaccgaatgaacataacaaatatcaggatttcggacacagccattggaagaattccttaatttggggaatcgggctggagaacataacgatcagtgggcccggacttatctacggtaaagggctgactcgcgaagaaagccgtctgccgggtgtaggcaataaagctatcagcttgaaggagtgtagaaatgtgactctgaaagatttatccatgctacattgcggacattttgccctgttggctacaggagtagatcatctgactattctgaatctgaaagtagatacaaaccgggatggattcgatattgattgttgccggaatgtgcgtatcagccagtgcacggtgaactcgccctgggatgatgccattgtattgaaagcatcctacggtttaggacgctttcaggatacggaaaatgtgacgatcagtgattgttatgtaagtggttatgataaaggaagtgtattggatggcacctggcaactggacgaaccgcaagcccccgatcatggttaccgcaccggacgcatcaaactgggaacagaaagcagcggaggtttccgcaatattgcgattactaattgtatctttgaacattgcaggggactggcattggaaacggtagacggaggacatctggaagatattgttatcaacaatataacgatgaggaatattgtcaacgctcctatctttctccggttaggcgcacgtatgcgtagccccgaaggtacgcctgtaggcaccatgaaacgtattctcatcagcaacatcaacgtttggaatgccgacagccgttatgcctccatcatcagcggagtgccgggtgcatgtattgaggacgtcacttttcggaatattcacctctattataaaggaggatatagcgaagaggatggcaaacgtattccgcccgaacaggagaaagtatatcccgagccctggatgttcggcactattcccgctaaagggttttatatccgccatgcacggaatattaccttcgacggcatccgcttccactttgaacaaccggacggacgaccgctttttgtaactgatgacgcagaaaacatagaatactataatacaccgaaagaataatgaataaaagacaattgatagttctttgcctgctcgccgcaggtggagtaatgcaagcacaacaatggccgaacactccggtggaaacacgtcccggtgccagatggtggtggctgggaagtgccgtagacgaaaagaatctgacgtataatctggaagaatacgcacgcaccggaatgggagcagtagaaattactcctatctatggggtgcaaggcaatgacgcgaatgaaattcagtttctttctccccgctggatggaaatgcttaaacatacacaggcggaaggaaaacgtacgggtatcgagattgatatgaatactggaacaggatggccttttggcggacctgaagtcagtatcgaagatgcggctaccaaggctatcttccagacatacgaaatagagggcggcaaagagattgaacaggatatcaatgtgaccgatcccaaacaacaaccattttccgtactaagccgggtgatggcatacgatgaaaaaggcaaatgtatcaacctgactgctcacgtcaaaaaagacaaactgcaatggaaagcgcctgccggcaaatggaaagtgatcgctctttacatcggaaaaacaaggcagaaagtgaaacgggcagctccgggaggagaaggctatgtgatgaatcacctctcaaaaaaggcggtaaaaaattatctttcccgctttgaccgtgctttcaaaagtagcaagacaagttatccgcatactttcttcaacgattcatacgaggtttatcaagctgactggacggatgatttcctggaacagttcgctcgtagacgggggtataaactggaagaacatttctccgagtttctggatgaaaatcgtccggaagttagcagacgtatcgtgtcggattaccgggaaaccatttccgacctcttattggagaacttcagtcatcaatggacagactgggcacacaaaaacggtagtatcacccgtaatcaagcacacggttcgcccggcaatttgattgatatctatgcttccgtggatattcccgaatgtgaaggttttggactgtcgcagttccatatcgaaggattgcgtcaggacacattgaccaaaaagaatgattcggacctgtctatgctgaaatatgcctcctcggcagctcatattgcaggaaaaacgtatacttcttccgagacatttacatggctgacggagcatttccgtacttccctatcgcaatgtaaaccggatatggatttgatgtttgtttccggagtcaatcacatgtttttccacggtactccttattctccgaaagaagccgaatggcccggatggctgttctatgcttctatcaatatgagcccgacgaacagtatttggcgtgatgctccttctttcttccattacattacccgctgtcagagttttctgcaaatgggacggccggataatgatttcctgatttatcttccggtatatgacatgtggaacgagcaaccgggacgattgttactgttcaccatccaccacatggataaactcgctcccaaatttatcaatgctatccatcgtattaataacagcggatatgacggggattatatctctgacaactttattcgcagtacccgtttcaagaacggccagttagttacatcaggcggcactggttataaagccctggtagtacctgctgcgcacttgatgccgagtgatgtgctggcacatctttatgaactagccaagcaaggagctaccattgtattcctcgaaaactatccgacagatgtaccgggatatggtcagctggaacagaaacgaaaaagttatcaacagactttgaagaatctgcctgccgtatcgttttcagaaacaaccgttactccgattgggaaaggtaagattatcaccggaacggattatgcacgtacattagccagttgcaatatccctgcggaagaaatgaaaacaaaattcgggttacagaccattcgaagagttaatgacacaggacatcattacttcatctcttcattgcagaacaaaggagtagatggttggattactttaggtacaaatgccgaaacagccgctctctttaaccccatgaacggagaatgtggagaagcgaaagtgcgtcaggtagacggaaagacacaagtctatctgcaattaaaatcgggcgaatctatcatcctgcaaacgtaccgacaacctttacaagcatccaagccgtggaaatatgtaaaagaacaaccctttagtcttcgcctggaccatggctggaaattgcactttgctgaaagcacaccggatattcagggtacatttgatatagaccgtccatgttcatggacaaacatagatcatccggcagcccaaacaaatatgggaactggcgtgtattctttggatattgagttgccggctctgaaagctgataactggatccttgacttgggagacgtacgcgaaagtgcccgtgttcgaatcaacggacaggaagcaggctgtgtatgggcagtaccttatcagcttaaggtaggacaattcctgaaacctggaaaaaaccacatcgagatagaagtcactaacctccctgcgaatcggattgcagaattggacagacagggagtgcagtggcgcaaattcaaggaaatcaatattgtagatttaagatatcgtccggctaattatgggcattgggctcctatgccttccggtttgaatagtgaagtacgattgattccagtagattttacacaggtcaccacagaggacacaaaggacgcagaggtgaaaacggtccggatataaactaaacagatggatcttctactttattagtgaaagataatttctttcactaataacttttatatctttctttctaaaaaaagtgatcggacttgcattccagttttcgtttgacttaagttaagcgatagtttgacttaagttattctatcgtttgacttaagtcaaacgaaaactcattagggaatgaaaaagatattgtcttcaaagaaaacaattaaatatagtatagcgacagattatttcttgccagtgctactttaaatttcttacagcctgttcaagttgtttcaatgcctgttccagcacagcacgcggacaagcgatattcagccgcataaatccttcgccttctttgccaaacgttgttccgtcattcaatgcaagatgtgcatcttctacgaaaaggcggttcagctggtcctgattgagtcccaactcacgacaatccaggaaaataagataagaggcttgcggacgaatcattttaatggcgggaatatgctccttcaaataagtttccgtgaagtctacatttcctttaatatagcctaccacttgatccagccattctgttccatgactgtaagcagccgctacgctaagataagcaaacagatgcccttcactgaattcacttgcttccatatacttctggaaacggtgacgaagttcatcattttcaatgattgcataagaactggccagccccggcatattgaacgctttgctcggagacataaagacaagtgaattcatccgtgctttttccgaaatcaaagcaaaagtaggatgtttataaggaggtaaggtcaagtcggcatgaatttcgtcagagatcaccagagtaccgctttcataacagatatcagctatttgagaaagttcctctttcgtccatacgcgtccacccggattatgaggattacttaaaatcagcaatttgcatccttgcacatcttggcgaaaacggtcaaaatcaatataatattgttcatctttcaataccaacggactgtataccacttcacgctcattcttctgcgttaccaaaaagaaaggatgataaacaggaggcatgaccattactttatcacctttttgcgtaaaacattgaataacaaaagccaatccgcggacaataccgggagtgaaagtcaacatctcttcacggatcgtccagccatgacgctctttcacccaattaacaatagactccgaccattctttgcaagcaaaagtatatccgagcacttcatgttccagccgttttctcaaagcctctattacaaaaggagccgtacggaaatccatatcagctacccacattggaatcaagtcattgcgtccccaacggctttctacagcatcccattttacggaatctgtaccgttacggtttattatttcatcaaaattatagttcatacagcatgatgtttttatgttatgtgagacaaaagtagtacatttgtactcaattcaaaaaggaatttatgacgaaagctttattttttgatatagacggaacgctggtcagttttaaaactcaccgtataccgtcttccaccatcgaggcgttggaagctgcccacgcaaaagggctgaagatatttatcgctaccggacgcccgaaagccattatcaacaacctttccgaattacaggaccggaaccttatcgatggatatataaccatgaacggagcctattgttttgtcggtgaacaggttatttataaaagtgccataccacaggaagaagtgaaagcaatggcagctttttgcgagaagaaaggtgttccctgcattttcgtagaggaacatcatatttctgtctgccaacctgatgatatggtgaaaaagatattctacgattttctgcatgtgaatgtaattcctactgtatcttttgaagaagcaacaagcaaggaaattatacagatgactccttttatcacagaggaagaagaaaaagaaatccgaccgtccatccctacctgcgaaatcggacgctggtatcctgcctttgctgacgtcacggctaaaggagataccaagcaaaaagggattgatgaaataatccgttacttcgatattaaactggaagaaacgatgtcattcggagacggaggaaacgacatcagtatgcttcgccacgcagccatcggagttgctatgggacaggctaaggaagacgtgaaagccgctgccgattacgttacggctcccattgacgaggacggaataagtaaggcaatgaaacatttcagaattatttaataatgtgccgatttaccaatgcgccaaaaaaactattatcccgcgatttcatgacacaacgtattggcaaattaacacatcaacaaatttgcatattattatattatgagcgtagacactaacaacgccgagtttcaagatgcactggatctgattcaatatacccgtcaatcggtttttctgacaggaaaagccggtacgggaaaatctacattcctgcgttatgtctgcgagcataccaagaaaaagcatgttgtacttgcaccgaccggaattgccgcaatcaatgccggtggaagtaccatgcacagcttcttcaaactacctttttatccgttattgccggatgatcctaatttaagtctccaacgtggccgtattcacgagttcttcaaatacaccaagccacatcgtaagttgctggaacaaatagaactggtcattatcgacgaaatctctatggtacgggcagacatcatcgatgccatcgaccgtattttacgagtttattcacataatcttcgcgaacctttcggtggaaaacaactcttattggtaggagacgtcttccaactggaacccgttgtaaagaacgatgagcgggaaattttgaaccgcttctatcccactccctactttttctctgccagagtgttcggacaaatagacctcgtctctatcgaacttcaaaaagtatatcgacagacggaccctgtattcgtcagtgtcctcgaccatatccgcaccaatacagccggagccgcagacctgcaactgctcaacacccgctacggaagccagattgaagaatctgaagcggatatgtacatcacactcgccacccgaagagatacagtcgactccattaatgagaagaaattagcagaactccccggagaacccattacttttgaaggggttatcgaaggagattttccggaaagcagtctgcctacttcacaagagcttgtactcaaacccggtgcacaaatcatcttcatcaagaatgatttcgatcgtaggtgggtaaacggtacgattggtgtcattgccggaattgatgaggaagaagaaacgatctacgtcatcaccgacgatggaaaagaatgtgacgtaaaactggaatcatggcgaaatatccgctaccactacaacgaaaaaacaaaagaaatagaagaagaagtattaggcagcttcactcaataccctatccggttagcatgggccatcactgtccataaaagtcagggactgaccttcagccgtgtagtcatcgacttcaccggcggtgtatttgccggaggacaagcatacgtagcacttagccgttgtacctcactggacggcatccaactcaaaaagcctgtcaaccgtgccgatgtcttcgtccgccccgaaatcgtcaactttgccggacgcttcaacaaccgccaagccatcgacaaagccctgaaacaagcacaagccgatgtacaatatgccgctgcctcacgtgccttcgacaaaggggatatggaagaatgtctggaacagtttttccgtgccatccattcacgctacgatattgagaaacctgttccccgtcgtttgatccgccgtaaactcggcattatcaatacactgaaagaacagaacaagaagctcaaagaacagatgcgcgaacaacaggaacgtatacgacaatacgcccacgagtacctgttaatgggaaacgaatgtatcacccaagcccacgacgtacgtgccgccctcgccaactacgacaaagcccttagcctcgaccccaactacatagatgcctggataagaaaaggaatcacactcttcaacaacaaagagtacttcgacgctgaaaactgtttcaacaccgcagtcagcctccatcctgcaaactttaaagcagtctataaccgtggaaagctccgactaaaaacagaaaacacagaaggcgccatcgccgacctggacaaagccaccagcctgaaacccgaacacgccggcgcacacgaacttttcggagatgccttgttaaaagccggaaaagaagtggaagctgcgttacaatggagaattgcagaggaactgaaaaaaaagaagaagtaataaatctacataaaagaagaagaagacggaaaccgtccgttttcttcctcaccgaccaacaccccgttcctcaccgaggaaagacctgttcctcaccgagaaagagagcattgctcaccgaggaacggatcccccacctacaaccccttgtagaaccattgtctcctttggcgaatcatacacaaatatatttacagactagattcggatcaatccaaaaaaaagattactttataggcaattctcaaattctgtataacctatagatctgtggtaaattctttttcatccatcacggtacaggttattagttaaatgaaaatttagcggttaaatgaaaatttagcggttaaatgggaatttagcggttaaatgggaattttgcagttaggctgaaagccttacaattatatatttattggggtgccctgaaagggcttaattatatagcgtagggcaacgccctacgaaaaagacaca

SEQ ID NO: 8155 - DNA, 10376 bp, Unknown
  gut microbiota DNA sequence
cccagtacaaagaatatattgaagaggttactaccgatcacattcccaatggcaatttccggattcttctttaatgcggcaacgatagacgtagccagttcaggaagagaagtacctcctgcaactagtgtcagtccgataatcgattcgctgacacccaggttgcgggcgatgcccgtagcgccgtcaacaaacaactgacctccaaaaataagggcagccaagcctccgatgatataaagaatggatttccaccaggggagtgatttgatttctgtctcctcttctatggtcggaggtgctatctgtcccgcctgttccgttgtgcccggcttggaggcgatggcaaaggtgtaacccatgaagatgacaaagaaacaaagtaataataagccgtctactctgttcaggatattctccggagctttatccagaaatacatcattggcacaaatcagcaagacaatagaagaaagtatgcatagcggtatctcttttctaagtgtattgcgggtgatgacaatcggggcgaataaggccgtgcagcccacaatcatcaacgtattgaaaatgttacttcccaccacgttgcctatggcaatatccgcgcttcctttgagggcagaagatacactgaccgtcagttccggggcagaagtgccgaatgcaacgatggtaagtccgatcacgatgggagggatgcgaaaacgcttggctaccgaggcggcaccgtctgttaatccgttagctcctagaagaatgaggattaatcccccgataagtaataatatattcatgcttttttctcttttagtggcaaagataatcaatttggaaatggtaatgtcaaaaacaatccgtatgtttgctctgtttttaatgaaatgttagattaaccttaattataatcaaggaatataaggtatggaaataaataaaataaaacggtcgttactggtgttgttcttttctttcctggcaatcggggcgcaagcacagttggaacaggcggttaagaagatatttgccggagatacaataacgggcggacatgttcctttgaagcgggattcggactctatccatctggtaaatatgcagaaatcattggaagaagcccggctcaatgaggcgaatatgaggatggaaatggagcagatgaaactccagatggctaccgccgactccgtaaaatatgcacagcaacgacagcgtatcgactccctgcggcagttcacaaaaggaataccggtagtggcggacggtgataccttattttaccttttcaccaaacggggtggatatactccccagcaacgtgcccaaatgaccggtgcggcaattgaagaaataggaagacgcttcaatctacaacccgattctgtggctatcgaccattcggacatagtttccgatttgatgtacggcagcaaagtattgctttctcttaccgatcaggatgccttatgggaaggagtttcccgtgattcgctagctaaggaaagacagcagagtgtcattaccaaactgcatgagatgaaagccgagcacggactttggcgaatggcaaagcgtgtgctctattttgtgttggtaattacaggacagtatttcctgttccgcttgaccaactggttgttccgtaaactgaaagcgcgtatcctgcgcctgaaagacacgaagataaaaccggtagccatccagggatatgaattgctggatgcgcagaaacaggcgaatctgttagtattcctgtccagtatcgggcggtatatactgatgggattgcagctactgtttaccgtaccgttgatttttatcatcttcccgcagacagaaggactggcatatcaactgttgggctatatatggaatccgattcgcggtatctttgtgggtattatcgattatgtgcccaaactgtttaccatcatcgtcatctggtatgccgtgaagtatttggtacgtctcgtcttgtatctggcacgtgaagtggaagcaggacgactcaaaatcaacggcttctatccggactgggcgatgccgactttccatatcgcccgtttcctgctctatgcatttatgattgcgatgatttatccttatcttccgggctccgattccggtgtgttccaagggatttcggtatttgtcggattgatcgtttcgctcggatcaagtacggttatcggtaatattattgccggactggtgattacttatatgcgtccgttcaagatgggcgaccggatcaaattgaatgataccaccggagatatcatcgaaaaaactcctcttgtcacccgcatccggactcctaaaaatgaggttgtgactgttcccaattcatttatcatgtcgtctcatacggtaaactatagtacttcggcacgcgaatatggactgattattcactcggaagtatctatcggttatgatattccctggcggcgggttaatcagatactgattgacgctgcgttgaacactcccggagtggtggatgatccgcgtccgtttgtgttggaaacttcgttgagcgactggtatccggtctatcaaattaatgcttatatcaaacaggcagataagatggcacagatttattcggatttgcatcagaacattcaggataaatttaatgaggccggcattgaaattatgtcaccgcactatatggcagttcgggatgggaatgaatcgacaattcagaaaggcgctgtgaaaaacagcggtcctgcgaagacagcggagcagggtgatgtatcggaaaaggcatagagttacgtcccgatgatgattgcgcatccggagaacactaataagatgaagtaagtagctgactattggttggctgcaaacgtatattatcccacaaaataggttcaagggtaattatataaagaagcgtccctttcatcgcgaaaggaacgcctcgggttgtgtgttttttcactgagagtagaatttatatcatcaagagaatttatttctttcgggtcaccgtataaagtatattcccttttttatctatcatacgaaggttgagctcttttttgtcgatagagcagacagagaaacccggttcggggctgcagaactttgtaccttcgataggttccactttgcgtgccagtgagccggaggagttaacgacataatcgatgtcacttcccggaacccggatatgctggaagttatggatgtgtccgcagatgtacatatctaccttgtgcttgcgtaagatggtgtcaacccgtttctgcatgtccagtcgttcgctttcctctttgggagtataagcgtagatgggatggtgtccggctacgataacccagtcttcttttgcattggcaagcacagattccagccaggatagttgcttgttgacatcctgtttgcaggcatcgggatatttatcactttcctggcggtatttctcaatcagaggagtcgtgtcaatccagacgatgcggatggtggcacctttctcttcgaatgtttgggtgtaataacgggcgggcattgtccagcggcggctgatatgggtgtaatccaatacggcttgcgtgtttccgcgatattcatggtttcccaggatagggaaccagtcgatcattagttccggatgggagtagattaattcgtagttggtcatccacaaagggtcgttcacgctgcgaactccttcgaagtgatggacatctccggtggccagaacaaattcaggaccgatctcttcgcccatcgtacccattaattcggctattggcttttggtcgtaatatccgttgcggcctaaatcattcgctacgtagaagttaaacttcttgtcaaatatagagtagtccgtcaactgtgcctgaacgaatgtacagacggagactaatgcgagaatcaataaactcttaattttcatattcatattctgttgtatattagttgtttatatatagatagttattctgaatcttttggcttgttggtttaaaaggaagagaacgtttcttttaaaccaatgctctgttccttttaaaccaacgggggcttccttttaaaggaatgaatatcgttgtttggctcgcatcagaagttcacttttacgccggcgtttatctttacaccgtagtgttcagactgcatggtacggtctttagtgccctgataataacgcaatggttggttcaataagttggtagcatctgcgtagaatgttgttttgaacttcttgccgaatgtatagcttgcgttcaggtccatatagttcacggcatcatagtaacggtctagtgcggcaacttctcccatttcgtcgataaagctggatgcaaagttgtaggagagacgtacgttaaaacctttcttttcgaagtagagtgaggcgtttgccgtatgttcgggagaaccgggtaaggagaggtctttctcattttcgcgcccttcgaaattgaagttgttcactttggtgtgagtgtaggtgtatgtaccgtaaaatccgatgcatttcaatgccggagcgatgaagctgaaatcacgttgataagccagttccacaccaagcaagtcggcatcacctgcgtttttgggttgggtgaacttcttgtattcattgttttggtaggtatagtcaccaatcacctgatcgacaatgaaatcgttgattttcttatagaagatacctgcactgaccagaccgacgctcttgaaatagtaatcggcacttaaatcgaagttgtatgagagggtgggagtcaggtcagaattacccatcacgagttcattgtcgctgcggttgatattgacacatggaattaatgcggaatatttggggcggctcaatgtttctgtgaaagaggcgcgaactttgaaatcatcggtcacatcgtatttcaataatacgctggggagccagttgacatagttgtttttatgatctccggtcggttcaagcgtttcgttttcctcttcatccaccatccagttccagccgtcgtatttgatatgagtggcttccatgcggagacccagcatcatttttagtttctttcccaggttttggtcgaagcggaaaaaagcggaagtcacattctctttagcatgatagttgccggaagattcttcgagcacctgttcaccctccatgtttttcaggtcgagcgaacccagatattctttggatacgaaatcggtggctttatactgattgccgggcatgaagccgtcgcgaatctcactcgtgaggttgtccatatacgctgttttgtatgcatccttgtaggcgtctgcgtagtcgtagacggttacatcgcgatttttagtcttggatgcatatttggctccgaatttcaggctgtttccatagattccgttggccagcggcagttcgaaatctactttgaacttcaggtctttttcgtagatttcctggttgctttcggttagttctttcactttccattttcctctttcaccgtccacttctccgttgtgcaggtttacatcggttgtcacatacggaaaacggccgcctgcatccacgatgtcaaatccgagaaagtcttgtttcagattgaagtatctttcgttcggacggtcttcgctggcacctgcgtaagaagctccccagttcattgacagtttgccgaactgatgttctccgcccaggctgaaatccattgtctgttgcagttccaagcgggcgtttttgttgttgggagtacctcccttagtctctatttgggcagattgctgcatttcgccttcatcgtccggtcctgttttgtcgaggtctttgtaggtgacgcgatagcggttttcccagtcgtgacggcggttgtagatgccttgcagtgtcagtcggtgattcgggtttatttcgtaatcgaaagccagtgagtagctttggcgttcacgtgtcacgtagtactggcgtttttgtgcttctaccattactacttctcctttcttattcacatcgtattcaaattctacatcatccgaacctaccggagcattttgataagaaacggctgccatcattcccaatttgtcgttgaagaagcggtcgccataagtgaaacccaggttcagttgggctttctggctaatccagttgtatccggttcctgctgtggcactgatggttcgtttataaggagtacttttagtaatcagattgatagaaccgccaatggcatctccatccatatccgaggtgactaccttgcttacttcgatggtttgtatcatatcggcaggaataaggtcgagctgcacattacgtgtgtcgccttcggcagaagggagacggttgccgttgattgttacagaactaagatcggccgaagttccgcgtacttgtccgaagcgggcttctccctgatcgtattgtacgttaataccattgatacgcttcagtgcgtctccgatattggagtcagggaatttacccacctgatcggctgaaacgacattggtgatccctagtgtgttcttctgcgagttgatggcgcggcgttgcccctgaaaagctccgcctactactacctcttgcagttcgagtccttcattcaggattacgtctttttcgagtgtctttccggccggaatggtgattttcatttcaacgggtgagtagcctacgtagcttacttttacggtgtatgtgcccggagtaagattggcgaaagtataataaccgttgacatcactggtcaccccggtatgtagcttttcgatatagatggatgctcccggaagggtctgtttggaagtatctacgatgcgtccgcggatagtgccttgtttgactacgttcactttttcttctgcgaaagtgttaccgcttgtgctcatgaccaaaagaacaaatgagacaaatttcaaaaatcgtttcataaatgttagcgtgcgttaattatttgctgcaaaagtagagggttgacgtttcttactttttacagttggttgaagaacgcgtaacaaatatgctacgtttgtattacagcttccggaaccggtgattgacgggttttctatcctgggaaactatggattttgcggaaatgcataggctgtatcagattatatcaggattgggctccggtattactgttgtgttccgtataatgaatatcaaaacgtccgttagtcagccgtttgccgttaccgaatgtgacactgataattttcatttctgtgtcgaaacggcttatgaaagctgttccgtcttccagctcttctcttccgaactctatatcggtaatcgttgattctttgccttcttggggcgataaaatagtgaaagatagattgataccgggctttacggaaacactaacagagagtttgtcttcttctgtgtaatagtggaatgaatcatacgtccatacatacgagtgtccccaattcaggtatcgccctcccacataaatccagccgtccatcaggcaaccgaatgtgttggctcctgtagtggtggcagaaggcaaaacggtgatgtcgatcgattcatcttccgtttctttacagctccagaggctgatgatggaaaagagaatgagtatatatttcttcatagtgctttttttagtggatgttagaaataataggataatcccgtagtgatgtttagtcgcgtgaggttgacatcatcatttgaattgagttttacagtaaccttttcttcgtgatagtaagtccttattctaagtagctcactatacatatattgtactcctaaactgactcccaggttggaattcagcttataggtaagattggcattggtgaggagaccgatagtgaaggctctcacttttcgtgtgttgccgaatacctcgctgttgttccgcagaatgactccgccgggaccggttgtcacccggatttgccaatgtttggtattggcattacacattccgatttgcgtgccgatgaaatgaacccataaatggtcttttccttcaggatggcttcctttggaagaaaatccggtgtagattcctccgaagataaagcgtttgagaggacggaaatggtattgtccatcccagcttacgccttgtgcaagtgtacgttggtagctgtgggtacttaacgttagtgtgggaggattatgaaacatcacaccgtagccggcatggaacgagaactcatgtcgctcaaaatctctctgtgagaaaagtggagtgtgacaggacagagtgaatacgattaataatagaatcgcttttatgggtgtttgattcatctgaattagtttagattgtgtttcttttcgcaaaaatagcaaatagttcagactttctcacagcggatgataactttttgtccattatttaatgtgctggcaaataagtaggtatctcctccctctgtcagatggagccgtttgcgaagttcggctactgtggcgggaaagttgcggacagtcacatttgcttttttcaggtctgccagattctcttttacttcttttttattgaaactgcactggttgacaatccggaagattcttccggggaagttttcaataaaagtatcggaggtataaagatgactgttgggatgcagtttccggacggggtaggctgcggcaatgctgcggaaggcaccggctttcagaagagatgcattcggttcgtaaaggtaatcgcctaaagaatcggtataagtacattggctacgctgctcctgttcgcgggtgaatacgaagtgctgttcttcttgagtccctttcgtgaagaggtttacacaatgaatggtgatttccgccggtgatgtttgtccgagtaggatgagtagttccttacattcgttgttgacggataggatatgaacttcctgtgtatgtttcagctctttcagtgccaatgaaagatcgagcatgggagagagttttatcattatccggctggctttgctaagcagaagatcttcaagctcggctacgttcggttcgcagtcggcgatggagaccgtttttccgccgtgttcattgcggcgggcagggtcgaggaagatacaatctacgggggacattgtttgcagataggctactccatcctcatttcttacgtttatatggtttagattcagtatggggaagttgtgtgccgctatttcgcaaagctcttcctggcgttctacgtaggtggcggacttgaatccggtggcaagaaaagaacagtctatgccgaagcctccggtgaggtcggtcagtgaatctccctgcgaaagacgggctttgtagcgggcggtgatttcagaagagcattgctccagcgacagatgtttcggataccatatctcttccatttcccgccatgagggaatcttttcggcggcaatctgtcttcctgcaatctgggtgatggcagtcggcatatctatatccggatactttttagcttgtagagccagtgcgcgtacatcgtccgatgaatgttcgcggataaaaagttgagtttcggaggagatttgtatcatggcgttatggtgttataggatattacaatgaatcgtcgggcaccggttatggtcttgccgggtaccggtttagggtattaacttatatttctgtctagctacgttccggctgcaaaaattgaaatgccaccactcactgggtaatgcacggaatccggcttctttcattacttttcgcagcagtatccggttctgacgttctgtttcactcattttgccgctatgtaccagttcgttttcgtctgtgatgtgggcttccacgcccaaatggtctacttgggttcccataggtaagggctgtcctaaggagtcctgaatactgatgtctactgccagcccgtagttgtgtagtccgcctccacggttcgggttggagacatatttatatttggacgttcctttcactacgttccacatcttcttctgtaccgacatggggcgggctgcatcgtaaatgataagactataagacgggtgtagctgtttcaaggctttttgtgcttctataagagcgtatgctgcatccggatgcagataggcttccgttaagttgtcataaagtacttcgcctgtgaaattatcagcctgcgtatacattaatttaacaacgaggctgctatccagatcggttacgttgacgagtcccagtgaatccatgtagggagccattgcgcttcgttctatcggtggcggtgagacggtggaacattcttcgccggattgcatatcgtccggcgtatattcatgttccgtcagggtgggactctccttttccttttggctggaaaggaaggagcatcctgtcagcagtaaacagaggatagctaaactatattttagaataatcattcaaccttttgtttttagtgccgagaagttacgaaaag

SEQ ID NO: 8156 - DNA, 672 bp, Unknown
  gut microbiota DNA sequence
cgatagcgaaccagtactgtgaaggaaaggtgaaaagcacttcgaatagaagagtgaaatagtccctgaaaccgtgcgcctacaagcggtcggagctgcgtaagcagtgacggcgtgccttttgcataatgaacctacgagttactttttccggcaaggttaagcatcttgagatgtgcagccgaagcgaaagcgagtctgaacagggcgtcgagtcggaaggagtagacgcgaaaccaagtgatctacccttggtcaggttgaaggttaggtaacactaactggaggaccgaaccgataagcgttgaaaagcttccggatgaactgagggtgggggtgaaaggctaatcaaacttggagatagctcgtactccccgaaatgcatttaggtgcagccttgggaattactactgtgaggtagagcgactgataagatgcgagggcttcaccgcctatcaagtcttgataaactccgaatgcgcagtagttcgatcccaggagtgagggcatgggtgctaaggtccatgtcctaaaggagaagaatccggaccatcagctaaggtcccgaaataattgctaagttgaactaacgaagtcagattgctaagacagctaggatgttggcttggaagcagccattcatttaaagagtgcgtaacagctcactagtcg

SEQ ID NO: 8157 - DNA, 26413 bp, Unknown
  gut microbiota DNA sequence
aaaagattatcccacaatggattgattccacaaatatagccgaacaaaacaacatatcaaataaaaacataaaaaaaacgcagcaaattattgaaaaagagctaataggaagcgtttttcatgctttaaaacagaatttattcgtacttttgcgtctattatctaaatattcagaaattaaaatgatgccaactgtaactaaaaacctgataattatcaatgtactagtatttttcgggacaatcgtagcccaacgttacggcctggatttaacaaattatctgggattacattttttcctcgcaagtgactttaatccggcacagcttatcacttatatgttcatgcacggcggattcagccacattttctttaatatgtttgcagttttcatgttcggaccgattctcgaacaaacctggggacccaaacgttttctcttctactatattctctgtggtatcggtgcgggacttatccaggaaggagtgcaatatattcaatatgtgatagaacttagccaacatacacaagtgaatttgatcggatatggcgttatccctatggagcaatatctgaacatgatgaccaccgtaggtgcctcgggagccgtttacgccattttgctggcatttggtatgctgtttcctaacaatcggttgttcatctttccgctgcctttccctatcaaagcgaagttcttcgtgataggatatgccgcaattgaattatgggcagggcttgccaatagcgccggagataatgtcgctcactttgctcacttgggaggaatgttattcggattgatcctgattttatattggagaaaaaaaagcaataacaatgggacatattatagctgatttaaaggagacattcagaagaggaaatattttcatccaactgatttatatcaatgtaggcatctttctgatcggcacgttgattaacgttttcctgcgactttttgaagtaagtacccccgatatattcggtatatttgccttaccggcatcctttatcggatttattcatcagccgtggtcgttatttacttatatgtttatgcatgccggtatcctgcatattttattcaatatgctctggctgtattggttcggaagtttgtttctctactttttctcggccaaacatttaagagggctatatgtattgggaggtatctgcggaggtttactgtatatgatcgcctacaatgtatttcctttattcagttcgcaagtggtaggctcaacattggtaggagcttcggcttccgtattagccatcgtagccgctacggcttatcgtgagcctaattacagggtgcaactttttcttttcggtgctatccgtctcaaatatctggcactggttgtcatcggaatcgatgtattatccatcacctcaagtaatgccggaggacatatcgcccacctgggcggtgctcttgctggactctggtttgccgccagcctaaataaaggaactgatttgacttcctggatcaactggattctggatggtttcatctccttgtttcagaagaaaacatggaaacggaaaccgaaaatgaaggtacactatggaaacagtgccaccggtcgcgagaaggattatgattacaatgcccacaaaaaagcacagtcagatgaagtggaccgtattttggaaaaactaaaaaaatccggttacgacagtctgacaactgaagaaaagaaaagcttgttcgacgcaagcaaaagataaaagaatggaacatattggcaaatttgtcgcatatctgatacttgctgtcaacgctctcttcgtgggaacgttgatattaagcgcttatagcccttaccttaacccgaaaataaacccacttgcttccagcttgggacttgcatttccgatattcctgacgattaatctgatttttatcggcttctgggcattcgtcaactaccgctatacgctcttgcccgccatcggttttctgatttgtattccgcagatacgaacttatattccttttaactccaccactaaaaccataccggaaggaagcatcaaaatcctatcctataacgtaatgagtttcaacaatctggagaagaaagatggaaagaaccctatattatcttatcttgtagatagcaacgccgatattatctgtctgcaagaatataacaccgctaccaacaagaaatacctgacggaacaggatattaaaaaagcattgaaagcctatccttaccaatccgtccaccaacaagggaaaggagatgtgcaacttgcctgtttctccaagttccccatactctcgatacatcccatcaaatatgaaagtaattataacggttccatgaaatatgtattgaatgtaaataacgacactcttacattaatcaacaaccacctggaatccaacaaactcaccaaagaagacagagggatgtatgaggatatgattaaagacccgaatgccaagaaagtaaaaaccggacttaggcaattaatcagaaaactggcggaagcatcggctatccgggcttcacaagctgattctgtggctaaagccattgcagcatgtaaatatccgacaactatcgtatgcggcgatttcaacgacggttctatctcgtatacacatcgcatcctgactcaaaaactagacgatgcattcacacagtccggtaaaggattgggcatttcctacaatcagaacaagttctatttccgcatagacaatatcttgatcagccccaacctgaaagcctacaattgcacggtagaccggtctatcaaagcatcagaccactacccgatctggtgctatatcagtaaacgatgagaactgaaaactctaataaaaacacttatgatgattaaaaagacactaaccattttagcagtaagttgtatgatgtactcctgtgctacgaaaacagaaagcaatcctttctttacagagtttcaaacccagtatggtgttccttctttcgacaagattaaattggagcactatgaacctgccttcctgaaagggatagaagagcagaatcaaaacatcgaagctatcatcgaaagtccggaaattccgacattcgaaaatacaattgtagctttggataacagcgcacctatcttggaccgtgtgagcgccattttcttcaatatgacagatgcggaaacgactgactcactaaccgcactttccatcaaactggcaccggttctttcggaacatgatgacaatatatccctgaacgagaaactgtttaagcgcgtgaacaacgtctatcaaaagaaggattcactgaacctgacatcggaacaagaacgtctgctggacaagacttataaaagatttgtccgttccggagcaaaccttaatgccgaagaccaaacccgcctccgcgaaattaacaaggaactttctacactcggcattactttcagcaacaatatactgaatgaaaataatgctttcaaactcttcgttgacaaagaagaagatctggcaggattgcccgaatggttccgccaaagcgccgctgaagaagcaaaagcagccggacaacccggaaaatggctattcaccctgcataatgccagccgcctgcctttcctgcaatattcagaaaatcgcccgcttcgggaacaaatatacaaagcttacatcaaccgcggtaacaacaacgacgaaaacgataacaaggaaaatatccgtaagatcgtttctctccgcctggaaaaagctaaattattaggtttcgactgctatgcaaacttcgttctggacgaaacgatggcaaagaacgccaacaacgtaatgagccttctaaacaatctttggaactatgcactgccaaaagcaaaggcagaagctaccgaacttcagaaattaatggataaggaaggcaaaggagaaaaactggaagcatgggattggtggtattataccgaaaaactacgaaaagaaaagtacaacctgtctgaagaggatacaaaaccttacttcaaactggagaatgtacgcgatggtgctttcgccgtagccaacaaactatatggcatcacccttaccaagctcgaaggtatccctacctatcatccggatgtggaagtctttgaagtgaaagacgcagacggttcgcaactcggtatcttctacgtcgattatttcccacgctccggaaaaagtggcggcgcatggatgagcaactaccgcgaacaacaaggagatacccgtccgttagtatgcaatgtttgcagctttaccaaaccggtaggcgatactccctctctattgacaatggatgaagtagaaactttgttccacgaatttgggcacgctctgcatggactgctgacaaaatgcgaatacaaaggaacatcaggcactaatgtagtgcgcgattttgtagaacttccttctcaaatcaatgaacactgggctactgaaccggaagtactgaaaatgtatgccaaacattatcacacaggagaagtgatacccgacggaatcatcgaaaagatactgcaacagaagactttcaatcagggcttcatgactaccgaattactggctgccgccatcctcgacatgaacctgcacaccgtaacagatgtaaagaatatagacatgcttgcattcgaaaaagaagccatggacaagctcggtctcatccccgaaatagcaccgcgttatcgcgtgacttacttcaatcatatcattggtggttacgcagccggatactacagctacctatgggccaatgtactggataatgatgcttttgaagcctttaaagaacatggtatctttgataaaaacactgccgacctcttccgtcacaacgtattggagaagggcgacagcgaagacccgatggtgctttaccggaatttccgtggagcggaaccaagcttggaaccgctactgaaaaacagaggaatgaaataattcagtaaaaaagcccttaaacatcaaatatttgagggcttattacacatgaatgtgaaaaaaaaactatatttgcagccttgtatacggcaaaaagaacttgtgtacgacagaatttaactgaaaattaaattaaaaaagtaatcatcataaattaaaagtaaaatgcaaaacaaaggatttgtaaaggtttttgcggtattactcacgctggtatgcgtgttctacctctccttctccttcgtaacacgccattataccaacaaggcgaaagaaattgcgaacggcgacccgaaagtggaacaagactacctcgactctctctctaacgagaaagtaatgctgtggaactggacactgaaacaatgtcgtgaaatggagattagtttaggtttggacctgaagggtggtatgaacgttatcctcgaagtttccgtacctgatgttatcaaagcattggcagacaacaagcctgacgaagctttcaacaacgcattggcgacagctgcaaaacaggctgtcaacagtcaggatgatgttatcaccctgttcatcagagaataccacaaaattgctccggacgcaaaactttccgaacttttcgcaacacaacagttgaaagataaagttaaccagaaatcatcagatgcagaagttgaaaaagtgctgagagcagaagtaaaagctgctgttgaaaactcattcaacgttcttcgtacccgtatcgaccgttttggtgttgttcaaccgaacatccaaagtctggaagacaaaatgggacgtatcatggtggaacttccgggtatcaaagagccggaacgtgtgagaaaacttctccaaggttctgccaatctggagttctgggaaacttatacagctagagaagttctccctgccatgcaatctgcagacgccaaattgcgtgttattttagctgaaggaacaacagctgatacagatactattgaagcagtccttaccgaagccactccggttgagaaaaaaactgtaagtgctgccgacagccttgcagctgccctgaaaggtgacgtaactgctgaagataagtctgccgcaaatatggaagaaatcaaaaagcaatatcctttgctgtccatacttcagttgaattctagcggacaaggtcccgttattggttatgccaactacaaagatactgctgacatcaacaaatatctggctatgccggaaatcaaagctgatcttccaaaagaccttcgcctgaaatggggtgtttctccttctgaatttgacaagaaaggacagactttcgaattatatgctatcaagtctaccgaacgtaacggcaaagctccgttggaaggtgacgtagtaacagatgcgaaagatgaattcgaccaatacagcaaaccggctgtaagcatgacaatgaactctgacggtgcacgccgctgggctcagttgactaagcagaacattggccgttccattgctatcgttcttgataactatgtatattctgcaccaaacgtaaactctgaaattacaggtggacgttcacagattacaggtcatttcacttctgaacaagcaaaagacttagctaacgtattgaaatcaggtaagatgccggctccggctcacatcgtacaggaagatatcgttggtccgtcactgggtcaagaatcaatcaatgcgggtattttctcattcgttgtagccctgattctgttgatgatttacatgtgctctatgtacggcttcatcccaggtatggttgctaactgcgcgttaatcctcaacttcttcttcacgctaggtattctttcatccttccaggctgcgctgacaatgtccggtatagccggtatggtattgtcacttggtatggctgtggatgcgaacgtacttatctatgaacgtacaaaagaagagcttcgtgcaggtaagggtgtgaagaaagcacttgccgacggttattcaaatgcattctcggctatcttcgactctaacttaacatctatcatcacaggtatcatcctgtttaactttggtaccggtccaattcgtggttttgctacgacattgattatcggtatcttggtatccttctttactgcagtgttcattactcgtattgtttatgaacacttcatgaacaaagacaagtggttgaacctgacattcacaaccaagatttcaaagaatctgatgaccaatacacatttcgattttatgggtacaaacaaaaagtcccttattatcgtcagtgcaatcatcgttgtttgtatcggttcatttgccatccgtggtttgagtcagagtatcgacttcactggtggacgtaactttaaggtacaatttgagaatcctgtagaaccggaacaagttcgtgaattgatctctagcaaatttggcgacgccaacgtaagcgttattgctatcggtacagacaaaaagaccgtacgtatcagtacaaactaccgtatcgaagatgaaggcaacaatgtagactctgaaatcgaatcatatctatatgaaaccttgaagccggtattgactcagaatatcacattggaaactttcatcgaccgtgacaatcacacaggtggtagtatcgtaagctcacagaaagtgggtccgagtatcgcagacgacatcaagacaggtgctatctactctgtagtattggcactgctcgccatcggtttgtatatcttgctccgtttccgcaacattgcttacagtatcggttctatcgtagctttgagttgcgacaccattatgattatcggtgcctattcactgttctggggtatcctgccattctctctggaaatcgaccagacatttattggtgctatcctgacagctatcggttactctattaatgataaggtggtaatcttcgaccgtgtacgtgagttcttcggtttatatccgaaacgtgacaaacgagtattgttcaacgactctctgaacacaacgctggctcgtaccatcaatacatcattaagtacattgatcgtattgctgtgtatcttcatccttggtggtgattcaatccgcagctttgcattcgcaatgatcctgggtgttgttatcggtacattatcttcattgtttattgcatctccaattgcatacaacatgatgaagaacaaaaaagtcgtagtaccagctacggaagaataataaactccacaaatagaaaagcctcttccgaacattcggtagaggctttttctattgattattaaaacaaatagaagctataagacgttcatcttaaaagaagctattgttacacttaaaacttgatacaatatgaaagcaaaacaataccactctcatagattcttctgtagtagccccgaggggaatcgaacccctatctaaagtttaggaaacttctattctatccgttgaactacaaggccgcttcaaatttgcttgcaaagataacggtttctgtcgatttaacaagaataaaaatgcaggttcctttcagatatttcaaataattggcgtcaataggacaataaagtagaatttattttgataattcgattaactttccgacctttgcgctcacaaattgaaagtaaaatcagtttttaaattaaatatagtaattaaagttatggcagacgaaatgatggttaaagaattggaggaagtagtagtacgtttctccggcgactccggcgatggtatgcagctggccggcaacatcttctcgaacgtgtcggctacagtgggaaatgacatctgtacattccctgactatccggcagacatccgcgccccgcaaggttcgctaaccggtgtttccggtttccaggtccacatcggcgccggacaagtttacactcccggagaccgttgccacgtattggtggctatgaacccttccgcactgaaaacacaaatcaaattctgtaaaccgcaaggacttatcatcaccgactccgactcattcgaagccagagatttggaaaaggcacaatttaaaaccaacaatccctttgaagaattaggaataaaacaggaagtattggaagttcctatctcttccatgtgcaaagagagcctgaaagactccggattggataacaaatcgattctccgttgcaaaaacatgtttgcacttggattggtttgctggttgttcaaccgtaaccttgctgctgctgaaaaaatgctgcgcgagaaattcgccaagaaacccgaaatagcagaagctaatattaaggtattgaacgatggcttcaactacggagcaaacactcatgcttctgtctctacttataagattgaaagcaaagctccgaaatcaaaaggactttatacagatatcaacggtaataaagcaaccgcctacggactgattgccgcagctgaaaaagcaggtctggggctctacctgggttcttatcctatcactccggctactgatattctgcacgaattagccaagcataaatcattgggagtcaaaaccgtacagtgcgaagatgaaatagccggttgtgcttctgcagttggtgctgcttttgccggtgctttggcagtgactacgacttccggccccggtgtttgcctgaagagtgaggcgatgaaccttgctgtaatcggtgaacttccattggtgattgtcaatgtacagcgtggcggtccgtctaccggtcttcctactaaatcagaacagaccgacttattacaagccctttacggacgcaacggcgaaagcccgatgcctgtaatcgctgcaacatcgccgaccaactgtttcgacgccgcttatatggcatgcaagattgccttggaacacatgactccggttgtattgctgactgatgctttcgtagctaacggttctgccgcatggaaactccctaacctggatgaatatcctgccatcaatcctccgtatgtgaccccggatatggccggcaactggactccttaccaacgtaatccggaaacaggcgtacgctactgggctactccgggaactgaaggattcatgcaccgcatcggtggtcttgaaaagagcaacgaaacaggcgttatctctaccgaaccggaaaaccacaataagatggttcatctgcgtcaggccaaagtggataagattgcagactatatccccgaactcgaagtattgggtgacgaagatgcagacttattgattgtgggttggggtggtacttacggtcatctccgtctggctatggactttatgcgtgatcacggaaaaaaagtggcattcgcacacttcgagtacatcaatccgctgccaaagaatacagccgatgtattgcgtaaatacaagaaaatcgtggtagctgaacagaatctgggacaattcgcaggttatttgcgcatgaaagtgcccggattgaacatcagccagttcaaccaagtgaaaggacagcctttcgttacgagagaattgatagatgcattcactaaattattggaggaataaaagatgagcgataaagtatataccgtacaagattataaatcaggccaaccacgctggtgtccgggatgcggtgaccacgctttcctgaactcactgcacaaagctatggccgaactgggagtagctccgcacgatattgccgtcatttccggtatcggttgttcttcccgcctgccttactatgtaaatacgtatgggttccacactatccacggacgtgccgctgctgttgcaacaggagctaaagtagccaatcccaatttgactatctggcagatctccggtgacggtgacggtttggcaattggtggtaaccacttcatccatgcattacgccgtaacatcgacctgaatatgattctactgaacaaccgtatctacggtttgacaaagggacaatattcaccgacttcagaacgcggacttgtcaccaaatcatcaccttacggaacagtagaagacccgttccatccggcagaactggcttttggtgcccgcggacgtttctttgcacgctgcattgcagtagatggtgccgcttccgtagaagtattgaaagcagcagctaaccataaaggcgcttctgttgtagaagttctgcaaaactgcgtgatcttcaacgacggaactcacgccagtgttgctaccaaagaaggacgcgccaagaacgctatctacttggaacatggcaaaccgatgttatttggtgaaaacaaggagttcggattgatgcaggaaggcttcgggctgaaggcagtgaaactgggtgagaacggtatcacagaaaaggatatccttatccacgacgcacactgccaagataatacgcttcaactgaaactggctttgatggaaggtcccgacttcccgattgcactcggtgtaatccgtgatgtagacgctccgacttacaacgatgctgtcgttgaacaaatcgaagaaatcaaaggcaagaagaaatatcacaatttccaggagctgttgatgactaatgagacttgggaagtgaagtaattcactgctcatcaataatataaaagctggaggaaggataaaacaatccctttctccagctttcattataaatacacctcaagtttacttaaaggtcatcttcagtcatcccacagcatactgggcgtcaccccacaagccgtgatttgtttcatgccatgaaaccatttgtttctcaccgagaaacgaaatgtttcaagcagggaaacaaagtgtttcacgccgagaaacaaacagttccaaacagggttggaactaaacggctgcaatgaaatcaaaagcgctccattatctccatacacatacgcccgttatggtaaggacatttccaaaatccggctttatcatcctcacggttgacagtcccatcagccgaaaggctccagtaccattcaccgaagcaagccgagccatgtacttgagttactcaagcctcctacatcatttcactgagtttgaagtatgattaaaacatttcattaaatctataaaagtttgaagtataattaaaacttttaggcgtatgaacttccctcgaatccttaaaaaaagaaaaggttatattgaccgaataaaaccttttatgcaaaaatctgtaatcaaggtgttaacagggcaacgccgtgtaggcaaaagtttcctcctttaccagcttattgaagaaattttagcagaagaaccggatgcgaatattatctatgtcaatcttgaagattttacattcagttctcaacaaacagcagaagatttacacccgtacatcatttctcatagcaaagaaaaagttaagaattatatctttatcgatgaaatacaagatattcccgggtttgaaaaagtcatccgttcgctcctactcaatgaagataatgatatatacattacaggtagtaacgccaagatgctttcaggagaactcgccacctatttaagtggcagatatatcgaattcaaaatatatagtctctcctattctgagtttcttgaattccacggattaactgaaagtgaaacgagttacgaattatatagccgttatggcggacttccctatttattaaatctccctctcgaagatgaaacggtcaatgaatatttgaagagtgtatagtccacgattgtatttcgtgatgttgtcagtagatacaagttacgcaatactttgttccttgagaaactgattcaatttttatccgaaaacataggcaatctcttttcggcaaagaatatcagtgattatttaaaatcacaacataccaccatatcagttaaccaaatacaaagctatacggaatatttaaacaatgctttcctgatccaccgggtagagcggtatgatttgattggaaaacgtgtatttgagataggagagaaatattatttcgaaaatatggggatccggaacattgtcatcggatatcgcattacagacaaagctaaaatattggaaaatctagtgtataaccaccttttatacaaaggttacgatattaaggttggttattacggagataaggaaattgaccttatcggagaaaagaatggagaaaaactatatatacaggtcgctttaaaaatagatagcgacaagacagcagaaagagaatttggaaacctgctaaagatacaggacaactatcccaaaatagtggtaacagaagatacattcagcggaaacagctacgagggcatacgtcattgtcccatacgccagttcttaatggagtaaaccatacgatatacgaaaaataaatgcagtacaccattaggttaccacgagcaatcaaatcgcctttggtgtgctgcatttacatttgagtcaagtcatctataataccatggggtttgctgcaagacaggcggcaatgtccattgttagttagtaatagacagctcggttaccttatacggatgctttactgctgcatgggcagctttctgggcaacagctttcctcgcctcatccaacccttccggggcataaggattcccgactacattgtgtttgaagatgcgttcgaaccaggtacaggcagcggtataacgtccaatcttcacatccagatgatagccgtcccgattcaggtggtcgccgatgaaagaggtgcgcgcattttgtatggcagtgcccgaagggatgacaatctttatcttattcgccttagccgctttcttcactgcatcggcaatagcctgatacatggtcagttgattgcagttgtagtttttaaatccactatgcttggaagtagacgcatacgcccaggtttggtgcagcatcagctttgttttttttggaaggcgtacttttacatattctatgagctcgggaagagaggcttcatacgtctcatacattcccgaaaaaggacttgcctgttgcaggctgacgtaatcccagtcttcatctgccagcaccgcttccaaagacatcttgcccttttcccgtttctttccatccgtaccgattttccggtaggcataggcaggagcattgtcacgggcatttttcacatgacgttccagggaacagccgccgataaacatattgccgatgatggttgaaatgccttcggcttctgcaagttcatgcagatattgctccacggcatcctgcgagaagctgttgccgatggcaagtatcctgaccgttttttgctgtgcatacgttcctccggcaagaaggagcagtatgcacatacaaatcactacatttctatattgcttcattatattcaaatataactaaacttatcggttatttctctttttcatgtaataatctctcatcagataccacgctttcttacgcataccctggtcggatatgagtcctttgcggttccagccatcctgattggtggggtggaaacggaacggcgaacggaagtcgaacagaatccagggagatacaccacgcaggttcgggatattgtcgaacatacggatattgtctctatacaagcgtgcctggtattcttcactccaggagctgaccacattctcatcaccggactgaccgtacaatgcttcgccgccaaattccgaaataatcaacggtttgtccgtcacgacttcccatatagcgtctttcggttccacaggccacggatgataccagcccatatatttattgatagctacgacgtccagtcgggaagtgaaagaatcttccattacaaaacgctgtttttcgctattgaagtgcacaaggtcgaaagcggcaacatacaggcgggtagtgtccagctgttttcccgtttcgagcagggaagtaaggaattcattccgttctttggaaggctgtgtttcattggcaacgccccaataacctaccgcgcagcggttttgatcgcgcttaatcatttcagaaagcatcctctgcgctttcttacgggtatcatcgtctgtaaagtcaatgccttgccaaataggaatctcctgccagagaaggaagcccatcttttccgccaggcgtaccgtgtactcattctgcggataatgagccaagcgaatcatgttcacgccaagcgctttcgcttcatttagcaacatagctgcatcggcttccgagaaagcacgccccatacgttgcgggatttcttcgtggaaagagatacagcacataaatgtcggcttcccgttcaggtaaatatcagttcctttcacggtgatattgcggaagcctatttgctcttccacgcggtcggcacttgaagatacagtcacgccatagagtttcggttcttccggcgaccagcgttgcagcttcttcgcattcaatacggtttccgcctttccttccgcgtcggtggtgagctccgcgttgattttgagttcggggatggcaactgttactttctcacctgccttttcatcagaaagacgcacacgggcaattatccggtcgggagcatttttatccagttggataaaataatcttctataaatatccggggagttttcaccaacagcacatctcttgtgatgccgccatagttccaccaatcgaatgccatagcgggaatggcgtctttggtacggcggttgttcacttctaccgccaggaagttgtcaccgtctttcaacaggtctgtcacttccacttggaaaggagtaaaaccgccttcgtgctctgctatctcttttccgttcaggtagactttgcaacgatagctgacagcaccgaaataaaggaactggcgtttatctgccaagcgtttggcatcaaagtgacgagcataccatacagtgccttcgtaatacttcaattcgggcgattgagagttccagtcacccggaacattaagacgcaacccgccttcaaacgcgtattcgtagaaatcaatatttccttccggttgccggttctcatagattttcatccgctgtccctggtcgtacaggtcgatgatggcattccatttaccatccagcgaatggatgttgcgaccatatacattcgttatcagctcctgtgccgcaacgcttccagcaaaaacgattagcaacaatagacatagacttaatttctcacctgttttcatttaagtatgttgttataattagtgtatataataagttcaggcacggattatacggatttcacggtttttagaataggataggtaaaacaacagtgttaatccgtgtaatccgtgctatttcgatttatttttcaggaaattcattacccagttccaggctgtactccactgttcagcataggcataatgagcggtcgtctcagctacaaacagctctttcggagcattaatcacgttgtaagcagagtaagtagtagtaggcggacaaaccatatcattataaccaaaagtatagaatcccggaactttgacctgtcgggcaaagttcaccacatcaaaatactgaacggttttaatcttttccggtgtccggttcttctcatccttcaacaaatgcggccaaccgcctgcacgaccgtgggcataacccgccatatcacacaaagcaggatagaaagaaaccaatcccttgacacggtcatccagtccggcaattacaatggaaagcgcaccgccctgacttccaccgaaggtcgccagattaccgttaaattcgggaagtgtgtaaatgaaatcaatggctctcacacagcctgtataaacccgtttgtaatagtacttgtcccgattgtccatattgaacgagtggtaattcttcaaagcaccgttataaagccggtgatacacatctcccgtcaggttgaccggaatgccgtgaataccgatttccagaatgataaaaccttttccggcacgttcggcttctccgttataggcacggatacctgcccccggcactttcagaatcgccggatatttcccggaagccttcggaacacaaaggatgccgtacatacgggacgcatagtcattgttcgcgaaggagacatgatatacgttcaccttatctgtgcacctttccggcagtaaagtcattatcggttccaatgcccacttttctgcggcttctttggtatttttccaaaattccagaaagtcggcaggcaacggagtggtcggttgcaatttctcaggagagaagccgacggtagccacgccttcatactcacgcccttggcaagtgacgaaagcgcggcaacgcaggaacccttcttttttcatagtccctgcgttaatttcaagcttttcattcttcaaaggctgtttgcctgtctgatgaggtttcatcatgtcttccgaaatctcatagcgcacttccagattatcctgcgggatattgcatttcaataccgccactttgaatttcactttttctcccggtttatacagccaattggtgtggtcgggagtgacctgcacttgaaccagtctttcctgtggctgcccccatgcaactatctgcatggagacaaatactatcaggagaagaagaaaacgtacactttttatcatagttccctattttatttcatttgtcattgctatattaatattccatttatcagctattaatacccattgtctcaactattaatacctatccgcccaactattaatacctgacaactcaactattaacatccaacagcagagatattaatgctcctctccacacatcataacactctgcgaatcagaagttaacacatcattcgtgattagcgtaaaatacagatagccgcctttttatggttttacttcgtattgatagagtgtgaaagagttcttgtcatttagctcgaaacttactctaccctgtgcgccgacttttgcggcaaactttttgccacttcccattacaggggtaaaagtaactttcttaccctcaggaagccaagtgtcaatagtccccctggcttgctcgttgtcttcgcggtaaactacaagatagccttgcgtgccggagacggtcgattggaatccggtccacgaacgtcccgaaggttcttcaccaatgggcagtatgacgccttgatgaaactggagttgcaagggttggtacttcttgagcagagatgccgtaatataagcctcttcgggcaggttcgaagcctccatccaagccaacggctgcgccgccaaggtgatggcaaagaggtaatcgaaactgtaacgggcgggggcaaaagggtcggcagcgtcatacttgtcggcattgcgccatttattaaggaactctatctgcatcttctccgccggtacatagcgagacagcatccagaggttgcgcaaggtgcgataagggtaatagttgccccaatcggtatagcggttttccagaaagatattgccgtactcgttcatatagtgatacccgccgcgacgaccggcagtggcatcgaggttgaaaatcacttcatagttggtttgctccaacacggtatcaaacagtcggcgtagattctgttcggctgtcttggtaggtatctgcagaccgtctatcttgaaacagcagatgccgtacttcttataaagcccgataatggcttgcgcatctttttgccaatcggcaaaatcattctgtatactgggattgaaccataatccgatgcgaatacccaatttcttgcctttctctacaataggtttcagcccatgagggaactttgtggggttgggcgtccagtaatcgccacttttccagatatccttaaaactacctccggcagtcttcgagttagggctttttccgctctgccagccatcgtccagttgaaagagggtgatccccatgcgtgcggcacggtctagttctgccagacagaaagcctcatctattttggcatcctggctacggtcgccccaggtattgagcataatcatctcatcctgtgcggcggtgtggtggcgcagttgtttctgatagaggcgcagggcagtaagcgcttcttgctcgccaccggtatagatgccggtaacgcatccataaacgcgggtccagctatccggctttacatcatgagacgcaatgcccagccccactaccataaaatcactaaagtccgccacgaagtcagaacccggataatgtaattgggtactgctactgggagcctctttcaaaaaaaagaagccttgacgcgtagctacatcatgagcaaaaagcaaattaccacgatacgtattgcgacggtaaggaagccaggtacgcccggtcaccagattgtcgttccaatcggtgtagtcgaaaaactctattgtgcgggcactccaatgattgccggatagttgcaacctgtcgagcgtgggagttttcacccccgtagccatatcggccgtgtgctctatatttttgcggtcggcgttagagcggttatcctccttattctgataaagttccacttgccctttcagataggtgtcgcaagcaatggcgggacagtctgcataaatgcgatagcgacgctctatattcagcgaaccgatagtgcaagccacggtagcctgcagataactggcgtggatgccgttcgtcggtatctcgttcacggtgaatgtggcgtccgtagggatacctttcacaatcgagaaatcgggttgtttgccctgtaccggaatgttttttccgtgttgcttgtcagtaaggctgatggtaacaggcgcaccgttattccacagcatgacgcgttccatatagttattgcccatacgtagcgtgtcacctttcagaaaagcgtaatactgttgtcctccccaaagcggcaaggtacatattgccgatagaaatatcgtgataatattttttttgctcatagtttgtctacggtttgatgtaagctcccggaacttccaacaatttgttgggttcgttgaagcgttggttatcgggcacatcgcgtttgcccagacccgcttgcataagttgcttcagttccgacaggtgatgatgatagatgtcgcgcggctctacacgatgcttgtggcagagtccggctgccatacctactacttcacccatcatgccggtagtacgcatcacacgtaccgtacccaaagctacatgggtgcagctcatattgcggcctgccataaagaggttgtccacattgcgcgaatagaggcagcgatagggaacggcataaggatgaatccaacgatgcaccgtagccgacttgaattcattaccgggaaagcggacactgttcacgctgtcggggaagtgaaggtcgatgctccaagtggtggtaaacgaagcatcctcgtgcgccacattcttgtctatatcgtcctgtgacagtacgtagtcgcccaagagacggcgtgattcacgtttgcctgaaacatacgccacccagtcgagggaacggttggcatacttcttatggtctttatagtgatttttcagatagctccagttggaatatatcaccaaaagtccatagtcgcgtacacgttcagcttcgctgacttgattgcggttcatacccgtttcccatttccactcgcccatggttacaggctcacagttttcagcgtcaaaacgtacgccatattcaaaatgagggaatgaggttttcttcttcatatccttactataccattgtatagaagcccccatcaccaatgagtcgggttgctcgggagcaaggctctcgccatattcatcgcgaccttcacgccccatagcccaatcggcaccggctaaatagcctatggtagcatctcctgtgcagtcgctaaagagaggagcggtaagttcggtttgtttgcctgtctcgatgtgctggatagtgactgacgcaatgcggtctccttgcatcttcacggctaccgcacgttgagaagcataaagggtaatgttcttttcggcctctataaagtcttccttcttctggtcttcatagtagtcgcccggttgggcattgccggagcgttcatgaccgaactcacgtatcatacgtcccaatccctggttaggttccatttcgatgataccgccgaggtgtacacgaatctccgacgagttattgccgcccaatacaggacggtcgttcactagtgctaccttacaacctaatcgggcagcagatgcggcagcacacattccggctattccccctcctactaccacaaagtcgtattgatgagcgggcaccgtctgttgttgtcgcaggcgggtacgaagtgcggctgtctctgccgcatcccaggtagcgggctgcgtgttcgcatcggtcgtaaggtaaatggcatcgcaacgaccatcgaaaccggtgaggtctttcagggcaaggatagtagtccctgctttcaatactgtctttccggcaaattgccattgccaggaattaccggtatgtcctaatgtagctttcagcaatttgccgcctaaagccaggcggaactttccggggccctcggcatcggtccaaggtgaagtccagttgtaagtacgggcatatacgtagtaagtgcccgcctggggaatgttgatttctgccgtagcatccgccacagggatgcccatgccatgtgccatgagatagggcgaacccatttgatccatgaactgctggtcgagcacccagccgcctcgctggctgaagctttctgcttcgatgagcagttcttcggctacagccacaaggctacagactacggctatgcatgtcaataagaattttttcatcacagtacagcgtttttatgattattgtctactatcttcacagagggaacagattatctcgccattttgtaaatttcattgcctgccatcaaaaaagcaccaactccataaacttccgtcatgtcacgagtcactttcttcgggtcggcaccgatttgctgcacataacccagtttcccattcggttccacagccgagactaatgcattccagccttttatcattacaggaagataaatttccttatccaataaaccttcgtttattccataagcaatggaatagacaatgaaagtagtgcaactcgtttccggtgatggataagaggcaggatccaaaagactggcatgccagaaaccgtccggatgctgcaatccggcaacacgtgtagccagttttacaaacaattccgcatagaatttgcggttcttatctttcttgggcagttcctttaatatttcaaccagaccaccaagcacccaaccgttgccacgtccccaaaagactttcttgccattggcttcacgcttatcaaaataacgccagtcacggtagaacaagttttcttctttatcgaacaggtaatcataagtcgctttatactcacgattcataaatttgatatattttttctccccggtcagcatatacagtttggcatatacagggggagccataaagagagcgtcacaccaagtccaacgttccagggtctttaagtctccctccaccagcttgaaactgccttcggacggatgattgacaatccattccgtacgggcgagcgtagggataatcattgcttcgtctttgtacttgcggtataaatccaaaaaggactgtgatacagcgatgtcatcagcatggtaaaaccgtttgtccggctgccaacaattccgccgcccgatacgagtcagccacttataatatgtatcatcattgtcttctttttcagccaattccgcccaatccaccatgccgacataaagagcaccttgcggccagttcaagtcgtcatgttcaggagcggggtgtggattggcaatctgccaatccgccacctttcgcataatagactttatttctgctttttgaaaaggaatctctgttgccattataaaaacggaacataacagagacgctcccaataaaagtgtttttttcattctatatttatttgtttatcattcggtcattacagttcaactgtagcctttaaaggcaattgactggaagcaggcccgactaagatctcaaagtctcctttttccactacaaagcggtgttgattcatatcgtaaaaagagaatgcatcctcatccagcacaacagaaacccgcttcttctcccctttcttcaagaataccttttcatatcctttcagttctttcaacggacggggaacagaagactgtatatcatgcacatacacctgtgccacttccgaagcatccatcttacctgtattctctatatcaaagctaacggtaacctgatgctcacccgttttctctgcagccatattactataagcgaaagtagtataggacaaaccgtagccaaacggatagaaaggttcttttcccgaacggtcgtatccacgataaccgacaaagacaccttcggaatagtctacacgcttaatctccgcctttaagttctcgtaataactgccgtgcaccggattatcttcccatttccgctcgatagaaatcggtagctttccacttggagaaatcttaccggtcaggatttcagcaattgcctgaccgccttcctgtcccggataccaggccataagaatcgcttttgcggcatcataccagttggtgaaatccacaccgccaccagcgttcagtacaaccacaacattgggatgcatggacgcaatcttcttgataaacaattcctgatagcgaagcaaggcaaacggacggtcaaagccttcgccttcggtattactattgaaacctgtgcagaacacaacattatccacctttgccaatccttgacgaagtttcgcctcattaaggctataagcattaaaacgaatgatggccgaagaaatattatcaaagaattcaatccggaaacggtactccttaccaccctcaaccggcagttcaacttcacggctagagtatgaatgatttccccaatctcctgtaatatgcttgtcattcacaaacagacgataaccgtcatcaccaccgatatgaagtttcaactgaccgtcagtttgtggcatgtagcaggctgtccaacggacagagaatccatctgtcggaaagccgtccaaaggtgctccatatccccagtcataatcaacagaggattccgtgcgtattacttcaggctgtcccgaaagggtcttgtttttaaagtattcagccttgaagcctttcatctgacgattagcatcagtataaaactcatggacaatatcttcataaatcacatcatccgtcaatagtaacagattctttttcttcaattctttcaagccttgagccactgagacggtagaaaaaggagtgacaaacccactgccgccaccggtaggaatcaaatttgcattaggccccatcacggctgtctttcctttcagcgggagcaagtttccttcattcctcaacaggactacaccctcgcgcgccagttctaaagctgtttggcgggagaaaggattatcctctgcgatgttgctgtctttctgttccttatccaacataccataagcaatcagagtttgcaggatgtgttgtactttcaggttgatggtttcttctgtcactgtgccggctttgatagcaggcaacagattctccaaattcataaaacgtcctttcggcatttcgaggtcaagtccggcgttagcagcgcctacggcggaatatacagaagtccagtccgacatcagaatacctttgaagccccaaagattgcgcaagacatcaatattcaaccatttatgttcggtggcatggacaccgttcaacagattgtagctgttcattacggcgccgacattggcttcctgtacagctttccggaaagccgggaaatagatttcctgcaaagtacgttcgtctatgtcagagctggcatggtggcggctccattcctggttgttggcagcaaagtgtttgattgtagcaatgactccttccgattgtactcccaggatatattgtttcgccgtttcacctgtcaagtaagggtcttcaccgaagtattcaaagttacggccgcacaacggagcacgatagatattcacgcccggacccaacaggatattaactcctcttgccttggcgtcctgtcccaagccttgccctaacttataaagtaattcccggttccaagtagaagcggaaagtattccggaaggatataaagtgctcttgggagcatgattacgaattccctgcggcccgtcagccaacttgatttcaggtattcccaaacggggaatggcacgcagagaaaaactggtatatccggagatatactctattttctcttgcaaagtcatttttgatacaatgtccttcgcacgttgttcgacttggggagtgattgtctgtgcacaggttaatatactccatgcaagcatacataaacctatgcctcctattttctttttcatggtgattctgtgttaatataatatgtgtaaaaaaccaacttagctatcagctcttcacacacttttgttctttacatttttagtctatcagttctattttaacggtctttccttgtaccagaatatgatattcgccggcttcaaggaagcgtttaccatcctcattgacaaaaccaaaatcacgttccagatcgatgtcgaaacggaaagtcttcgtttcgccggctttgataagttgtttctcaaagtgtttcagttctttcaccggacgggtgatagagcaataaggatcggagataaaccaatgaacagtctctgctccatcgcgggcaccggtgttggtgacggtcacttctgccgacagtttatcgccacgcttcaccttagtagcagaaggggtaacagtgccatacttaaattcggtataacttaatccatgcccgaacggatataacggatcgcttgttatatctttataaaatccctgatgtccgcgtccgctcttgcggcgattataataaataggaatttgtcctgtggaataagggaacgtcatggctagtttaccggaagggttgatacgtccggataaaattcctgccattgaacgcgcaccatttatacccggttgccatatctccaatatagcatcacaaagaggttccatgcgatttaactccaagggacgtccattagaaagcaccaatataacaggtttaccagcctcctttagttctttcaccaattcttcctgaatctgtggcaaagcaatcgtagaacgggaagcattctcaccactccaggtaagcatctcgcccaaacaaacaatgactacatcagaccaacgagcaacgtccaatgcgccagcaaaacctgaacggtcattgccctgcggtttgcatcccattgcataacgtaattcggcgtctcctccaaactcggcagtcaacccatcatagagcatttccacatccgtatcttttccatgtccgcaccaagaacccaataagtcccaaccattttttgccattggacctactacggcaatcttttttttgtttgtaagtggtaatatctgattgtcatttttcaacaacaccattgattctgctgccagttgagcggccacagccatactttgcggacggaaaaaacgatccttctcattagtaaccggagtat

SEQ ID NO: 8158 - DNA, 3800 bp, Unknown
  gut microbiota DNA sequence
ctacattgaaccgtttagagaaacgcttgggtaagaatgagcagctttctatggagaaattccgtatttatcttcagatgaaagatgataagaaggcatttcaggaaatagaaagtctggtacaggaatatccgatggatatgcgttatcaggtgatattgggagatgtgtatcttcagaatggaaaaaaacaggaagcatacgatgcatatcagaaggtcctggcggtagagcctgacaatccgatggctcttttttcaatggcttcttattatgaacagaccggacagaaagagttgtatcaacagcagttggatactttattgctgaataagaaggtgacttcggataccaaaatcagtgttatgagacaggtgattgtggaaaatgaacagtcgtctgccaaagatagcactcaagtgattgccttgttcgaccggatgatgaagcaggatatagatgatccgcagattccgatgctttattctcaatacttgttgtcgaagaatatggaacaagaggctgtgccggtattggagcaggtggttgatttggatcctaccaataaggcggcccgtttgatgctggttagtgcggcggtgaaaaaggaagactacaagcaaattatcaaagtctgtgaaccgggtattgaagccactcccgatgcgttggcgctttattattatctggctattgcttatcatcaggcagaacagacggatagtgtattgagtgtttgcagcagggcattggaacacgtaactgctgatacccaaaaagaagtcatttcggatttctattcaattatgggggatgtttatcataccaagaaacagatggcggaggcatacgctgcttacgattcgtctttggtgtacaatccttccaatattggcgcattgaacaattatgcttattatctgtctgtggaacgtcgtgacttggacaaggcggaggagatgagttataaaacggtgaaagccgaacctaataattcgacctatcttgatacttatgcatggattctttttgaaaagggaaattatgccgaagcccgtatctatattgacaatgcaatgaagaacgacggcgagaagagcgatgtgattgtggagcattgcggagatatttattttatgaccggcgatgtggaaggtgcgttgaaatattggaagaaggcactggaaatgggtagcgagtcgaaaacgttgaaacagaaaatagagaagaagaaatatattgcggaatgaaaagaatcatttatctactgttgttggtggtagtggtgttggccggctgtaagagttcgaaacacttggcaacttcggaaactaagacttcgacaaaggctccgacatccagttacctggcttccaagcttcagttgactattcccggcaagaagggaagcatgtctgtagggggaaccatgaagatgaaaactcatgagcgggtacaaatctccttattgatgcctattctgcgtacggaagtggcgcgtatagaagttactcccgacgaagttttattggtagacaggatgaataaacgctttgttcgtgccactaaagctgaattgaaaaatgtattgtcgaagaatgtggagttttcccgtttggaaaagatattgatggatgcctctcttcctggtggaaagacagaactgacaggaaaagatataggaattccttcattagaaaaggctaaagtccaactttatgagttctccacacaagagttttcgatgactccgacggaactgacgtccaaatacaaccagattcctttggaagaattagtaaaaatgctggtagctttattatgatgaaacgtttctttgttattctaatcagttgcctgtggttggcagttccttttttcgctcaatcgaacaagttgattcgtgagctggaaagtaaacgtggtgcgctgcaaaagcagattgccgaatcggaatctatattgaaggatacaaagaaagatgtgggaagccagttgaatagtctggctgtgttgaccggacagattgaagagcggaaacgctatatcatggctatcaacaatgatgtggaggctatccagcgtgagttggcttcattggagcgtcagttgcacgggctggagaaggatttgaaagataaaaagaagaaatatgaagcttctgtccagtacttgtataagaataagtcgatagaggagaagctcatgtttattttttcggcaaagaatctggggcagacttatcggcgtatgcgatacgttcgtgaatatgccacttatcaacgtctgcaaggggaagaaatcctaaagaaacaggatcagatacgcaagaagaaagcggaacttcaacaggtgaaaattgccaaagagaacctgctacaagaacgtgagagcgaaaaggtgaagttggaagagcaggaaaaagagaaacgcacgttggtgactaatctgcaaaagaagcagaaaggattgcagaatgagataaataaaaaacgcagggaagccaatcagctgaatgcccgcatcgataaattaattgcggaagaaatagagcgtgcccgtaagcgtgcgcaggaagaagctcgtcgtgaagcggctgcccgtaagaaagaggaaaacaaggagggaaaatctactgcaacggaaacggccgccaaatcgaaacctcttgaggcttataccatgagtaaggcggatcgggaattatcaggtaactttgccgcgaatcgcgggaaattgccaatgcctatatccggcgcttatattatcaccagccgttacggacaatatgccgtagaggggttgcgcaacgtgaaactggataacaagggtattgatattcagggaaaaccgggtgcacaggcgcgtgccatttttgatgggaaggtggcggctgtgttccaattgaacggattatttaatgtcctcattcgtcatggcaattatatttctgtttattgcaatctttcttctgcatccgtcaaagccggtgatacggtgaagacgaagcaatccatcggtcaggtcttttctgacggcacggataatggacggacggtattgcacttccagttgcgtagggagaaagaaaagttgaatcctgaaccttggctgaaccgataattgaataaaaaacacgtagaatgaagttaactaaaatactaatatgcttgctgatcttctggaccggaacactatccgcgtctccttatttttcgttcaagaaatatcaggtagaagatggattgtctcataataccgtgtggtgcgcccttcaagatagttatggctttatctggctgggcaccagtgatggactgaaccgttatgacgggcggggcaataaagtgtatcggaatgttctcaacgaaaagttctcattagaaaacaattttgtagaagccttgatagaggtggacaagaatctctgggttggaacaaactccggactttatatttatgaccgcgataccgatcgtttctcttactttgataaaacgacgcagtataatgtgtatatcagcagtgagattaaaaagattatcaagacggaaaatggtcttatctggattgcgactttgggacagggattttttatttatgatccgaaaacagaggtgctgactcaaaatagtgttcagacgtcttttgtatgggacctctgtcagagcgctgatcggaagagggtctatatatcttccttacaggaaggacttttgtgctttgacgaaaacggcaagtttcttcggacgtatgaaatctcattggatataaatgcttccgatagttataaagtgaac

SEQ ID NO: 8159 - DNA, 41099 bp, Unknown
  gut microbiota DNA sequence
ttcaatccggctttacgagtccatgcctgtgggagagtatatcctagtgtaagagtattcaaacgtaagaatgaaccgtcttcaatagcatacgacatcgcaatgggacgtccgatagaggtaggattccacatcgttgcattctcgttgaacttcgccaatgcttccggattataacggatttcatttcccatatcatcaaaattacgccaacgcttgtcggaagcaacatccatactaagattattgccactattatcataccaagtagtcatcatgattttatttgcattatacacatcaaaaccatacatgaagttaaaaaacatactcaaatcaaaacctttataggtagcgttcagtccgaatcctcccgagaacttaggagtcgtttcaccaatgacagtacggtcgtcatccgtaatctgataaggattagcactattctcatccaccggagtcaacttcttgaatttagcattacccggacgtggcgttcccgacaacgggctggagtccactactccgtcttttagcttccatgttctggctgtagaatcaaatgactcgaaatcattcattgtataaaagccgtcattcacaaatccgtagataagaccgctggttccgcctacgcgtgcccggtaatcatcggtattgagtaactgtgtccctgcccatccggaagacagaatccattcattttctccactcgacagtttatcgattttgttcttattatgaccgatattaaaagttgcatttaaactaaaatcgttggtttcaataatatatcctgtcaatgaaagttcaatacctttgttggaggtctgccctacgttgctcatgagactcgtataaccagtatagccgggaatatccgaaggaacgagcaaatcttttactgtattccagtaaatatcaagcgaaccgctcaatctttctttgaagaaaccaaagtccacacccaagtttcgagtgatcgttgtttcccacttcacatccggattataaagataactggtattgtagaaacgataatagtaacgggaaatttctccccatcccgccggacggttgctgcttaccccataatatttggcatacaggtcggcaggaatccggtcgttaccggacgtaccgtagctcaacctcaatttcaagttggaaacaatcgggctgtctttcagaaaatcctcattagacatacgccaggcaatagcagctgccgggaaaaatccccaacgattgccggaagcaaattttgtagagccatcggcacgcaacgtcaatgtcgccagatacttatcttcatacccatagttgatgcgaccaaagaaagaagcgatacgcgaaggagatcccgctgaagaagaattctcataaggtgtacccaacgccaagttatcaaacgccttctccgctgtagtattggctgggaaataacgggtagtatatgtcttgccttttgtaacattatgtttcatttcctgtccgatcattaagcggaagtcatgtacatcattcaacatgaagttgtaattcaacacattgcttaattgccatttggaattctgactcattccccattctacaaacggctgattgttatggctccgggccgtgctggtatctattccccaaaaacgacgattctctgttgtactatattcataaccaaattccgaacggaaagtcagtcctttcaaaatatcccaagtcaatgctcccatcgtattgaacgtttttgaaattcgtttccggtagtttctctccgattcctctatcggattaaaacgtacctcttcatcgtaggactccggatcgaaataggtattatcttccggcaaggtcatgtattcgtctaatccccttgtaggagcttgacggagtgcagaaagcaagctcactccttccgttccggaaccgtccaccactttatgtaccacacgcgtacgatattcaaaggtcagtttatcaagaatcttagtattcaacgtcatattcaggttgttctgcttcagtccgttgttcaccattacacttggctgatcctgatggataaaagagaatttatatttcgttttctccgtacctccattcagactgatatctacatacttagccaccggattggtaccgaacacttcatcttgccaatccgtaccttcatcaccctgataaatatacagttcattagccctgccatacctatcaaaaaagccggtaggattagaacttctctgacgctcgtattcatactgcatcagtacgaactcatacgggtccatgacatccagtttgttcgacaaagtcttggtttgcaggtaagcatttacattgatgctcacccgtccttccattggctttttagtggtaacaagaataacaccgttcgcaccacgggcaccatagattgctgttgaagcagcatctttcaatacttcgatagactccacatcagtgggaggaatatcattcaggcttccaacttcaaaaccatccaccaaaataagcggagtgttatcctgcgtaatagatcctccaccacgaacaagaatctttatttctgcatccggcgaaccgtctacggaagtaatctgtacacccggaagttttccgaccatggcttcagccactgaagctgtcggaaccttctccaatacctttcctgacacactggcaattgcaccggtcaaatttcccctcttttgagtgccatagcctatcacaaccacatcgtccaactgtccgactgcttctgtcatcttaataagaatacctgatgtacgccctttcaatggctcctttatttcattcatcccgacgtagcgaaccaccagtacagcggttttcgcatcgggaacattgatagaaaaattcccgtcaagatctgtcgtagctccaatggttgttccttctaccatcactgcagctccgataacaggtcccaaatcatctgtcaccgtaccggtcacaacctgggcggaagtgcctaccgccaccagtaggagagtaaaaatacttatgataattttattcattacagtataagtttttagttacatatttaagtagacagcttttattccactgttcctccctgaatttgggcatgaacaatgtgctgtaccagattgtggagataaacctccagatttgaatagcgggaattaagcgtgaaaccggaagcgtctgccgaattctctttatccagcccatacgcatcttcccaaatatcaggtattccgtctccatccgtatctttcaagtttgcagatgatataccgttacccgatagctccggccaggcactcaccgcacccgcaggttttacatcatccggaagatcgatcagccccggtgaatctcccgcattgggagtcacactaccgatgtaggttgctgttccgttccgggtttccatggcaatccggtcgtcaatcagatcacgtcctttcgaacatcctgcataatcaacgacaagatcaaaggcctgctgtgcagaatgagtggttactctaccggttgccaaaggagtggtgagatgcatttctgcttttacctggtcattaaacgtgtcatcacatctcgagttatcaatttgcccatagataccttgcgtccaattgtccgctgtcacctcggcattgccttctaccacgttgccatctacatagaacgtaccccatttgtgcatcatcgggaaccatgcattcggtgttccatcttcctcatgacaataatcgtaagtgcggactccaattccggcaatccgataacggacataattgttcggagttgccggtcccggcttataatagttgttcactatgttcacgttcataccttcaccgccataacaaccgttgccaccccaattgtagaacacattgttacgcatatccatatattcgttctcctgtgttttaggacgagggccaagacggggcacacggcttccgtgatgtgccaataaattatgatgataagacacattcgtacctccccagtttccaccgtaaccatgcgtacctttgccgtgtcctgctgtacggagactttccgaagcaatacaccattgaatagtcaggttttctccaccatatactgacaagcactcgtcaacactccaactaatggagcaatggtctacaataacgttggtattttccatgcctcccagtccgtcaggctcaccgccactctcattaccgacacgaaaacgcaaataacgaagaatgatattatccgctgccagaactaccggatagctggcaatacaaattccttgtccgggggctgtttgcccggcaatagtcagattaccatatcgaatcctcaaatcacttttcaggaaaatcgtacccgccacatcgaacacaatggtacgggcgtcccgctgattgatggcatagcgtaaggttccttcctgctcaccgtcttccaaagtggtcacatgatacacttttccgccacgtccaccggtagtgacacgtccaaagccttccgctccgggaaatgccaataccgtagccgcatcgtcaccgatagtcatattggctttaccatactggagaatatcaacagtttcttccaatgtgacatttttcactgttactttagcttttcggggaaagtccgtttcattatctcctatttgcaatacaatctgtgaagaggtagaagcttcccgatcccaagtaatccaggattctcctgtttcaatcgtgtattcggcaccgtcaaattctcctaaatcaacgggaatcgacagcgtatggtaacgataaggcaggacaaattcttttgtcgtcagttcaagaaaggcttgcgatacttcttgagtcaactcaacggttctatcaagtacataatcaccggtagtcttgaaaacaatttttcctactctttccaatccgttattcggtgatatggaaaaaatgcgttcattacttgtaaaagcacgtgttcttcccaaagcatcttcttctacaggccgtatccaagaagcgtattcttcgtcaatcgataccccccagtctacattagccactaccgtaacagagaactctcctcctctgaaggagagtttttcttttgaataatcaagtaatatatccgggtctcctcctaattgctctacggcaatttctttttcaatggtagtgtttcccgactcctgcacgactttaatcatgccttcgcgtttctctccttgcgtattgtctgtaaaaaacagacgcaagtcggcactgccgttaccgtttgagcgggaaatgctcaaccaatctccgccacttgtcacggaagcactccattcaccagtggccgtcacagagacagtatatgatccttgtatattagaaagttttacactctctttggatagttccaatgaattggcaatcaatgcttcatcagcctcatccgaggaactacatgccccaaatacacaagataatagtaatatgaatataaatgatttcatgtattaattctttatctgttttttatattactcaagccaatgcggatctccgatacgtttcgtatatatctccgaactcttatctttgacaatcagatttccggttgcggcatcttcgaacaattcgtctttagttaccgtagcaacaggtacttcagttgtatcaactccccagttacttaggataaaatcactggtgcgatagttatcagaaaaatctttcaccgcttttccgtcaagatacatccatcttccttgtcccgattctgtggttcccgagaagagacaattcttaactgtcaatttcaataccgtcattgcactacctgtacgcaaatcaaagaaagtcatattggcaggacctaaacggacgaatgtactattctctaacgtaatattcatattctctttttggtttctggttccgccgattaacgtgtttctcaagccctgtgtcgctgtatgaaccgtagaatttcgtatagtaatattataaatcggattattggttcccagacttatcatcgaataattcctgtcaccggcattgaagttcagtaaccggcagtcatccaatacaaaatgatccactatttgctggtcgtctgttgaaatctcggcataccacatactacgtcgcaggccgtttatatcacaactcttaactgtcagttcttttacatggaaagaaagttgcgccagtctgaacatatagtcgtccgtgacattaatatccatgccttcgaaacgtaaataatccaactctccattgatagaagcattacccatgttcataacggtccgtgtttcgcctgtcgaaggctcttgtcctagtattgaaagcggcttctttatttccaaacggccaagttcataggtagttcctgctttcaggaaaagtcgtacttctgtcacttcctcattatcgaacatttcattgcaaaggttgcgcaaattagtgccgggagctgcataagtatatccttccggtacaataatcggcacctccggaactactgtttcttcattccagccttcagaaagtatagttaccgtgtaatcttgaataatcgggtgttccgtatcatttaacgggaaatcaattagtgtcgtatcattaggatgaatagggaaagaaccgtccatcggcttggattgaatgacatttccctgattgtccaaataatcgatacggacatttactgcctgcccgatagtagaggtttcaaaagtgacaaaatcatccgtatagtttacaccaccagtggaggtagctctgtcgcgtaccaattcgaccggtgactctatgaaagaggcatccgccacacgatagcccgatataggagcagaaacaatggcacgtaccgtcgaataactcctgtcggactttttatccgtcgctcttaaccggagtacaccggtacggctatacatacggatactcaaaggagtatcgaaaggcgaactgtactctaccggagaggagatttccacctttcttctagcttcggggtcttgctcgataaccagttcattcaaattgacaggcgagggaatcaactgttcaggagaaggagtagccaccaccttataagtgccattctccaacggaaaacgataatgagaagtataattcgccacatactctccgctaccggcattatagatgaaaagcggctttgtattaattcccacattcacaaaccattcatcatcattcaaaaacaactcgatctgcttcacgacagaagtttcatatctgtcttccgaacaggcagacataccaaacaggacggctaatcccactaaagaatatagtatatttttcttcataaagctttcaattaaaaattatattccttgatagtcaatccttgattaatagcagtctttaatatacgattacgagtaaaagactcctgcaaataactttcgtccagaaccggtatgctgactaccgtatgtttagaagtttcaaatgtaatattcgtatctaatacacgctttgtacgattcacttcttgcccatcctttatataaataagatctagtccggtagaattctgaccggtagtcggaaaagaataaacggatgcactgaaacctgatgcaagatctgcactgacttccacatcttcttgtatacactccccagtgttcaccatataaccgatgccaacattggtaaataccatgttcagcctgtcaaattgagtaatagccgcaatatcttctccgctttcggctggttgaaaagtagcttgccccacaattctttttaattccaagtttacccggctgaccgtccgatctgacatgaactcggtcacttccgaaagataaatttctttttgagcctgtaaatcttggtaaagaatcactttagaaagactgtctgttctttccaaacggtctgcattagccacggcaaatgtttgaagtctttctcctaaaggaacgtccacttccaaattaccgtcattcaaaggaagattctctccataaaccagagaatctgacaaatacacataaataccaatttcggttattccatgagcagcaaacgtttcaaggcttgctcttgtaaaacggaaaccaacggtttgaacttcaggtacatttgaagtatcagaattccattcctcatccgagttctgcgaacaagagacaagaaacagacacaatacaagaaatgtattaattagatgtttcataaatattagtttgtatagttttaaaaatataattataagtgataattctattgcctttttataaaaggaaaataaaattctaaggaggctttgctatcaggcgcaataaattcatgtttctcatttgattagattttcattatacatttatggttctattctcactaaagtaaattctctagtctttcacgagtgcaaatttgagaaaatagatgagaaacaaagagtaagatttagtagaaaaggagtaaaaaacggacttggttcaaataatacacattacctatacagatacatataaacgtcctactccctgaatgttatcatctaacattcagggagtataagtacaaaaataatcctattaaacgaaagttatccagttactatttgtcttgtgagtctatcttttccatcaaaccatttagaaattaatatccagtcatcaggtagattctatctatatccccaatcgttctttcagcaaccggtagccggaaaggctaacccgaagtttcactccattcttcaatagtaactgataggtttcttttccgaaaagctcgacccgggaaatctgcgtaacattcacaatcgtagaacgatgcacccgaacaaatgtatccggagagagatgagtttcaaaatacttcatagtctgctctttcaggtattcgcctgtgggggttatcagcatcacataatctccacatgcttgtatgtaaatcatttcgtctgccttcaccaaatgaatccgggagccgtctttcactgtaatacgatctatccattctatgggtgattcttcctgcggttcagccacattcacctgatgtacagccagttctttttccatttcctggttttgtacttcttcttttgtgactatcaagcggtaccatagagtaatggcaattaaaaccggcagtccgaacaataaccggaaagggattgtctgcgcaaaaggaacataggacactcctacaattctcaccattatgtcacagaccataaaacttcctgccagccaaagcagacttccaacgataatcataattacatccgtctggaacaacgagacaagaccgaccacaaaccatgccagataggcgatagccgccaaccaaccgatcgttactattccatctaccaaagcgggaagataatcgtttccggtgtatccacagactaaagctacttggaatacaaccagaatcaatgccagcaccagcatcggaatccaacgaaaaggagattctataatcggatgtgctttcatacgctagcctttaacctccaagcctccgaaagaaagtgttccccgaattactaatacactctccttatttatatttccattctgccaacgtttatcatcacatcctccaaagaaagcattgcatttaaacacgactttccagtcagaagggacatatatctcaactcctccccaactgcaatccaaatctatgtatgtttctccgggtgcaatatgggtatggcgcaaatcaatcgtcgttcctccgaaagatgtgcgaatgacagctcctttaaacaattcgtcaagcactacgtgacgggcagctccccaaacattttcggcacgtagaaaaccatctactgactctgcctgctgttgctcactttcaaaattcatgccgggttgtccctgatgcatcttcatccacttctgacggtgctgcatggcatgatggtgcgcccagtgcccccgcctgttcttgccggatttaaaaaagaataagacacctgctgttatcagagcgataggccataccattgcctgcgaattttcaggcaaccatgaaagccctccaatcaaaaaatacacacctatcaacaaaaggatgattccaccgatgaaatggcggcgaatcatagaatatatacctaatataataaggagtgaatgccaggatacgatcatatcgaagacttcagatgtaatccatcccatattacgggcaaacagcagaatcccggaaaggataaaaagcgaagctatcagtgttttaccggaaaagcctgtagcagtgggaaatttttgtttctcttccattgtctctattattaattgattaatggttcaaagatacatcatttcccactgcttctacagccttttctgttgatttccggtataaattccgatgaatgccggataaaaaccggtgaaactgactataaagtatcttacctgataaagataattcttaatacgatgtttgcagattacttctttccaccgctattttgtttttcaataatgtcatgcaccaaactattcatatacatttccagatttgtatactggccatatttatctatcgtttttccattgccatcagaagtatcatgaggatttaatccgaattttctctcccatgcatcaggcataccatcattatcagaatcaatcaaggcacttctctgtaaaagaactggccatgcggaaacattttccgaagtatttaacgagagcaaatcatcctgactatctatcaatcctggtttcggatatccttcacttttccaaatacctccttctccattatgaacattcaaacctttatatccagctgttctcgtacgtgtttccttcacaatacgtgcatccacatcatctcgatgtaatgaacaccccgcataatccaacacttgtttataagcattgaaagcagaatgtgtcgttaccgatgcaaattcatgaggtttgtccaatcgaatcgagtctttagttttttgcgtaactactttcttataattattcgaaaattgattgtaaactccatattcccaattattagctgtagccttttggctgtttttatcatctgcccctccatctacaacgttaccatcgatataatactttccccacagataccccccactcctattttctgttgcatctatagcaaaaatccgtccacgtttagagcctgtcaccgttgcaggaccaggtttataataattgttcactatattaatattcatcctttcaccaccatacgaactgttcataccccaattatagatcacattattgcgaaaatcgacataatcaccatcacattctccattcttacgtaccttagctcctaatccgaaacggggattccggctatcatgatgggctaataaattatgatgataagaagagtgttcacctccccaaattcctccatatccatgaggacctttggtatgtccacctaatctaagactttcagaaataatgcaccactgcatagtaaaatcatcattttcataaaaagaggcacattcatctgtacaccagctgatagagcaatggtctataatcacattccttgccccttttcctcctaaagcatctgcaccgtcaggatgcacacattctttattacccatacggaaacgtaaaaaacggagaattacattactagcataatttgtcaccggataacccgctatgcaaataccgtttcccggtgcagtttgtcccgcaatagtcaaattccctttccgtatttttaggtctttatgcagaaatattgtaccggacacttgaaaaatgatagtacgaggaccatccaacttttctataccataacgtaaagtgccaggcatcccatcatctgctaaagaagtaacaatatacacttcacctccacgtccgcctgtagtcatacgtccatatccttctgctccgggaaaagcagccaactctccaaaatcaagagtgttaccaataccagaaaaggcaaaaacagcctcatttccgatcagagttaataaaacggttagacaacgaaagatcaaattcatattcatatttttatttatggaataatacaaaaatacaccaaatttatttattgtactcctcctttattctgttcctcaacaatcttttgtaccaagctattcatatacatctccagatttgtatatgttccttcctcatctactgttttaccatttcggtcagaagcatcattcggattcaaaccatactttttttcccattcatcaggcataccatcattatccgaatccttcagaataacaccttgtaccaattcaggccatgctgaagattctccaacaggaatcacatcatcctgactatcaatgatacctttctttggataccccacgcttttccaatcaataccttcaacaactccctgaccattgtgctcgttcattccctgatagttcgcagtcccggtacgagtctcctgaacaatacgttcatccactctatccctgtgcaaagaacaacctgcataatccataacacgctcaaaagccatacgggcatcatgagtggtaacagtacctgtttctacaggagtagtacgtttaagagctttttttgtactttcatccaacgttccatactttttatcaaactgattataaactccgtactcccagttatcctttgtagccttcatacaacgatcgtaatcagccgcaccattaatttgcccatcatccaccacatttccttggataaagaaatctccccaagtgtcaaaaatggccggatatgatttcttatccgaatcactcacttttttgtcaatggcaataatacgtccacgtttagaagtgccagtaggagtggcaggccccggcttataaaaattattcacaatatttacatgcatggcttctccaccataacaagagtttccacaccagttataaatgacattattacgcatatcaacaatttcattctcttttgtcgaattaactccaggacctagacgaggattacggctatcatgatgtgccaatagattatggtgaaaagaagctttcatacctccccatataccaccataaccatgaggacctttcgtatgcccacctaaacgcagactttcagaaataagacaccattgcagtgtaaaattctcattttgatagaaagaaacacattcgtcagtacaccaactcatagaacaatgatcaatcattatatttctatgataccgaccgccaaaggcgtcggctccgtctgcactgacatcttctttatttcccattcgaaaacgcataaaacggacaataacattgtctgcttccaagaaaaccggataaccagccaaacaaataccatcccccggagccgtctgtcctgcaatggtcaaatctccattcttaatctttaaatcaccgtttaaatgaatagttccggatacctggaaaataattgtacgttttccgcttaatttctcaataccataacgtaaagttccgttctgcaacttgtcctccaatgaagtaacaatatatacatcgccaccacgcccaccggttgtgtagcgtccatgtccttctgccccaggaaaagctggtatcttttcatcttgagtttctccagtcccttcaggttctttaggcaattcatttgcgtcaccaccatcagtacacgccagaattccaaaagcaaacaaaatggccaaacaccatttacttagaattatatccattttcatacattattagattaatgaggacaaaagtagacaggataaagaaaagtcttgttcaaattttgtttttccaaatcattaaaatcgataaaacaaggcttttcaagctagcatgtgtattttttgttttaaaactattctaaaaatgcctgccggctattaaaaaacaaaaaatactaggtgaaaaacaaatattgcacatatctatattcacattcatatacttttgtaccgaggaattaactctaaatgtgagtacagaatcaaaacaataaccattaattaataaacatgcaaagaatgtctaacaaagtgaaaaacatgcgcagttggctgctaatgctatttgcagcgatatcgcttggcgtatcagcgcaaacaattaccgtaaaaggtaatgtgaaagacacaacaggagaaccgatcatcggagcttctgtagtagagaaaggtaatactaccaatggtacaattactgatttagatggtaactattctatcaaggttccttcaaaagcaacccttacaatttcttatatcggaatgaaaactcaggatattgctgtaaaaggacaaagtcaaattaatgtcactctttccgatgatacacaagcattggacgaagttgtggtaattggttacggaaccgttgcaaaaaaggatttgactggttccgtatcttccgttagtgccaaacagatagctgccattccggtatcttctgcatcagaagcattacagggaaaaatggctggtgtatctatcacaacgactgaaggttctcctgatgcagacgtaaaaatccgcgtacgtggtggcggttctctatctcaagataattcaccgctttatatcgtagacggatttcccgtatcaagtatctctgatattgctccaacagatattcaatcggtagatgtattgaaagatgcttcttctactgctatttatggtgcccgtggtgcaaacggtgttatcatcattactactaaatccggtcaagaaggtaagattcaggtaaatttgggggcttcgttcggtgttcgtaaagttactaaaatggtagatgtactgaacccttacgaatatgtgttatggcaacaggaaatagaccaggaagggatgaaatatggtatgtttgatgatttggatatttacaaatctatgaaaggcaccgactaccaggatgagatttttggtcgtacaggaaatcaacagcaatacaatgtgagtgtgagtggaggtaataaagataccaaattcagtgttagttatgcccataacgaagaaaaaagtatcatgcttggttcaggtttctcaaaagagaatattaatgccaaacttaataccaatatcaacaaatggttaacaatggactttaatgcccgttttagttaccaaacgattgatggtatcagtggtggagcagatgcaaacgaatcaagtgcagccaattcactaatatcacgttccgtcatctacaaaccggtagaggaaattaatacaacaagttcagacagcgatgatgatgaaaatgtgaacaatgcacaatataacccactggaacgtttaaatgcaacttacaagaaacaaacccgcttgcaacaaaactataacgtaggacttaactggaaaccaatcaaaggattaacattcagaagtgagtttggttatggatggagatataacaatactgaccaagtatggggagtggaagctacaagtaattctaaatatggttattatggacagccacaagctctgttaaataaggtcgttaataaaaactggcgtaatgcaaatacagtaacgtatgatactaagttcttgaataacactcacaaattaaatgttatgttaggacatgaagtttcaagtagttacgatcatgaaacgattaatacttctgttgctttttccaaatatatgactatcagtgatgtcctttccggtatgagtaacggaacggcattgcctacctctacttatattggtttcaaagacaatctattatcgttcttcggacgtgtcaactatacgatacaagacaagtatctgatgactttcacaatgcgtgccgatggctccagcaaattctcaaaaggaaaccaatggggatatttcccgtcattagctttagcatggagaatatctgacgaagcatggatggaaagaagcaaagaatggttatccaacctaaaacttcgtttaagtgtaggtacagctggtaataaccgtattaaatcgggtgccattaattctactttctcattagcagagacaagtgataagaacatttatttcaatgaaacaagtgctgttgtattacaacatgcttctaatctttctaatcctgacctaaaatgggaaacaacacttacccgtaacttaggtattgacttcggattctggaacaaccgtttatccggtagtattgatgcatactggaatacaactaaagacttgttgatgaatgcaacaataccttcaagcactggtttttctacccaatataagaactttggacagacatcaaataaaggtatagaattagcattagacgcagtcatagtagatactaaagattttggtttaaatgccaacttcaatatttcttataatagagccaaaattgataagttagccggaggacaaacctggcaaagtagtaactggggaggcaaacctgccggacaaaacgacttcttcattgaagaaggaggacgtctgggagaagtatatggatatgaattggatggcttctatactactgacgatttttcatgggacggcagcaagtggatacttaacgagaatctcactgatccgacagaactgattaaatataacaattttggtccgggctcactaaaactgaaagctgatgaagatggtaaatttacgaagaaacgtctaggaaatacagttccaactgttaccggtggtttcggtataaacatgcgttacaagaactttgatttatcagccttcttcaattactctcttggtaacaagattgtgaatgcaaccaagttaggttcaagttactacaatgatactaaaaaaggatggaatttaaatgataactttacattagctaaacgttattcctggattgatccgtcaacaggagaaaacatgctgaaaagttcatatatcaagagtaatgggcttgattatactattaatcgcttaaatgaaataaatgccggagcttccatgtataatccaggttcaatcacagaaatgccattacttgactgggcagtagaagatggttctttcctgcgtgtcaataacatttcaatcggatatacattacctaaagttttcgtaaacaaaatgtttatgcaaaacgtacgtatctacgtgactggttacaacttgtattgtttcacaaaatactcgggagcagatccggaagtagatacacgccgcagtactccaatgactccgggcgtagattattctgcatatcccaaaagccgctcatttgtagggggtattaatgttacattctaacccataaatagaaaggaaatacatatatgaaaacttatataaaatcaatattactaggaaccggattgttcagcttgctttcatgcagtgactttctcgaccagtcatccccttcggagttgaaaggagaaaatgtttttaactccgttgtgtatacagaacaggcgttaaataaggtatatgccgatttgacatacgaccacacttatggttcccgtattcctatcaatttcggtaataatacggatattgaactggcaaatgcaaccaagcaatcggaagttcatcaaaattcagaaagaggattaggaaattactatctaagcaaaggatgggataaactcgatacgaactgggaaagatgttttgctattattgagaatgccaatatcgttattgacggtattcgtaatagtgacttgttagcagaaggaactaccacccgtaaaccaatgctccgttatttaggagaagcattaaccatgcgtgcaatggtatattatgatatagttaagaattacggagatgttccaatgcgctttgagccgactcaacctgatggttctaacatgtatgcaacaaaaacagaccgggatattattttagaccagttgttagatgatctggacgaggctgccaattatcttccatgggcaggtgaagatggatatacaacagaacatgccactgccggctttgcacacggtctatttgcccgtatcgctttatcacgtgccggatatagtattcgcgaacaggcaaaagcaggttatagaaatcatccgacttgcagcgacggacaattccctactcaatgtccgtctgtagctgaagttcaaaaattacacgaacgtgcattagcacatttggatattgtagtaagcaaacaagttcataaactgaatccatcttttgaaaaccaatgggatttaatcaataaacggacactggataccaaatattatgaaaatctatatgaggtagctcacgggttaggtagatctggtgaaatgggttacagtaccggagttcgtatcaatggtgccagcaacaaatatggcgcaaaaggtaatagcagtggtaatatcagactcacagcttcttatattttatcttttgataataacgacagccgtagagatattacatgtgcttactatgaattaaaacaaacgacagtagacaataaagctgtgataaaagagacattgctttctaacgctcctttcagtgcctatgtagcaaaatgggacattcgtaaaatggatgatgcaatcatctctctggcacaaaatacagaccagaagtgggctccaggtattaactgggtagttatgcgttattctgatattttattaatgtatgctgaagtgatgtataacttgtatggattagaaggcagcaatcccaatggtaccactacaaaaactgcacttgaagctttaacagaagtacatattcgtgcctttgacactgctgctcaaaatgctgctaaaactgcaatcgaagcatctgcccgaaacaatttcatggaagcccttgaccaagaacgtgcatgggagtttgcaggtgaatgtgttcgcaaatatgacctgatacgttggggaacactttccgaaaagctggatcaattcagaacagactacaaagctatgattgagactgctcccaaattcatcttctataaaatgaagacagatgatccgtattctattgatatgaatagtatcacttggcgtactgaacaaattcctaatgagcttagagaccttgaagatccagataaagtgaaagaagctgctaaaactgcaggttatgaatatgttaccggttggggaaccaactatgaatggaagaagggagtagcagataccagtaaaacaaccaatgatttaaatcttgagtatgtagatgatatcagcagtggtttaaatgctacaatcaaaaatagacatctattaccgataggctccaaaactgtctcggatgccaacggttacatagagaactcttatagcttctaataaattatgaatatcattcaataattgatctcatgaacatgaattttatcaaatcaacaaaatacacggttttatcagggctttttatagccctgaccgtactgctttcatcgtgtgagaaggcaaatgattgggaaacagatagtgcctataatcgtctgttccgtagtactaaactggcagtcagccctagcatcaatgatgctgaagttatatggaataatacaatcaatactgattattatatcattgaagtgaatacttctgaacttacagctgaaaattatcaggaaggatctgttatcttcggagaggataagagtataaaaagctctccgtacactattgaaggattggatgcaaataccagttattatattcgtatccgttcatgctctgaaacagcttcaccttccaaatgggtatatccggaaaatacaagctttaagaccaagacagaacaattaattgaggagatctcaaccatcactggttctactgccattatcacatggaaaaagaatcagagcgtaacccacttcttactgacgaacccagagacttcagcagtaacaaacattccaatttctgcggaaatgaatgcagaaggtagttatcaacttacagatctggcagcttctaccacatacactatcggtatatacaatactgttaacggtgaagatatattaagaggtgagaaatcattccaaactacagaaaacttcccggatggttacacacctgtatatcttactgctgccgatgatccaaacgaggtacttgctgcacaaagtggaaatgtagttctagttgtaccacattctacagcaatcacattcagtaaaactgtcattgtacctgaagctgttacatcaatcgtattctggggagcaagtggcggagctgaacaggcaacaatgacaactaagactattttgactttaggcaacaaagatgtggtacgtttctataatttaaatgttgatgcacaaggagattatttctttaatcttcaaaaaggtgcagatatgacagatgatatatcaaccaatatcaacactttattaatagaaagctgtacgattagtaactctaaatcattagtaagagccaaagaaggtataagcatccaaattaataaagttagtgtaaacaaatctattatcaatggttgtagcggagatatgtttgcttataaagaatcaacggttgcccaaattcctgttactgaaataactaatagcaccttgataaaaccacaaggacgcatcttctatgcaggaaatgctgcttctttctccatcgattattgtacgatgtacggctggggaggttcaaaagcaatgttagaactgggagataaaaataccctaggcatgtctttagctatcaaaaatacaatcttggctaatggtggaagcaatagaaaagctcataatgcaaatgcagctgctaatcttagcctgactatcgagaaagtttatggtaccaatgacatgacattccatagcactcttggtgacgtaaccaaatatgataagccatctacagaagtttttgaaaatccggaagaaggaaacttcaaaattatagatgccttattcccaagcagcattggtgaccctcgctggacagaataataaaagagagtagaatgtcagaaaagacatattgaataaaaaaggctatcagataaatgatagcctttcttattatcttcccactttatcccgatactccgtaggcgtcattccaacttgcgccttgaaacatttactgaaataacgtggatcattaataccgaccatatatgaaatctgcgtcatattaaactctccggtttctattaattgcgtggcccgcttgatacgcatttctttgataaattcgataggagccagtccggttagtgttttcagtttcttaaagaagacagagcggctgacagccagttcccgaaccaagtcatctaccaccagttcaccattatccatattctgctccattaattccaccaatttatccataaatttgcggtcgttgggagacatttcgagcgttgcaggtacagtttcggaggtgtcttcttctgccgatggcacatccgtagcaacaggtgcatcctcctgaccggcagagatatggatatgcatcaggctatcccgatagaaactttgcagtttcttacgctgcatcaacagattttccacacgggcttgcagataggtagcactgaaaggtttcgtgatataatcatccgcaccatattccaatccttccagtttactttcaatcgtagtcttggcagtaagcaggataataggtatatggctggttgtcatatccgcacgcagttcacgcgtcatttcaataccgtctttctcgggcatcatcacgtcactgataataatatccggaagatacttcaatgctttattcgctccttctctaccatcggcagcttccactacccggtacatcggagaaaatatactacgcaagaattcacgtaactcctgattatcttcgactaataacatcagctctttggagttttcttctttcgcagcatcttcctcataaacagcttcaattttctccgaatcatcgggtatcagcgtttcagactgaatggaagagttggctatatccaccacttgccccatccttaccggagcttccgcatcttccaggataaactcggtttccttatcataatgttctttccctttcaggaaatcgactttgaaacaacttccctctcccaaacgactatccacggaaatagtagccttgtgcatctccacaagctctttcaccaatgaaagtccgatacccgtactagcctgattgaacagattcttgtccaccagattctcaaaacggacaaacaaggacttctttttattttccgcgataccaattccctggtcttgtacaccgatagaaactgtattctcatcttcacggataaacatcgttatcatcttgccattcggcgtatacttaaatgcattggaaagcaggttgaatacaatcttttccagcttatcggcgtccacccaaagataaagatgctccttttccgtctgaaacaggaaatcaatccgatgctcttcggccacagcctcaaaattatccatcaccttgcgcacgaaaggaacgatgtccacacgctgtacctgcatcttcatcttcttgttctgaatcttacggaagtccaatatctgattgacaagacgaagcatacggctggtgttccgttcaaccaccaccaactgttcgcgggcatcagccggcaatttatcattcttcaagacttgctctaccggacctgctatcaacgtaagcggagtacgcaactcatgggatatattcgtaaagaagcgcagttttatatccgaaatctgctgttcgaccgacacttcatgcttcaaccggtaaatggtgaacaggatataaacggccacaagaataataatcagaatgaaaagtatataaagcacgtatgctatcggcgtttcccagaaagaaggcagaatgacaatatccaagatacgttcgttatccacccacacaccatcgctattggtagaacggacgcggagcacatactctcctttcggaagattcgtataagtcacgctacgctgtttgtcggcaaaggtccactgtttttcaaatccgtcgagaatataagcatactgtatattctgcggattggtataatcgagtgccgcgaaatgaacggagaaaatattctctttatgcgaaagtaccaatttatcagtgtcgtcaatatccactttcaataatgagttgccgccgggggtaatgtcctcattagccactgtcagtttggagaatacgataggcgggatatagctgctcttacgaatagagtcaggattaaatataaagactccgccactggcaccgaaaagcatgcttcctttagcagttaatgccgaagcggcttcactaaaacgtacggggaaagtgatactacgttcgtcataactttcaaaacgttcttcagaggggatgaacttacaaattccattctccgtactaatccatagattctgcttactatcttcgcgaatggaaagcaggacatcagaaggaagaccatccaatacggaatatgatttgaattctccgtgaccgtccttactgatagataccagtttgttgagtccgccgccgaaagtagccaggtaaagttcctttttcttggtggagataatccaatggacatcattattactcaaactttgcgtatcattcggcatacgggagaaatgatagaacttcacatcctccggtttcttaaagttctcatcaaaagcaacggcacccgtagttgttcctacccacaagcgtccgttgttatcggaagtgatgaaacgagctttgtaacaaggatcgatgggataacctttcaggttgttccggtgattgataaacaatgtctttccagcttcattctccgtgatataattgatacctccggcaaaagttgccagccagatacgaccataatgatcttcatagacgcaatatacattattatcgctcaaactgtacatatcatcttcacgatgaagataacgggtcagcttataagacattccgttggaagaagtcggctcggcacgaacaaggccgtctccttttgtcgcaatccagatgattccttttgaatcctgaataacaaaataaacggttcccagcatgggagtatcggtggtagagatcgtgccgctttcggtgaggtatcctttataagttttgccggcatcatacatacgaagtataccgtctttcaagccaacccacaaattacccagtttgtcttcacacagggcacgtacctcattatgcaacgattcgtgttcatgaggcataggggtcatcatcgcaaagggtacatttcgataagtcactttctccaatcctttagagtgggtacaaagccacagattaccttgtttgtcggaaaaggccgaatgaatcttattggaaaaacgccagtcacggctacccagtccgttatagaaaggaaccaagcattttttttgaggatcgaagtaagagaaacctcctccgtaaggatgtacccaaagataaccgtttacgtcttcatggatatgaaaagccggacgggaacgttcgggattgctgtattcgataggaatttgttcacgggtcaccactccggtcgagggattaaaatgagctacaacacccggttcttcctgttcgaaccacacttccgaagaacggtctacgtatgcagaaaggatcggctttgcgggtaacgccttacaagtcaggaacgagtaatgtacgtttgtttttgttcgcaggttgtaagtaaagaagccatccgaatcggtagtaataacggatacgtccggtgcaatgggatgaatggaggtgatctgtccttttgtgggaagctcgatcaacgtaaactctccgctttctttctgataagaccagatgcgtccatgatccgaggcgaagcaaatatctttatcacgttcctgcacagcatagaaagcctgattcattccgccaaactttccttttgtctccgtaaaataagaatccggctctttctttccgggatggatcataccgaggccattatccgtcagcaaccagtcattgccggctttatcttgatgaactttgaatacatgtaaagaaggaaacagttctgtcttgctggaataaatatcccatgtcaagcgattattctcatccggatgcgtcaggatgcggatggctccgtcgttttctgtcagcagccaaacggttccgttgggcatcacttcaatggtatgcacattgaaagcactcccctcttctccggcagcaggcacttgctcgaatgtctctgtcttcgggtcgaaacgatggacacggttgtcataggtcagcaaccacagaaagccgtaacgatcttcatacatacggtctacacggttattggtcagactgatgtagtttccctgacgggccttgtatgttttgaaagtataaccgttgaaacggttgataccatcccaggtggcaaaccaaaggttgtctttgtgatcctgcaagatgttcatcactgtattttgggataatccatcttcagtagaatagtgggtgaaaaaacagtgctgttgcgcgtatgttgaaaacgcaatagctaacaaaagaattactgaaattaaggttttcttcatcatatcactcggttctgtggcgtaaagatagaaaaatacttgtagtatcatgcaatctttagcggctatttaacagaatcaggccaacatgacttatgtctctattttttttaaaatattaggcaatgcggctatcatgtaaaaaggaaggttgataagtttgaaatgttttccctcattagtaataacttcgtctatagcataattccccgaccagattcgaactgccaaatcatgctccgtttcattcataaactgatgaatggattttaagtgggcgttgtgtccgtttttcacttcaattggaatgattttcccgccatatatgtatacaaagtccacttcagcagaactcccccttttagcccgtacccaaaacttttgcttcttacctacttcgttggaaagagcttttaattcctgcgcaacgatttgttcggcagccatacctctccatgtatctgtcaaatctttactaagaagatattctttttgtatttcagccgcataatttactagtcctgtatccagccagatcaacttaggagcgcgtttcaaatctgtggtagccggcattatcgtatgagtggtaggatataccaactccagcaacaatgctttttccagagtacggaaagcctcgcccgtttcacgggctttgtaagcggactgtgcaaatcctcctaaagtgacagcttgccctgcatatccccaaccttcttccagtatgtaacgaatcaccgcagcttgcgtgtttgtctccgcatacttttccacatcattcttataggcatttagcagttgattgtaagtatcggacaaggatacaacatcccggttggcagcatacctcgctacaatttcgggcatcccgcctatcagtgcataactattaaaaagtagcattaattgttgatggaaagcctccggcaaacgtgcttccaaaatccaatctacaaaccgcccttctcctattgcctgaagaaactcaataaaggaacacggatgcaaagccatatactccacccgtcctacaggcaacgagatgtgtttgtccaacatattttccagaagagaacctgctgcaataacatacaactccggcaattcctcgtaaaagtaccgcaacaatgcaacagcttgtggcgacgactgtatctcgtcgataaaaagcagggttcgtcccggcctctgcggcttattatcatacaaaaacaataaaggcagcagcatctttacatcatcagtagactcaaacaaatccttcgcctctttcttttcaaggtttaaagacaggaaattatcaaattctttgccaaactgctcaacaatagtggtctttcctacttggcgggctcctctcaatatcagaggctttctattatttttctctgcccactcatgcaactgattctgtatccttcgttcaaacatatcgtaatttgtttatttacagttacaaatatacaaatttgtttcattgcaggggtgaatttactcattttttgtttcattgcagaggtgaattagcttaatttttgttccattgtaggggcatattgactatcagttgtaccagctcaataaagtagtgtaccagttgagcatatgcagttccgccctttcagggcttatgtttggcgtatacctatcacgtagggcaatgccctacgctatataatagaaggctttcagcctattaaactacttccgaaacttgagtaaacaatcatatctgttcgtcagatcaacgctttaccgttatcagtttatttccgttctctatcggattccatccgtcttctcctgccaaaactgcatttatctcatatcctttcagattcttcaattgttgggagaaagcagcgcgcgctttcggatgggctccttcgccccgactttcatattcggcataaaagacagttttctcgttttccttcttgccccagttgttccagccaatgggaagaatatgtttccccagttcgcaacggatgaatacagcttgcgcatacggacgccaaggacgggacagatacacttttgtggcttccggttccgcagtcagtttgcaatcatagaatacatagccatattttttacctttatcagtagagggagcggtgacataaccatcccgtttgctatgaatgtggcaacggttgaaaacagccgtagaccaaccgaagataaaatctaccgttccttcgatgtagcagtcttcataatattggcggctttgcttgctgtatgtatagagggtatcctggaagccgaggaaacgacagttcttaaaatagacacgatcggcagatacgaaacaggcaactgcttgtcctacgggacctgatgagttctcgaatgtgatattctccgcataaaaatcgggggcatagatgtaacagctggacgaaccggaagttcccatgttctcgccgaatacatttttcttgtttgcaaaaccgtcataagtcagtatcgcaccgtcttctccaatcaaagagatattaatcttggattcagggatgatgagcttctctttataagttcctttacgaatcaggatagtggtacggacgtctttgcgaaaatcgggaacagcattgatagcttcctgcacggtaaagaaatcaccgctaccgtcttgggccactacataatcgaattgacggatatatttcgccagttccggaatttccttgccgatggcatccactgccagtccggtaattgttcgtgctccgtatacgtttaagtgagtattgtcttcacgacctttcgggaaagccggcacctgattgggttcgacaaacatgaatagtttctttgattctactggtccaagtccctgcaccaggtcgtgggtgattttgttcatgtcgatgaaagtcactcccagttcttttgccacattacggggagcatccagataggcaccatgcgtatcgaacaaaacggttccttctttcggttgttccttttcccccggtgtgcggcggacatcttttgcgatggcatcatccttcggctgtacgaagtttcgacggacgatagagttgaacaataccggtattccacctttggcgcgggtttcattcacataccgacgaagattttcatcaaaagtactacctggatcggtgtgacgggtagagtctgctttctcatcattatggccgaactggataaagacataatctccttttttcactttagaaattactttttcccagcgtccttcgctgataaaactcttggaacttcgaccgttggcggcatgattgtctatccgtatgtcttcggagaagaatccgggaagtaccattccccaaccacgttcgggatttcctccgtctattttcttgttagccattgtcgaatcacctatcataaagatagtgatgaccggtttgtctgcacgaaatgcagaaaaaagaataagagccgttgcaagtagccctaccattttaaccctaaatgttttcatattcttcatcccctcttacgagttttattttttgtttttatctgccacctgcaacgttttgcttgtatcttacttgcaatcaactgattgcagcgttgcagatactgttgcagataccgttgcagatgtttatctgcaacaccttatataatcctgttttgcacgcaggcaaattcagtttccacgtataggaactacagtttccccgggaagaaacgctagtttccacgtagagaaacgacagttcccacatagggaaactgcagtttcctgccttggaacgggagtttcaagctagggaaagcaaagagccaagcccggaaacaaaaatttcaagctgcataaacagtcggaaaccctacgtgtttttatttataaggataccaattactgctttccttaaagatattttgcggagtatacttcattgcctccttatttgtcaactgtttagcccatgccacacgcccggaagtatctgcgcccgcacccgtatttccgaattcggcataacgggctgtcttttcgttctccggattcttccaattgtgccatccttcgggacggatatgattgccaaactcacaattgataaagaccgttgccgcataaggacgccacggacgacccaaatatacttttttcactcccggagcggccgtcagcttacagtttttaaatacataaccgaattcttcactttgaggagtggaagctgcagtgatatacgaatcacgtttactatgcagttcacaatattcgaataaagcggtggaaggaccaaaaataaaatcggtagttccttcaatatagcaatttgtgaataagagacgcgctccttcggttcctgtataaatagtatcctgatttcccaggaaacgacagttgacaaacatcagtctgtcaccttcggtgtgaagagctaccgcttgccccagtggagccgcattattttcaatcgtcaggtctttgaaagtgatgtcatttccctccacttttaccgtataggtgcggaaagtacccatcttattgatattggcatggtcatcataagtgataatcgttttttctgcgctttcgcccactaattgcacattctttacccaggaaggaatgaccagtttttctttgtatataccgttcttgatatagatcgtcaccgtataatccataaaagcgcggacagcttccacggcttcctgaatgttacgatactcccctgtcccgtcgcgtgccacgactaatgtgtctttgcgttgctgttgttgtgcataaacagatgttgctcccacacccagtagaagcaaacacatcattcctttaaaaatagtccttttcattgtcggaaattacttttgtaaacgttcgtattccaagctagccataataaaaggtcctacggctttaggatcgttattgcggatagtttcattaatataatagtcataatcgccggaacgatagacctttcctcccaatcctgccactgcacaagccttggtgatggttaccaatccgttcttgtccacttcgataaaattatccaggaatcctttgtagcctttcaatgccacatccagataagacttatcaatatatcccagacgaacagccttaaagagcgaataaataaacatagcggaacaggaagattctacgtaattacccttatcaccactccggtccatcacctgataccatcctccggtcttcggatcctgaagtttcttcacctgcacagctacattattcaatatatcaagcagggaatctcttccggcttcatgctgcggaataaattcgagcacatccaccaatgccatcgcataccatcccattgcacgtccccacgtatgtttcgactgtccggtcaccgggtccgcccaacgttcggtgcggcttacatcgcacgcatgacgataaagaccatttttaggatcgtacgtatgacgggcacaagtgacaaactggttgattacatctgcatagtcctgcggaagattattacggaatgcatattccgcgtagaaaggagctcccatgtaaattccgtccagccacatttggtggggataaatctttttatgccaaaaaccaccgtcctcattacgcggttgtccttcaaactggctataaagcaggtcgagcgctttcttatatttaggattcttggtctgctcatagatacggaaaaggatttttccggagttgatacggtcgagactgtaatcggttaatttataagcggtaatgcttccgtcctcgtgcaccattgtatccgcatacgcgatggcgtaatcacgaattttcttgtcgccataagcgtcgtacacatcgagcatggctcccagttcaagtccgtggcaataatcccacttcagtttcggctgaaagtcgagctgccaggattcggggtaacggatcatttccgattcagtcagtcgcacagaccagggaagcttgctatctacctgttgtgccgatacggaagcggtcattgtaaccaataaagccactataaaaaaattataaaaaggagttcgtctcatggtttgttattttaaggattcaacatagtcttttttcacggtacgaaagtagtgtttttcctccaaacccagtgggattttttagtcaagtaggtgcattttttgtttttcgtgcacggaaacgactaattttgtgcacgcaaacgtcaaaaatgtccatttttgatgcaatatctcataaattaagagtttcgttttggaagaaagcaaaaaaggtcttacttttggcacggtttacaactaataccctctggggaaacacaggtaatttatcattaaaacagagaaaaaatagaacagaatggaagaagtatttaagtacattatcggtcttggagcggcagtaatgatgccaatcattttcacgattttaggagtatgtatcggtattaaacttcccaaagcgctgaagagcggtttgttggttggtgtcggtttcgttggtttatcagtagtgacggcattgctcaccagcagtctgggtccggcattaagtaaaatggttgaaatctacggattggaattgggaattttcgacatgggttggccttctgctgcggcggtagcttacaacacttcagtcggtgctttcatcatccctgtttgcttgggagttaacttattaatgttgcttaccaaaacaacccgtaccgtcaatatcgacctttggaactattggcacttcgcatttatcggtgctatcgtgtactttgcttccgacaatatctattggggattcttcgctgctatcatctgctacatcattacgctggtaatggctgatatgactgctcctgctttccaaaagttctatgataaaatggacggtatctctattcctcaaccgttctgccaaagtttcgttccgtttgctattgtaatcaataaactattggataaaattccgggattcgacaaactgaatattgattctgaaggattgaaaaagaaattcggattgatgggtgaaccgctgttcttgggtatcgtaatcggttgcggtatcggcgcattgggttgtgccagctggaaagaagtattggataatattccgggcattttaggactgggtatcaagatgggtgcggtgatggaattgattccacgtatcaccagcctttttatcgaagggttgaaaccgatctctgacgctacccgcgaactgatcgctaagaaatataagaataacaccggtttgagtatcggtatgagccctgcactggttatcggtcacccgactaccctggtggtatctctgctattgatccctgtcactatcttcctggctgttatccttccgggcaaccgtttcttaccgctggcttctctggcaggtatgttctacctgttcccgatgattctgcctattacaaaaggtaacgtagtgaaatcatttattatcggcctggtggcattgattgtaggtctgtatttcgtaacaggactggcaggcttctttacactggctgctaaagatgtatacgaagcaacaggcgacccgacagtaaacatccccgccggttttgaaggcggcgcgcttgactttgcttccagtctcttctgctggggtatcttccaccttacttacagtctgaagattatcggccctgccatcctcgtggcactggcactcggaatggctatctacaaccgtatccgcatgactagaaacgacgcaaagaacacattgaacagtaataaggaataagtagaaaagcctttaactgataataataagtagtatataatatataactcaataaaaaactcgaaagatgaaaaaattagcaattgcaatgatgttgggtatcgcagcaatgtctgcctccgcccaggtgaattacaagatgcaagtggcttgcagcccgcaagacgtgaaaacgtatgatactaaccgcttgcgcagtagcttcctgatggaaaaagtaatggttccgaacgaaatcaacgttacttattctatgtacgaccgtctgatcttcggtggcgcagtacctgcgacaaaagaattggtacttgaaacaatcgacccattgaaatctaaattcttcctcgaacgccgcgaactgggtgtcatcaacattggtggcgaaggtatcgtaaccgtagacggtaaagaatatacgctgaaatttaaagatgctctgtacgtaggtagaggcaagcagaaagtgactttcaagagcaaagattccagcaatcctgccaaattctacatcaactcggctactgcccacaaggaatacaagactcaattgattactatcgacggacgtaaaggttctctgaaagcaaactcatttgctgccggaaagctggaagaaagcaacgaccgcgttatcaaccagttgattgttaacaacgtacttgaggaaggtccttgccaattgcagatgggattgactgaactgaaaccgggtagcgtatggaacaccatgccggcacacactcactctcgtcgtgtagaagcatacttctacttcaatgtaccggaaggaaatgctatctgccacttcatgggcgaacctcaagaagaacgcgtcgtatggatgcagaacgaacaagctatcatgtcaccggaatggtctatccacgctgctgccggaacaagcaactacatgtttatctggggtatggcaggtgaaaacctcgattacggagacatggacaagatcaaatatacagaaatgcgctaaccgttgcgtattcctgtatgacatataatttttcagacgcagataacgcggatagcacggatcaaaaaataagtatccgcattatccgcgtcatctgcgtctaaaagattagactcatttgctcttgattcacaaactcgtttatcttctttctgtattacccccaacgttgcaaatgataatgctatgagacatttttatatcctttgaaacaaatagcatatataatgcaacgaataatacatgattttgaccaatttttacaaataaaattcagtcgaaataccgacctttgtcaacgaaacaaaatctatttaaatccattatcatgaatgcatttcaaaaaacaggcgaaaagatgacaaactacagatggaccatctgtgctatgctattttttgctactacagttaactatctcgaccgtcaggttctctcattgacgtgggatgaatttatcaaaccggaattccactgggacgaatctcactacggtactattacttctgttttctccattgtatacgctatatgtatgctgtttgccggtcgttttgtcgactggatgggaactaaaaaaggttttctatgggctatcggtgtctggtcggcaggtgcttgtcttcatgccgtttgtggtattgttacagaagcacaagttgggcttcatagcgcagcagaactggcaggtgccacaggagatgtggtagtgactattgctacggtcagtatgtactgcttcctcgccgcccgctgtatcctcgctttaggagaagccggtaacttccctgctgctattaaagtaactgcagagtacttccctaaaaaagaccgtgcttatgctacttctatctttaatgccggtgcatctatcggagcattgatcgctcctcttaccattcctatcctggcaaaaatgttcggttgggaaatggcatttatcgtaattggtggacttggctttatctggatgggattctgggtgtttatgtatgatgccccgtcgaaaagcaaacatgtcaatcaggcagagcttgactacatcgagcaagataatcgcgaagcaggcagtgctccaatgacagatgaaaaagatgaaaagagaatgaagttctggcaatgtttcagctacaaacaaacatgggcctttgtcttcggtaagttcatgactgacggcgtatggtggttcttccttttctggactccgtcttatctgaatacacaattcggtattaaaacctccgacccactaggtatggcgttgatctttacgctttatgcagtgactatgttatctatctatggtggtaaactacctactatcttcatcaacagaacaggtatgaatccgtatgcagcccgtatgaaagcgatgctaatcttcgccttctttccgctggttgtactgttagcacaaccgttaggtactgtttctccatggttcccggttatcttaatcggtattggtggagctgctcatcaatcttggtcggccaatatattctctaccgtaggcgatatgttcccaagaacagctattgcaagtatcaccggtataggtggtatggcaggaggcgtaggctctatgattcttcagaaagtggcaggtaacttgttcgtatatgcttccggaacaacgatggttgacggtcatgaggtggaaatgacgaaagagttactcgaacaaggggcacaatttgttcaccctgccatgacattcatgggcttcgaaggtaaaccagccggatatttcatcatcttctgcgtgtgtgcagtagcttatctgttgggttgggttatcatgaaggcattagttccgaaatacaaacctatcgtattggattaaatctattcgtacagatagaatcgttaaaaacaaaagagtaactcgtcgccgagttactcttttgtttttaaccaattattcaaaaaaatgaaaaatgaaaagaaaaataaaaaagcctcttctcacgaagaaggctttttaggtttacttatcctgcatcatcctcctgcaatttttttaaccgaaacactagaaacagtgtttttgcattcctataatgaagtatagtaaacgttaagatgaaaaaaagggaagtctcacgacttccacaattcttctaaccttaaatctaaatctctatgaaaaaaacgtgttgcaaatataggcgtttgttcaatatagaggtgttaatgaattgcataaagagagaataaaaactaacatctgcaaaaatgatgcaattttcaggagccttctattaattttaataaacttttatagagtggattgcgttcgagtagttcgggaactcctgtaatgaacatctgttttcttgcacgggtcaaggcaacattcagtttccggtcgatcaaaacgccctcttcttccgtcagattggatagaaattttagttgataagggtagttgacacagaaggaatagattattacatcacgctcgcttccctggaaccgttctactgtgtcaactagaattcggttcagaactggaatacctaatgattctatttctttttttatcaatgctatctgactccggtaaggggtaatgatccctaaagtacgggattcgtcaaaatctgtctgatgatcttcataaatgcgaacagctaagtcggcaacaatacgtgcttccgaatagttgatctttgcagatgctccggccttctccggcacagagggataaaaagccaaacgacagatggtatcggatgattctatttggtgaggcaggccgacagggatcagacgccctccataaaaggcacgattagcaaacaaagcaacttccggatgcattcgcccttgacggcacagcatatcgtaggagcgatgaactgttgcagtacagttccggtagaggcgttcaaacaaggaatctttcagattggtcaacccgatagacagtaaagattcatcataaatggccgattgctccgtattttgctgtaccacagcaggcagttgtttatgatctccgatcaacacaaacttatctattgcatcttttccgtcttctccacgtgcacagagaatgcctaacaactgcggttccaatatttgggtagcctcatcaataatggctacatcaaaatgcttcaaacgaaacagttccggtttgccggaaatagccgctaccgttcccacaataatccgacaattccggatgcgttcgtacacttccgaacgacggttacaagaggataattcattttcaatcagatgcccgcggtaggcttcatcacatgataattcacttcccacacgtataaaatcaacagccggagcaatggaagccagcgacttgcatatctcatcgacagcccggttggtgtatgaaagcaaaagaatctgcgcatctttatctgcatgaaaagtctctaccattttcttcagggcacatgaagttttgcctgttcccggaggcccgataagaaggaaataatcctgtgcggcttttgctttcaaggcgattcgcgtaaaatcgtcttccgaacgggaaatcatggaatccaatgattcatcaaaccgaggaggacgctgtgacagcaacaagtcacgacgttccttccttgcagaaagataaatatataacccctgatacatcgagcggaatgttgtatccattgtatcatgttctatcgcataaaggctttcggcaggaagtacggatgggttctgctgggtagcacgtaagcgaatacttatttcgttttctgtcaggtattcaatattacccttgaaaaccattttattggtgacgttatctgtatcgcggttacgttcataaaggataatggcgtcgccttgacggaaattagggagagaagtctctgtttcaagagcttcactgctgacagtcttacttgcagaggcttcatttccggtaatatcatttccaatagctttatctccggtaatgtcatttacggcagactcattcaacaaagttttcccagccttttcctttttaaagaaagaaaaagtaagtccggctttatgttcatcggcagcatgattctcctttattctcaaatcatagatgatttctccggcctcgcatttctccgctaatgtagaaagccataaagaagctgccccggtacgtccttcataatccacatcaccggattttgaggtataaagttcctttgtaatgaagttgtacaccgcatagaagtaattcttttccagtggagaaagagctttcagtttcgattgaaagttatcaatagaaggacgcaggtatgtttcccaaaaacgtcctttcaatcctctttcattcaaggtggaggcattgatttcttccagtttttgtgccgtatattccagactgttgcgtaattggacgccatattcatcggccacaatgcggttacgcaaatcaatcacccgacgcaccatcgcccacgaaggacgggagggataaagaagcggataacgggtataaagcaaataggctttcactttccggtgatccattcccatcgaatattgcaagactgcttgataaagtaacatctgtactttattattctccttcggctctaccttgccccggatagcgtattcatccgccttgccggatttcatttctatgaaagaagacatgtcccgctgcatatagtcgagacgtccctgaagtccgagtgcttcacagatataagaaggttcgagcacggcatccgtcttgtccagttcataaccggctgcatgaaaggtatcattgaccgtttcacgaatatgatcgaagtgcagtttgcagtcctcaaagaattggcgttctttctctttgtcgcgcaaatcggaacaggcagccagctcaataggataacgccggaaggctttctgcatacaggtacgataatctatgtcttcactcttcgcatgaatccattcgtccaggaaaagattggctatatttcccagtaacagaggccgggcattttcgatcggttgaagacgggaaagaaaataattggccggatgatgcccgtaatcacggaaacattctgccaaagaactgatgtcaagtaaataatccggttcgagtacaatgaaagaaggagtcaggattcccgcctcatccactgcaacatccaataaattgacctgggcatgacgccaaagcagtttgcacgtttctgcaaactcttcattgatttgaggaatattataacgaactaaatatggtttctccgagacttcgtccaagggagtcacatacaaatattgctcgtcggcatactggaagcagacacgcattcgctgcacccgttcgcgggcaggaggcgcaaccaggtaggtggcatccgcacgcggaagtagccggtatagttccaagggaatatcctcttccaggagtttacgaataaaaaaagctaatgttttcgcatcgcgcaagagttgttcccggttgggctcctgctggcggttcaggatagcattcgaagtgagccggaaagtatgcagccggttctgctctgcaacagagagaccgaccttagccgccacaaaactgattcgtgcggaaaggtcggtcatctgtaagctttcgttttgcatttgcgcgcgacaaatacgctccagcaagtcgcgcatttgcttatatcctacggcaagatgggtatcttccgcccggcaaactgctaaaaggatttcataagattctatcgcttcactcttcggacagggcaacttcatctccagcttcatcttcaacttcctcttctgttttcttcttgtcctttatcatcaaaatactcatctcgtacaacagataaagcggaatagcaacaacactcaaggtgaacgggtctcccgtcggagtaataatagcagcagctatcactatgatgacaaccgcatgacggcggtatttccgcaggaaggacttgttgaccactcccattaaagaaagcaaccatgtaaccaatggaagttcaaaagccaatcccatgcagagaatcagcatcataaaattgtcgatataagaattgagcgacaggatattctccacttccgaactcaactgataagtagaaaggaaacggagagtcaacggataaaccataaagtagcccaacagtacaccgatgaagaacatcagtgttccgatagtcaatgctttacgcacgccctttctctcattcggataaagggcgggattgatgaaacgccatatttcaaaaaagatataaggcatagccgtcaccaccgacatccagaatgctgtcgacatgtgaataaagaaaggagcagccaagttgatattgaccagcttcacataaaattgttgcgtgaagaagtcatcggtcaaatcaaatgttttaccaatatgccgtaataaatcgtagaatatgaaatcattgtggcaaggcgcaagtatcacatggtcgaagaggtagggcatagcaataaaatagcctattgccaatacaaaccaaactccaactactcgaaaaagtactttacgcagttcgtccaaatgatcccaaaaggtcatttctgccatccgtatgttgtgatcttttagttcttagaaggatctacaggtttgtccaactcgtctttagccttgtttatttcatctttcgcttcgttcacaccgtctttgaagctctttacgcctttgcctaatccgcgcatcagttcaggaattttctttccaccaaaaagaagaaggataaccaaagcgataataatccattcggaaccactgggcaaaaagcctaacaataataagtttgtcataagtttatttgatataagaggtttttaatagctgatgcaaagataattattttaatgaagaatgaagaatgaaga

SEQ ID NO: 8160 - DNA, 27173 bp, Unknown
  gut microbiota DNA sequence
tgcctgttccggttttcctttatccgctcttttacattcaacttgagataagatcaaacctttatctgtattttccagaatgattccggcataatctctgcccataacaacaagtccggtgcgttcacctttaagtttaggattagggctgaacgtaagtttcattgttgtggtgaaattatcagaaggagttttctgcaagagcaggttggctacatcccacaaattcttatattcttttaaaactggataagaatataacctcacataactcttgtcgcctgcgtaataggcccatttctcattgatgttagcatgccattgccattgtggagaaagtgtatatccgtcgaactcgtcactttcctgcggagtgcagataggatatgtctgacctacattcggcttcttgtaagtcaagacaggttcgccacagccgtcactgtctttatcgataccgatcacaggccagtcgttcacccacttcatcggttggagatgcatgatacgtccgtaagcgccgacatcctgaaagtggaggaaccagtcttctccggtaggagtatccacccatgcaccctgatgaggaccgttgatcggagagtcaccttgcgcgagtactgttttccattcgtaaggaccgtagatgtttttagaacgtagtacgacctgccagcctgtcggtacaccacctgccggatggaagatataataatagtcgtttctcttatacattttaggaccttcgcaagtttgatgtgcttcgtgaccgtcaaaaataatacgagaaggagtgatcgctgcatttgcttccgcattcagttcgcagatagtgattacacttttcagtccggcacggcttcctgcgtatgcgtgtaccatatatacttttccgtcctcatcccaaaacggacaagtgtcaatgatgccttttcctgctttcaccaagaccggttcgctccacggacctttcggatctttggctttcaccataaaagctccctggtcgggatctccccaaaagatgtaaaactcaccgttgtgatgacggatagccggagcccatacacgattaccgtgttccggccgttccggagtttcgataggagggagggcattgggaactgcagcaccgatgattgtccagttgactaaatctttggaatgaaggatttgcaatcccggcaagcagttgaaactggatgaagtcatatagaaatcatcccctacgcgacaagcgtccggatcggagtagtcggcataaagtaccggatttttgtatttaccgtttccgaggtcggaaacccatacttcagatacatagttcttctgtgctactgcggtgaaaaccgttaataagcaaaaggctaaagtctgtgtcaatcgtttcatgttatagatagattatttatagatatgattcgttggttttatctgatggcaaaggtaaataaaaagactctgcacaaggaggaatatttgtgcagagtcatagaaaaattggtagaaacctcgtaatttttgtttagttgtatttgtttctaccctatttattggtgcggttatcttttattttcactgtcaccggatgagccagctcttctttccattcgcggagatgagcaaaccatgcttccggtgttttatatccgaatgtctctttcatcgaagtgaaagtagtgtgatactggaaatatttatttcccggagcggtaatggtataaaggaaattggctttatccttttcttccgattttacataacgttgagggatacaagtgcccagccctacagtttctttggcatatttcacggtgtcgttgacaggccagtctgttccccaacttcctacgagccctttatgatcggagaaagatttggaagtacctacgatgtcttgcacacctgtacagaaaacttctttattgagcggttcgtcaaagaatgtttcgatatgaagatcgcgatgtccggcataaagcgtgtagcgtgtcatcatatccagttcctgatcctgatatttccatccggtcacttcaatttctgcaatcacccgcaccggtccataagagatgatacgttctgtgcgagtgtccactggagtgatatgcgttgctttttgtccgtcccaacctttcaatgcgcccggtccgcagctgtcgaacacacgaagtacgtcatctccgaatcctttagctaattgttcatccgtcgggtagaactgcgattctttgatctccagtcctttgttgaacttgccgtaaatatccggtgtctgtttctcattgaaataaagacgatagcccaccagttccgattccagaaccggaccgtgcggacgtaccatgctgtatatattgctggtgccgggaacggtgatagcctgcacccgttgatgtttgcctttccggttgtctactataaacatatcggcataaaccctttccggataagtctttgcacttttctccgaagagagtgtaacctggaatgtttttctaccgtgagcagggaggtcggtcacaaaggccagttcgtccatcttgcggtctctgttcaaatcgtccagctgtgaaggtatttcctttgttccttccatgacaacagcggatttaactttgaagccggcgtgcaactcatgcaggttgataacaactggagcatccgctttggcctgattccagttgttttgtacttcaactgtgatggttttctcctgtttctgcgcctgggcagacagactgaaaactcctaaaaggaaagtaaaaataaaaagattcttcttcatgattttctaaggctgaaattatacgtcgtatttctccttgcaaaagtaacagaaaaaatagcagactgtctatcttttgaaaagattatagtctgctatttgagctttttactctatataatgatattgtggttttctttttgcaatgaactttatttgaggcttaaaatttcttctttcgctcccaattcttcataaacctttccgtctacggtcagattcttagcatttttgacatttaatatattgttacctttagacgattctacatatacattttccaaagtaactccgtcaacctggctgataacaactccgtctgtagcttctgtcatcacgacattcttaacggtaatattgctgatcggcatttccggcaaaccattgaagaacatggcacgtcccgaacctctgcaaacaatattagagatatgaatattgcggaaagcgggtgtttcttccgttaccggaggaatacttgtcttcatgcggttcaataaatcctcttccgattcttcgccggcaccttttccaccgtagaacaggtcgaacaacaacggttcgttcggaatattaatcatgttgatattattaatgtagatgttttctaccacaccgccacgtccgcgagtgctcttgaagcgcaagcctacgtctgtgcccataaatgtgcagtcttctacatagatgttcttcacaccacccgacatttcactgcctactacgaatccaccgtgtccgtgcagtaccgtattatttttaacgataacgttctggcaaggttcaccgcgacggcggccgtcttcatctttaccggatttgatacagatagcatcatctcccgcatcgaatacactattaataatgagcgcgttcttgcaagattccaggtcgatagcgtcaccattctgggaataccacggattgatgaccatgatattatttactgtgaaatcttcgcaggacaaggggtgcagacaccagcttggtgagtttttgaaagtaacaccttccaacagtattttcttgcttttgacgatgcttaacaacaccgggcgtaaccacggacggatttcagcccattcttcgtctgtattgataccttcaggtacattgaaatctttacaagccattgcgcctttcagtgaaccggccgtggggtaccatatctcttgtttttcatcaagaacacctcccgaatttaccagctttttccattgtgaagcagtcagtttgcctttttttaccggacgccagcagtcgccgttcccgtcaaatgtgccgtatcctgtgatagcgatgttctctgcattgcgtgcggaaataggcgattggcaacgacgggtttccaatccttcaaaagaagtggcaatgataggatatgcctcaaaatcaccagtgaaaagcaccaatgcattctgttccgtatataaattcacgttgctcaatagttcgataggtcctgtcaaccagatgccttccgggataatcactttaccccctccgcgttgatttacctctttaatagcatcgttgattgctttggtattcagaaacagaccatcgcctttggctccgaatttctcaatgtttacctcgtaagcaggaaaaaacggttgctgtactttgggcatctcaaaaggtagattctggtagagagcgtcactgatggagctttcttttacggcagtctcgctttgtttacatcctgatgagataaacggtaaacaggatatggccatccagaagagtctttttgtcaatgtgttcatttagtaacttatttctatagggttatacatctattgtttttcttggtagttgggtgatgattaatgagggtgatttcataattcttatgtccttccgcaggcgatctgtcgcaggcagcctgcaggagaggaataagacaaattcatgttaacctaattctaaccttaaataaatattatgaaaaaacctcttaattatcgattgcaaagataggtggcaaaccccaagaggatgtggactaattgatagaatacgtgtattttttgtcatttctgtctattatttgcacacttctcgtgtttttatgcagaaagttcctatctttgcacaaaatttaactattaaaagatatgagttataacttgttgaaaggaaaaagaggtattatcttcggtgctttgaacgatcagtctattgcctggaaagtagcagagcgtgccgtagaagaaggtgcaactattacattatcaaatactccgatggctatccgtatgggagaagtcgacgctttggcccagaaattaaattgccaggttattccggcagatgccaccagcgtagaagatttgcaaaatgtattcaagacctccatggatatactgggtggacaaattgattttgtactccactctattggtatgtctcccaacgtgcgcaagaaacgtacttacgatgaccttgactatggaatgttggataagacattggatatttcagctgtttcattccataaaatgattcagtcggccaagaaattgaacgctattgcagattacggttctatcgttgctttgagctatgtggccgcgcagcgtactttctacggctacaatgatatggcagatgcaaaggcattgctggaatctattgcacgtagctttggttacatctacggacgcgaacatagcgtacgtgtgaacactatctcgcagtctcctacatttactactgccggttcgggcgtgaagggtatggataaactgtttgatttctccaaccgtatgtctcctctcggaaatgctacggctgacgaatgtgccgattattgtatcgtgatgttctccgatcttacccgtaaggtaactatgcagaacttattccatgacggtggattctccagtgtaggtatgagtcttcgtgccatggctacttacgagaaaggactcgatgagtatatggacgaaaatggtaacatcatttacggataaaagattatgaaactacggatctctcttcttattattttaattagtatgcttttcgcctcctgcgggataagcacgggaaagggtacggagcagaaggaagaggagatttctgttctaagatatgataagctgttgagcgaatacgttcgctccaacagcttttctgctatgcagaagttgacgatggactatcgtatgccgacgaaaatcctgattgaggatgtattgtctatcggtacggtgaaagatgataccatttcgcaacgtctgcagaaattctattcggatacgactttagtccgtttgcttagcgacgtagaagcaaagtatcctaatctggatgaggtggaaaaaggacttaacaaaggattccggaaactgaagaaggaagtgcctgatacaaaagtgccgtttatctattcgcaagtgtctgccttcaacgaatctattattttggtggattctttattagggatcagtcttgataaatatatgggggaagattatcctctttataagcgtttctattacgattatcaatgtcgctcgatgcgtccggaacggattgtgccggattgttttgctttttatcttttgagccgttacggaatgaactatcatgagggtacttgtttgattgacttgatgatgcactccggaaaaatcaactacgtcgtgcagaacttattaggatatagtgatatcggcgaagcgatgggatattccaaggaggaaaacgactggtgtaaggagaatgaaaaggagatatggaattatatctgtaccaacgatcatctgcatgcacgagacccgatggtgatccgctattatatgaagcctgctcctgctgtcgatatgttgggtgctcaagctccggcattaatcggaacatggatgggtgcaagaatcatcgcttcttatatgaaaaagcataaggacatgaaactgaaagatctcctggaatttactgattatcatgtgatgttaagtgaatccaactatctggcttcctaaactgttgcatttttcaatttttaattagcttcgctcaaaaccttatttgatttttaatattaaagtatagtctcttaattctcaatttaaaaagtggaaactgccctctatttgttgcccgtgacgttaggtgatacgtctattgaaaaggtcttgccttcttataataaggagatcatttctggtatccggtattttatagtcgaagatgttcgttctgcccgtcgtttcctgaaaaaggtggaccgggagattgatattgatgcattgacattttacccgttgaacaagcatacttctcctgatgatatttccggttatctgcaacctttggtaggtggagcttcaatgggggttatctccgaagcaggttgtccggcagtagctgacccgggagcggatgtggttgctatcgcacaacgtaaaaagctgaaagtggttcctttggtcggaccttcttccattatcctttccgtgatggcttccggttttaacgggcagagttttgcgtttcacggttatctgccgattgaaccgggagaacgtgccaagaaactaaaagcactggagcagcgtgtgtatgctgaaaatcagacgcaacttttcattgagacgccttaccgaaatcataagatggtagaggatattttgttgaattgccgtcctcaaacaaagctctgtatcgctgccaatattacttgtgaaggagaatatatacagacgcgtacagtgaaggactggaaaggacacgtgcccgatttatctaagattccctgtatttttctcttatataaataacgcctttcaggtgttcatattcatcttcgaagcaactgctgaagaagccttttcctaagttctcctctatctgtttgaaactccacagcttactgtttttaaagcggggagtacaaaggatggagtcgtctttgatatcgacaatgaatagatagataagacggttggtcacttcattctcgaagtgataaacgatattgaattcaggtttgatacctttttcatgaggaaaagcattgttgattaagcgagtggcgcctgcttccagagattctccgtagcgaagataacattccatgggaatatctactttccctctatccagaatggctgttgatggtctgtcgcaaaggaataacattccgtgagtggatatggcaattcttatcaccggattgatgtatgcatttttgtaattaacagcttctattgcaggtgttttcccgatcacgtctccttcggtattcacaataggaacatattccgtgtgtgacattaaatgattgaagaaacggatggcgatctgattgaacaggatactcatcagaaagacagcaggggggaacactttatagagtacaaacatgctcgtcttgctcaacgggtcttggaaaacgatggtaatgctgattataataaaatgcaatataccgaagatcaaagcgatacgggcagatacaacggctgcttctgctccctgcgcatataaacgtttgttgcaagaacctatctgttttaagaaatggttgataaaccttttcttatgcatgtaaagacttagcatcggaatgagaatactgacttccagcgtaagtggaagtgcaccgggtggaacgtaatcaccaggaatgagagctgctacggataatagtgctaacactccggttgctatatagaggataaaattaggaattaacaatcccttacgtcgataagaaaggtatatacctataatacctatgcctgtaccgatgtaaatagccgtgtcttgcgttataagttcacacaataaaatggaaataataacggggataaaacccagcgacatgttaaatgcggaagaaagtgttcctttatgagccatctctatatttatgtttatttgtcggttctatcaataaaacaaataggggatatgttttgtttgctaacgaatatgtttctctgcatggtaggaggaacgaacaaggggagcgctttctacgatgttgaatcctttctctaaacctacagttttatattctgcaaattgctgcggagtgatgtatgctgcaacgggataatgccggtgactcggttgaaggtattggcctatggtaagaatctggcaaccggttgctaacagatcatccatcaatgtttcgacttcctccggggtctcacccagtccgaccataatgccgcttttagacttaactcccttctcggaaatgtgtctgataacttgcagacttgtatcataatttgccgcactgcgcactagcggactaatgcggcgtacggtttccatattgtgtgaaataatgtcgggacgggcttcgattaccaaatctaacaactccatcctgccttgaaaatcaggaatgagcacttcgattgttgtttgtggattcagccgttttatttcctggatggtacgtgcccaatgtgttgctcccaaatccggcagatcatctctgtctacggaagtgatgacagcatgatccagtttcatcagtgcgatggattctgcgacatgggtaggttcgtttgcatctagcgggtgcgggcggccggtttgtgtgttgcagaatttgcaactgcgcgtgcagatgtcaccgccaatcataaaggtagcagttccttttccccagcattctcccatattagggcaacgcccactgctgcatatagtatgcaagcagtgggagtcgacaatccgtttggtttcggtgtatcgttcgttggcaccaatattaattttcagccattcgggcttacgtactctgtccgtcattataaattgttcaagaaaaagttggtcaaccgtgtgtataggtgttggcgggtattgccaccatatattccatgattgcggtttgtatacacttgcatatcaaattgttttccaagctgaaccaactgctcggcatattccgcacaattttggaagtgcacattatcgtctgccatgccatgcaccaacaacaagtttccatgtagtttgtcagcgcgggtgaaggctgatgattccttatatccttccgcgttctctttcggagtacgcatgaagcgttcggtataaatcgtatcatagaaacgccagtcggtgggtgcagctactgctactcctgctttgaatacgggagttccttcgctcatgctcataagagtcatgtatccgccgtagctccagccccagattccgatgcgatctttatccacgtatggctgtttgccgagatacaaagcagtctctacctgatctttggcttctttgactccgattttcagataagtgcatttctcgaaagcttctccacgacctcctgtgccgcgaccgtccacgcataccacgatataaccgaggcttgccatgtatgtttcccaactgattccccaggtatctaatacctgttgagagcccggaccgctatattgatacatcagtaccggatattttttagatgcggaaaaattaaccggtttcatcatccagccgttcaacttcacgccatctgtggtttggaaagtgaagaactctttttgtggcacagcatatccagacaatgtttgtttcaatccgtcattggtaataagcgttttgagtgttttgcccgaattatcattcagtgtaaccagcatcggagtattcaagttggagaacttgttcatgtaatacttcatcgatttgctgaagagcggtgtattggttcctacctgttgggatagtttgagcttcttgcccttcttgtctattttatagacagctttgcgcagagggctttcttcattgctggtgtaatagaaagaaccgtcttcttcatcatatcccagaaaatctttcacctcaaacttaccgttagtaacctttttaatcagattcccccccatgctataccaatagaggtgactgtaaccgtcacgttcgctaagcaggctgaagtattccggatagaactggatattatcgaaaatattctccttgatataataaggagactcatcgcgaagcattagtttgcaaagtgtggaacgaggatcggcaaagtaaagatcaaaacggtcttgatggcggttcaatgtcatgatagccaatttattggcatcctttgtgaaacggatacgcggaatgtatccatctgcatccaatgggagtttcattgtacgggtgacatgtgatttgatgtcatacgtacgtacctctactttcgaattcggatatccggcttttggatacttatatgtatattcgcccggataatcttttaaagcatcaatgcggggtgcttgtccggcaaataccgggaaagagtaggagggaacttccgactcgtcgaaacggataaaagcaatcagcgtattgtcggcgctgaattccaaagcacggtcgaagccgaactcttcttcatacacccagtcaggaataccgttgattaccgaattctgtttgccatcttctgtgacctggctttcgctgttgccgtaaagcaacttaacaagaaatatgttattgttgcgtacaaatgcaatcatggtaccgtccggagaaaagacggggacctgttgaggtccaccgtcagacagccgttcaataatgttgtttgtcgtaacgcccttatcatttcgtttcaaagggtaaatgtaatgtacagctgtgtatgaatgcctataaataggtgttgttttagtagcaatcagcaatttctgaccgtcgggagagaactgataactgtcgaagttcttgaagtcacattcgcgtgtagtatttacatcgaaaatcacttctactttctcacctgtcttgaaagagtatttaatgatttgcgtgccgtcagcgttcatctgtgtgtagtgttcaccatcaggcatagggattactccctgaatattttccgggcggaaacgtccggaagtaatatcttttaaatcgagtgccttttgtccttgtgccattccggtcagacagagaaggcagagtaataaagtgatgctgatctttttcatctgcgtttataatcggttttggttttaattcgtacttgcaaaagtaacaataaacttagattcaacaaagcctgaccgatttttatatagatttgataaggattattgggtgagattcaatatctttgtgaaaaggactttaaacattaccactatgaattcaaaaagaaaagacttgcaatatgcttctgtcttcttattggccgtggcattgacgttcctgatggggaagggtgataatctgtggttggtgtcatggggtgacttgataccgagtttatttgtactgttcatagcaggtgattgtttacatagttccctgcttcgtatcaaacgtggcgaagaggagggaggagcccggtggagtacttgtttcacttttctggtattcagcattatttttatgggcgacttgttctttatcggcaactttattgtcaataaactgtggagttaaaagagatgtaaatgttttgttccataggtgtttaatagtgggctcttcttcttaactataattataaagattgacggaggtacgctagtatctccgtttcttgttccgggtggaaccattttatttcttcatctcttttgaaccaggtcatctgtttacgcgaataaatgcgggagttttgcttgattttgtctatagcaaaggagagttcccattctccgtccagatatttgaacagttctttatagcctactgtattgagtgaattgaggtgacgatagggaagtacggaacgtacttcttccaataatccttcctccatcatctggtctacccgacggttgatacggtcataaagttcttcccgatcacgagtcaggccgactttcagaatacggaaaggacgctgttttttttgttgggtgcgaaaagaagtataagtgcgtccggtcatatagcaaatctccaacgcatgaatcactcgcttgggattcttcagatctacaatccggtaatattccgggtctaacaagcgaagttctgcgcagagttgttcaaggccttcctcttcatacttttgtaacatgagttgacgggtttccgcatcaacggtaggaatatcgtcaattcccttacagatagcgtctacgtacatcattgagccaccagtgagaatcacgacttcgtgttgcgtgaataatttctccagaatatccagtgcttctgtttcgtattgagcagcactgtaatagtctgtgaggtggagcgtgccgaccagttgatgggggacacgtttgagttggtcgggagtaggagctgccgtgcctatttttaattcggcataaagctgtctcgaatcggcagatacaatgcttgtctgaaatgtttctgccaagcgcaggctcaactccgttttccccacacctgtagggcctataagaacaatgagagtaggcatagatttttaagtattaagtatagaagtattaagtattaaagcgtacgggactaaaaaaatattaggtattaactgcctgacactacatagcaattaatacctaatacttgatgcttaatacttagaatttttcttcttcgtatgggctgctagtgtcaccacctatgtcaaatccttcctgatcgaagtcttccatgtcgaagtcctggtctccatagaagttttcatccagatcaagagaacctccggtagcggtcatttcttcaaagtctaccgtttgtttgggagcatctcctgatttcttggtacatttggcaccattcatatcttttccggtgataatttcggatagttcgatgaagaaacaacgttctgtcatgtaatcgaatacatataacagtttttgtttttcatcttctaccagttcgctgatagtagtttctttcattacccagctatccatttccggattgtcgtccatttcttccagggttacttctttttctttttcccagtcgtcatcgcagataaagaaagaagtcatctggtcgtttgcgtaccctactgatttcagtattgcttcatggaagtcataaaaagttgcttccggatcaatttgtatttctctgacaaaatcgtcaacttcatcagatatgatagtaaatctgtatatcataatatgactattttgaactgtttatttaataataccacgttctgaattacggataaaattgactatatagtcaatctccgggctcttttcgaattcatcttctatttttttcaatgcttctgtcgtgttcaaaccactttggtagatgatacgatatgcattgtgaatactttcgatcacttcattggagaagccacgacggcgcaagccgatgatattgattccgctgaaagcgatcggttcgcgtcctgcaatgatgtaaggaggaatatctttactgaaacggcatccgccctgaatcattacatgactgcctacatgacagaattgatgcatcaatacattggcgctgacaatcgcgttatcatcaatgacgatttcgcctgccatcttggtagagttaccgatgatacatccgttaccaaccaatgcgtcgtgtgctacgtgtacaccttccatcaataaattgttatttcccacaatcgtgcgccctttagctgccgtaccacggttgattgttacattttcacgaatcagattattatctccgatttcggctgtcgattcttcaccgcgaaacttgaggtcctgcggaatggctccgataacggcacccggaaaaatcgtgtttccgttaccaatacgtgaaccgtataaaatattggcgttagccataattttattgttgtcgccgataactacgttcttatctataaatacaaaaggcgcaatttctacattttctccgatcttagcttcgggatggatatacgctaaaggacttatcatgcttttaaatatcaattattacttattttttactatttgtgccatgaattctgcttcgcaaacaactttctcgccgacaaacgcatatcctttcatggtagaaatgccacggcggataggtgccagcagttctacacgaaagatgattgtatctcccggcactactttctgacggaatttcactccatctattttcatgaaataggtagaataacgttcaggatcatctacggaattcaagacgagcaagcctccgacttgtgccattgcttccacttgaagtactcccggcataacgggctcctgtggaaaatgtccctggaagaaaggttcgttggctgtgatgtttttaatacctacaatgtagttggcaccaatttcaatcactttgtccaccagttggaaaggataacggtgcggcaacaattcgcggatacggtttacatccattatcggctcgcggttacagtcgtagcttggtgcctgtatttcgtgcagacggatttctttccgcatttgacgggcaaatttattgttgatagtatgtcccggacgggtagcgatgatacggcctttaatcggtttgccaattaaagcgaggtcaccaatgacatccagcagtttgtgacgggcacattcattgggccaaactaacggtttgtgattgatatagcctaattgatcggcatccatgtgaggtactcccatcacatctgccaacttgtcaaagctttcttgtgacattttgcgttcgtagattacgatcgcattgtccaggtcaccacctttaatcaatccggcggagagcaacggctctatttcacgaacaaagacgaaagtacggctggcagccacttcgtctttgaaattatgcatatcttcaagggtcgcaaactgattcgggataatagtcgaatcgtatgaaaccagtacattcagactgaaattctcgtcaggtagtacaataatagaagaacctgtcgtttcatcccggaactcaattttagacttgataatataaaagtctttgacggcattttgctctactgttcctacacgttctatttcttgtacgtaatattgtgcactaccatctaaaataggaaattccggtccgttaacttggatcaggcagttatcaatgcccaatgcataaagggctgccataccatgttcaatggtgcttactttgactccatttttcgacaatacagtaccacgggtggtttctgttacattgtcggctactgcgtcgatagttggttgtccttctacgtcaatgcgctggattttatatccgtgattgtccggagcaggattgaatgttacagtgagatcaagtccagtgtgaagacctttcccgctcagtgaaaagctatctttcagcgttttttgtttcagcattggttacttatttaatagttgttttaattcttctacttctttgcgcaagttacgcagttctttctgcatatccggcaggcttctttgtgcaatggatgatttgaaatattgtttcagttccataggaggagttccgataagctggctaccggacttgatgtctcccggcacacctgattgtgcgcctaatccaactttatctcctattttagaatgtcctgcaatacctacctggccaccgatcatacaccattcacccactttggtagaaccggcaattccggcttgcgcagccataacggtatgcgaacctatttcatcattgtgtgctatttgtatcagattgtctaacttgacaccgctgtgtactaccgtagctcccattgtagcacggtctacacacgtattagcacctatatctactttatcttccagaataacaattccgatttgcggaatcttatcatatccgttcggagtgggagcaaaaccaaatccgtcagctccgatcactgcacccgaatgaaggatacattcattacctatgcggcaatcatgataaacatttacattggagtaaagcaggcaactgttgcctatcttcacgccatctccaacgaaagtgtgggggtaaatttgagtattatctccaatcacggtattttcaccgatataagcaaaagcaccgatgtatacgttttcgccaattttggcgctgggtgcaacgaaagctaatgaatctatcccttgtttcttaggcttgctcatctcataaagattgagcaatttagccagactttcgtatgcattgtctactttgataagagtagctttaatttcgtgttcgggagtgaagtccttattaaccaggacaatgcttgattgtgtctcgtagatgtaaggtgtatatttgggatttgacaggaaagaaattgctccgggcattccctcttcaattttagcgaatgtgtgtaccgtagcgttttcgtctccaatgatttccccttggataaatgctgcaatttgcttagccgagaactccatgtcttttatttaaaatttaattagttcacaaataacggatttttttttcagatttccgtgttattgcatgaatattttatacttatctgtgtaatctctgatagcagagatagtatttctttacctttttggacaataatgagatgttcagcatgtccgatgcttcggcaatatttttgatagtgccgtctttgtagataatatcaatactgtcatctgccgggtcatacatattcttttcgatgctgggggtagagacaaaatagttcgcttcggaaagggttatgcctagttgctggctgatgtgcaaagttaattctttttttctgtcctcactaataggctccgacgaaatttccactttaaagatatttcggtttatcattcccgtgcttaaagtggaaagtaccttatctgtgtgggtgctccacactttcaaggctgtccatatatcattgtcgtccagctggataaaattctccagacagtcggggttgttatagaattccgttggattgatatcattgtaaaggaaaaaacgtaatgcaggagatgcaaacagttccactccttgtgaagccagttctttggcacgcaagagagtactaatcagcatcttttcgtatgccacggacgtcttatgcaggtatacttgccagtacatcaggcgacgtgccgtgaggaaattctcgatagaatagatccctttggattcgacaaccagtcggtcatccgctacatcaagcattttgataattcgggcggagccgatgttaccttccgttacgcctgtataaaagctgtcgcggcgaagataatcaagccggtccatatccaactgaccgcttacgagttgatgcagaaagcgtttcgggtattcgtccttgaagatttgaatggcaagactcagctggccgttcatctctttgttcatccgttccatcaacataagagaaatctcttcgtgcgagactccttttacaatcgtgtcttccagtacatgcgagaaagggccgtgtcctatatcatgcaacaggatggcagcctgcacggcctccgcttcactatcaaagataaaattgcctttggaggccagttgggtgatagcttcactcatcaggtgaaaagcacctaaggagtgttggaagcgggtgtgttgtgcaccggggtacacaacagatgataatcctacttgcttgatgcgggtaagacgctgcaaaaggggatgccgtactatatcgtacagtaacccctttggaatattgatgaacccgaatacggggtcgttaattatctttctttcgtaaggcattcgttttctttagagatcctttttcccttttcagagaattgctttgagttgttcagccatttgtgcttgcacttcttgtgcggcggtgcgggcagcttctgcaaatttctctgttttatctacgtagataataccacgcgacgagttaacaatcaatccgcatgtactgttcataccatatttgcaaacttcttcgagtgaaccgccttgtgctcccacgcctggtacgagaaggaaatggttcgggacaatcttgcggatgtcctcaaaagcacgtccttgagtagcacctaccacatacatcatgcggtcatcgccagcccattcctgtgatttgcgtaatactttctcgaacagacgttcgccgtttacgtcttctgtcaattggaagtcatgagatcctttgttggaagtcaatgccaacaggatcacccatttgccttcgtaggtaaggaacggagtaacgctgtcttcacccatgtagggggctactgttacagagtcgatatccaattcttcaaagaatgtgcgggcatacattgcagaagtatttccgatgtcaccacgctttgcgtcagcgatgatgaattgatccggatagttatctttgatatattttactgtcttttcaaatgcgatccatccttttacacccatgctttcatagaaagccagattgggtttgtaggcgatacacaaatcagctgtcgcgtcaatgattgctttgttgaatgcaaagatcggatcttcttctttcaacagatgttccgggattttcttgatatcagtatcaagtcctacacaaaggaatgattttttgcgctttatgttttcaaataattgttgcttatccatcttgttatttactattttgcaatttactatttactattttaagaaaccgttctcaactctcaattctcaactctccacttctctaaagttcgctttctttcaggcgttctgcattttccgctacgatcagatggtcgatacaatcctggatatccccgtccatgaaggctgccagattatagattgtatagttgatgcggtggtcggtgatacgtccctggggatagttgtaagttcgtattttggctgaacggtctccggtagataccattgtcttacgtttggaggcaatgtcatcgatatatttctgatgttctttgtcgtagataaaagtacggagacgggccaaggcgcgctctttatttttcggctggtcgcgtgtctcggtacattcgataaggatttcttcggcaataccggtgttcgggttcttccagatatagcgcagacgtactccggattctaccttgtttacattctgtccgccggcaccgccgcttcggaaagtgtcccatttgatttctccttcgttgatgactacatcgaattcttcagcttcgggaagcacggccacggatgcggctgaagtgtgaacacgtccttgcgtttccgtcgcaggaacacgctgtacgcggtgtactcccgattcgtattttaaaattccgtatacattatcgcctgtcacactacaaacaatttctttgaatccaccggctgtcccttcgttcgcattggagacttccattttccaacctttggtttcacagaatttggcatacatacggaagaggtcgccggcaaagatagctgcttcgtcgcctcctgcacctccgcggatttcgagaatagcgttcttgctgtcttgcggatcggcagggacaagcatcagtttgatttcttcttccaataccggaaggcgctcttgactattgtccatttcttctttcgccatttcgcgcatttcagcgtccgattcattggcaaggatatttttagcttcttcaatattacccagtaattggatatattctttccttgctttcatcaagtcgtctaattccttatattctttagtcaacttgacataacgtttctggtcggcaatcactgccgggtctgtgataagggtagatatttcttcaaaacgggctacgagtccgtctaatttttctagtatggtactattgtctgccattctttaatatctaaattctccgaattcgctcttaatgattaattctgtttgctcgcatgcttcaacacgtcctacaatctgtgccgggataccgaatgactcggagatagctatcactttttctgcatgttccggtgacaggtagacttcaagacgatgtcccatattgaataccttgtacatttctgcccagtccgtaccgctttgttcctggatcgttttgaataaaggaggaacagggaaaagattatcttttactacgcgtacgttttctacaaaatgcagaactttagtttgtgcaccaccggagcagtgtaccattccgtggatttccggacgcaatgcatcaagcaattttttgactaccggtgcgtatgtacgggtaggagagagtactaacttacctgcatcaattggagaatcttccacgctgtctgttagttttaacttaccggaataaactaactcttcaggaactgcagcatcatagctttccggatatttttcagcaagatatttgccgaatacgtcgtgacgggcactcgtcaaaccgttactgcccataccgccattatattctttttcgtaagtagcttgtccgtaagaagccaacccaacgataacgtcacctgggcgaatattggcattgtcgataacgtctgaacgtttcatacggcaagttacggtagagtcaacgatgatggtacgtaccaaatcgccgacatctgcagtttcaccaccggttgcatatacgcctacacccatttcacggagttcggtcagcaattcatctgttccgttgatgatggcggagattacttctcccggaatcaacagtttgttacgtccaatggtagaagaaacaaggatattgtctacggcacctacacaaagcaggtcgtcgatattcataatcaatgcatcctgtgcaatacctttccaaacggataagtcacccgtttctttccagtacatataagcaagagatgatttggttccggcaccatcggcatgcataatgttgcaatattccgggtcacctcccaatatatcgggaataattttacagaatgctttcgggaagattcctttgtcgatgttcttgatggcgttgtgcacatcttcttttgatgcgcttactccacgcatcatgtatcgttgattactcatgagttatagaattattttgtatacggctgcaaaagtacagcttttttttggtacagccaactaggtactagtaaatgttaatcattaacttttatactttgggatattctattgaaaaggagaagaataatagaaaattaagagttaaattcatagttttcattactatgaatttaactcttaatatagaagtgttttatctaatgaaaaaatgccgagataaatatctcagatgatatcaagtatctttttgggtaaatcaaatcttttttagaattctaccttcggagctttctcgcttccttcttctgcttcaaaatatgctttcttatcgaagccgaacattcctgcaaagatattcttcgggaaacggcggatattggtgttataagcttgtgcagcatcattgaagtttttgcgtgctacattgatacgattttccgttccttccagttgagcttgaagttccaggaagttctggttagctttcaggtccggataattctcggtgatagctaataacttacccaatgctgatgttacagcaccttgtgccttttggtattgcgccagcttttccggtgtcaggtcggcagcatctactttgatttgagtagcctggctacgtgcggcaacaactccttccaaggtttccttttcatgtgtcgcatatcctttcactgtgtttaccaagttaggaatcaggtcggcacgacgttgatattgagtttctacatttgcccattgaccacttacattctcgtccatagtaaccagaccgttatatacacttactgcccatataacaaggatagccacaacggctaagatgataataattgatttcttcatgtttcttgtttttatagaatttgataatttgttttttacttgttttctttagaaacgagaaccggcaccaccgccgccgcccattcctccgccgaagctgcctccaccgaaaccgcctccgcctccgaaactgcctccgccaaaaccaccaatgaacggaccgcctccgccaccgccccggtgatggtaatcattgtcataactttgctggcggcgtatgatggtatgtccacagtttctacatgtataggtgacatcttcggtcttcactccattaatccgggatacgactgcgcttccacttctctgcaattgatgtttaccacaattcggacaacgactttgtttacgtgccgaaaagaaagcaagacctccgccaatggcgataaaacaaaggatggcaagaataaaatcaaaagaaccaccgctgttagaatcggagagagcatcattttccatcgaaccgtcgagtcgctgacaagtcgcttttagaccagccaccattcctgcatcccaattcccatctttgaggtaaggaatcatatatcttgtttgaatccttttgcagatagcatcaggaagtactccttccagaccataaccggtatagaactgtatacagcgttgatcggtgactaataaaatgaccaatccattgtttttgcctttttttcctacaccccatttattaagcagctggtggcagaagtcgaaacaatcttcttctccgattgagggaactacggcaaccactgtttcaattcctgtttgttgttccaaggcataaagcatggagtctatactgtcacaagcagcctgtgaaagtatgccggccgggttgcaaacatattgcattttgttttgcaggtgaactttcggaaggttgtctaccgtatatactttctcttgagcttgtagtgggaacagaagaaaagttgctagtataaaagttaatattgatttcataacgcttgttttatctttgcaaatatagaaactttttctgttatgaatctaaaactccttgttataataggtttaatggatgtatcgcccgacgaatgcacggactcggtcggtgtactcctgtttattctcttggtatgaaactgcatgggccgctcccggcacaatccatagttctttgggctccggtttggcttcgtagagcgaatataccatccaggtaggtacatacgtatctttatctccgtgaataaacagcatcggaagttgtgatttggctacttgtttcagtgaagaagcttctttgaaattccatccatatttcttttcacaaagccagcttgtggtatacatgagtggaaaaggaggaagatggaaactggctttaagttcgtgcgagaattcgtcccatacgctggtatagccgcaatcctccacaaagcatttgacaaacggcttttgctcctcaccggacaccatcatggtcgtcgcacctcccattgaaattccgtgtacaaccatttgcgtgctgtctccgaagatttcattggcgatgttcatccattgcaacacgtcccaacggtctttccagcccatttgaatggcagggccttcactttctccctgatgttgcaggtcaggaagtaatatattatatcctaaatcgcgattatacagataaccgatcataaacatacggatagcattatctgtatgtccatgcacgatgactgctgttttactggtgggttggggagcagccacataataagcatgcagttgtattccgtgcgggttaataatgaaagtgtctttcagtgcatccacttgtttcagactatccacccatggacgcaagaaagggtagtttttatacataaaaggataagagtcagcatctttagacaaaattttggcattcggagtcaatgagaagtttaacatataaaaacttcctccgatggtgcagccggtcaatgccagcatgataaaaatgatgctatatactacttttctcctcataaaaacttctctctaacccttatttatgccatatctcccaggcggcaaatgcctgaagcaggagcatttccagaccgtttttcacaacagccccttgcgcttctccttttttcatgaacagcgtaacgttcggattatataacaaatcgtagagcaaatggtttggtgtcagaagttcataagggatattagggcagaaatctaccttaggaaacattcctacgggggtacaattgacaatgactgtgtattctgccataatttcgggagtcagttcttcataagtcagcatatcgtcggctttgtgggtgcgcgatacgaagatgctttcgatacctagattcttcaggccgtggtagacagctttggaagctccgccggtacccaaaatcaacgctttcttgtgatgaggctgcaacaagggctggatggattgagtgaatccaatgatatcggagttgtaacccaccaatttgacttttccttttggctggcggatgattttaatcacattgactgcgcctatctttgcggtgtcacgatcgagttcatccagaaaaggaatcacttgttctttgtaagggatggtgacattgaggccgcacaggttgggattctcttcgatcacttccatgaagttattgatactgggaatctcgaaattcacatactctgcattgattccttcggatttgaacttctcattaaagtatccgatagaaaatgaatgtcgcagaggatagccgattaaaccatatttttccataatataataagggttaaattaatcattcacaatgaattgctattttgttgcggtataaagagtgcagatgccaaaggtcagccgtttgaagttgacttcgctaaatccggctcgggcgatgactcctttcatcacttccccttgaggaaatactttgatggtatccggcagatagcggtaggcactgttatctttggagagcagtttgcccaataatggaatgacgacttttgagtagatggaaaacaattgtttcatcgggaaacggtccggagtggtaagttccaaaatcacaagatgaccgcccggtttcaatacacggcacatttcggagagtcctttgtcgaggtcttcgaaattgcggataccgaaagctacggtgatggcgtcaaaatcattgtcggcaaaagagagtgaagtacagtcctcccgggcaaaagagatcttgtccgatagtccttccttttttactttttcacgtcccacattcatcatgccttccgagatgtccgtcccgatcagttcggcaggttgcagtttacgacaggcgaggatagcaaaatctcctgtgccggtagctacatccatcatacgctgcggttggaaagggcgtaaccaggcaatcgcttttttgcgccagctgcggtcgatacctagagataaggtatggttcagcttatcgtatgcatgcgcgatgttgtcgaacattcgttccacttgctcggtctttttcccttcttcgtcgtaaggcttgatatgttgttgtgggtagtccattctttttaattgatagttgataaatgatagttagaagatgatagttgataaatgatagttggcggataataattaaggttgaagttatatgcgatgaattgcatacgaactgtcattcattatctgtcaactatcatttattatctgtcatttgttgactatcaacgattcaagaacgtttcaacgtttttgaatatacgttcagcgatgttggtggtatcttctttcacaaacttctcaccggtgatgttttcgaacaattcgatgtaacggtcactgatgctttgtacgatagccggagtcatttcaggcactttctgaccgtctttgccctggaaaccgttttccatcaaccattcgcgaacgaactctttagaaagttgtttctggggttcgcctttttcgaaacgttcctggtaaccttcagcatagaaataacggcttgaatcgggagtgtggatttcgtccatcaggtagatagtaccgttgtgcttgccgaattcgtattttgtatctacgagaatcagtccgcgttctgctgcgatttcagtaccgcgtttgaaaagggctaatgtatatttttcgaggatttcatactcttccggagtagccaatccctgtttcaggatttcttctttagagatgtcttcgtcgtgcaatcccatttctgctttcgtagtcggagtgacgatcggttcggggaatttttggttttcgcgcattccgtccggcaattttacgccgcaaatctcgcgtacaccgcttttgtaagcccgccatgcgctaccgcacaggtaaccacgtacaatcatttccaccggaaaaccttcacacaacacacccactgttaccattgggtccggagtagccattttccagttcggacagatgtcagtagtggcatcgaggaatttagctgcaatctggttcagcatttgtcctttgtaaggaataccttcaggtagtactacgtcaaaggccgaaatacggtcggttgctaccatgacgagtttttcgccgttgatgttgtacacatcgcgcacttttccgtggtacacacttttctgtcccggaaagttgaaatctgtttttgttaatgctttcatatgtttaattatttataatacttcctgtgttgatat

SEQ ID NO: 8161 - DNA, 1412 bp, Unknown
  gut microbiota DNA sequence
caacacaccgttttctctttcgaattttgtaaatttgcctttcctaaccacgaaatagaataaataacaatgcgaatagttatacaacgggtaagccatgcgtcagtaaccattgaaggacactgcaaatcgtccatcggaaaagggatgctgatattagttggcatcgaagaatcagacgggcaggaagacatcgactggctctgcaaaaagatagtaaatctacgtatcttcgacgatgaaaatggggtgatgaacaagtctattttagaagatggaggcgaaattttagttatcagccagttcacgctacacgcttctaccaaaaagggaaatcgcccctcctacatcaaagctgccaaaccggatatctctatcccactctacgagcaattctgcaaagatttaagcggtgcactgggaaaagaaataggcacaggaatcttcggagcagacatgaaagttgaacttttaaacgacggtcctgttactatatgcatggataccaaaaacaaagaatagatattccatactaatcattaatcactaatcattaaaaaaatgactctggaagaagcacagaaacaagtggaccaatgggtgaaaacatacggtgtccgctacttcagcgagttgaccaatatggtagtcctgacggaagaagtaggagaactggcccgtgtcatggcccgcaaatatggcgaccaatccttcaaggaaggagaaaaagacaacatagatgaagagatagcagacgtcttatgggtgcttctctgcatcgccaaccagacgggagtagacatcactgacgctttccggaaaagcatggaaaagaaaacgaaacgagataataaaagacatatcaacaacccaaaactgaaagatcatggaagagaataactcacagcccaacaagtacaaggccgcattggcaaagtataataccaatctgagcgatgcagatattcaagctcgcgtagctgaattgattgagaaaaaagtgccggagaacaacacggaagacgttaagaaattcctgttcaactgcattgatctgaccaccctgaacagtacggacagcgacgaaagcgtgatgcactttactgaaaaagtcaatcagtttgacgacgaatatcctgatctgaaaaacgtagcagccatctgtgtgtaccccaactttgcagccatcgttaaaaacacgctggaagtagacggagtcaatatcgcctgtgtatcaggaggtttcccctcttcacagacattcattgaagtgaaagtggcagaaacagcactggccattgcagacggtgcagacgaaatagatattgtgatttccatcggcaagttccttagcggagactacgaaggaatgtgcgaagaaatacaggaactaaaagaagtttgcaaggaac

SEQ ID NO: 8162 - DNA, 22516 bp, Unknown
  gut microbiota DNA sequence
aaccgtgcgccgcgaccttgcaggaaacatttattcggaagctgctttcgacagcatcctgcctatgttttatttccgtcagttgatgtctgatgagcgttttccggataccattcaaggaatcgcaatgactcctaaaatggtgcagacagaaaacttcaacttccgcagtgtgccttcggatataaacgcaccttctatcgggctttacccactgatggaatctatgtcaggacgtgtggacctgaaaatgccggatgacgtattccgtatcacctccaaagggatcgaatttatcgacatggctaccaacagcgtgaaggaagacaaaagccttcagtttaccgaagctatgactaagaaggattttcgttttccggcaacggaaatcgtaggaaatccgacggtgaaaaaggagtatgacgaaggttatcttctgttggatgccgaccgtcgtctgtttcatctgaaacaggtgaaaggacgcccgtatgtccgtgccatcaccttgcctgaaggcctgacattagaacatctgtatctgaccgagttcagaaacaaaaagacgcttgcttttatgaccgatgtcaacaaggctttctatgtgttgcagaaccggacgtatgaaatcgttaaaacaggaatcccggcatttgatccggaaacggatgcgctcaccatcatcggtaatatgttcgactggacagtccgcgtgacaactccggcttcagataactattacgcattggatgccaacgattattcgctgataaagaagctggagaacgaatcgaacgttcattccatgccaggtattacgttcacatcttacacagataaatatgtaatgccacgcttcgaataatgtttcaataattgaatgtaacatgggtgaggggttatcaaaagtcacatttaatttattgacttttgataacccctcactgtttcctttccacgcatttagagaaaacaaaaggatttacaattatttcttcaataagtatgttttttccagcaaaaaggtttacctttgccgactcattcaactatttaaaccgcaattgcttctgcattatactcaaacaaatacggtaaaacgaaataactcaaactaaaaaccgtatgaaagtttaccaagcatttgctttcctaagtatcttcatcatattgttctataattgttcgctccctgctgatgacgaaaaaaagggagaattaggaggaggagacactatcacacccgaacttccctgggaaggagagatggacaaattcaccatcaactctaaagaaggaatccatctgaatgatccacaggaagacgccggaacagcttatgtcaccattccttctacctctataaaaaatacccgttgggaatttggagttcacctcaccttcaacccctccgccaacaattatgcacgattttatctgacttcttcctcaaacattctttccggtaatttaaacggctattatattcagattggaggagcaaaagacaatgtagctctttatcgtcaaaacggagagcagtctaaactactggcttcgggaagagaactgatgaaaggcgactcatcaccgaaactatatataaaagtagaacgtgacaataacggttactggactttttggacacggcttgaatccgagaatgaatacgtaaaagaaaaacagataaaagataccgatatacagacttcccgctactgcggtatatactgcatttacaccaaaacccgttgtaaaggattcacgttccatcacatacagttgtctaatgacgtagaaacgaacacatcacccgacgaaacacccgataaccccgatacggaccttccagataatccggacactcccgaactaccgagagatgtgagaggtatgcttcttttcaatgaaataatgtataacaatgccactgatggtgcagaatatgtagaaatctataatccaactgaacaggcagtcattttacccgcactttatctatataaaatgcatgaagacgggacaatatacaatactactatccttcaaaatgagagtccttctactcccctagccattccttccaaaacttatctttgtttcacgaaatacttcaacagagttgttcagaaacataaagttggtggagaaaatataataattataccgaacttcccggcactgaacaataatggtgggtatctggcactttcgagtagtaaagagactgcaccaggacatacttttgacacttgttgttttagagatgaaatgcacaccattgacaaaataaccggcatttcgcttgaaaagaaatctccggagttgtcctcgctcaataaaaactggcgttcgtccaaacacgcgaccggaggcacaccgggaataaaaaataggtaagagtatacatatctatgataaattccctacttttgtagacaaagataaactaattcggatcattcatcctcaaacgaatttaaatagcagatatgagtccagccgttatatctatcactattgtggcatactttataatcctgttcactatctcttatatagcaggacgcaaagctgacaatgaagggttcttcgtaggaaaccgtaaatcggcatggtatgttgttgcttttgccatgattggttccaccatttcgggagttacttttgtatctgttccgggcatggtacaagccagtagtttctcttatctgcaaatggtactcggctttatagtcggacagtttattatcgcctttgtgcttgttccactgttctatcggatgaatctggtttctatctatgaatatttggagaacagattcggagcttcatcctataaaacaggagcatggttcttctttatctcaaagatgctgggagctgccgttcgactatttctggtatgcctgacgctgcaactgctgatcttcgagcctttccatcttcctttcctgttgaatgtcatacttaccgtatttatagtatggctctatactttccggggcggagtgaaatcattgatatggacggatgtattgaaaacattctgtctggtagtctctgtggtactatgtatctattatatagcctccaacttgcacctcaactttagcggcctggttactaccatatcagatagtgacttctccaaaacattcttcttcgacgacgtgaacgacaaacgctatttcttcaaacagttccttgcaggagtgttcactgtcattgccatgaacgggctcgaccaggatatgatgcaacgcaatcttagctgcaagaatttccgggattcacagaagaatatgattacaagcggtatctcacaattctttgtcattctgctttttctgatgctgggagtactgttatatacgtttacagcacagcaaggcattgggaatccggaaaaaagcgacgagttgtttccgatgattgctaccggaaattattttcccggcatagtcggaatattattcattatcggactgatagcctccgcctattctgcagccggttctgccttgacggcactgaccacttcctttactgtagatattttacatgcacagaaaaaaggagaggcggcacttagccaaatacgcaaacatgtacatatcggtatggcagttgtgatgggagcagtcattttcgtattcaatctgctgaacaacaccagtgtgattgatgcgatttacacattggccagttatacgtatggtcctatcttaggactgttcgcttttggcatcttcaccaagaaacaagtttatgataaatatattccgttggtagctatcgcttctcctattctttgctatatccttcaaagaaattcggaagcatggctcaacggttaccaaattagttacgagttgttgataatcaatgccctgttcacattccttggactttgtttgttcatcaaaagacaagacaaagaaacatcttacacaactcatactacaaaacaaaaagtaaaataatgaaaacaacaatcaactgttttcttcctttcagccggttggaagaaactgtgcaaacagttaaggagttacgtgcatcgacgctggtagacaaaatttatttattggcatcgccaattaccaatgtctgtattcccggatgcgaactcatctctgtagagaaaatgcagtctacacaagcgatgcgagctattgcagatcattctgataaaacatataccttgctttataccaaacacactgcactaaaaataggcatgttcgctcttgaaagaatggttcaagtaatggaaatgacccaagctggcatggtatatgcagaccattaccaacagatagacggtgtgcaaaaaacagctccggtcattgattaccaacccggtagcctgcgtgacgacttcaatttcggctcggttttactgttcaatgccaacgcattcaaggaagttatagaaaatacagaagaggaatatcaatatgcaggcttgtatgatttgagactcaaaatatcccaaaagagcaaactggtacacatcaacgaatatctatataccgaagtagaaagtgacaagcggaaaagcggtgagaagcagttcgattatgtagaccctaaaaaccgtcaggtacagattgaaatggaacaggcatgcaccaaccatttgaaggaaattggcggatatctttatcctatcttccgtcccgtagacttttcttctcacacttttgaatatgaagcttctgtcattatacccgtacgcaaccgtattcgcacagtcaaagatgccgtacgctcggcactgaaccagcaaacgacctttccgttcaatgtcattgtcatcgacaatcattcaacagacgggaccagtgaagttctccatgaacttagttcggacaagcggctgattcacgtcattcccgaaagagatgacctcggtataggcggatgttggaacataggtatccatcacgagaaatgcggaaagtttgccgtccaacttgatagcgatgacgtgtataaagacgaacatagcctgcaaatcatcattgatactttctataaacagaaatgtgcaatggtaatcggcacttatatgatgactaactttgatatgcaggaaattgcccccggcatcattgatcataaggaatggacgcccgacaacggacgaaataatgcattacgtatcaacggtctgggagctccccgtgcattctacacgcctattcttcgggaaatcaaagtcccgaacacaagctatggagaagattatgcccttggattgaaaatttcacacgattatcagataggcagaatatacgacgtgatttacctttgccgccgttgggaaggcaactcggatgctgcactgcctgttgagaaaatcaaccagaataatctatataaagaccgacttcgtacgtgggaattggaacagcgcatcctgcaacaagaaacgacattagagaaaattcagcaaaaaatcgaacagttattccaaaagcaaactctttcttgggaactagccaaagagaattaccaagcattggaacagtatcggtcacgaacaaaagaaatatccaagtggtttggtaacaattgtttaagtgcgaaactattctttaatccgaaacgtattctttcggctaccgcacagacagatactgcctccattcactcacggccttgcttcctctgccaaacaaaccgaccgcaggaacaagagttcatcagttacaggaattatcagatactggttaatccctatcccatatttaaacaccactttacaattgtagataaggaacacaagtcacaatccatagccgggcgttttaaagatatgatagaactcaccgacattatggaagaatacttccttttgtataatggaccggaatgtggagcttccgctcccgatcatgcccattttcaagcttgcagtaaagaggaaagtatacagggagcctattacgatcgcatggaattaatagataacgacaaggtgcaaattagttataaagatttcccgtgcagtttcatcaggattcaggcggaaaataagaaaacaatgtcgaaaaccttccatctgatttacgacatcttagctaccaataataacggaaaagaaccaatgatgaatattcttgcctggtatggtttggaacgcaccaaagaggattttggaaagaactatgacgatgaatttgagtcagtggccgaacacccttacaattgtattatcttcttacgcagcaaacatcgtcctgactgctattacgcaaaaggggacgaacaaattatcatcagtcctgctattgctgaaatgaacggcatattccctatagtacgtgaagaggatatggagaaactgactcctgaaaaggtatatgagatctatcgggaaatatctatatccaaagaaaaactgcaaaaaatattagaacgtattaaggctgtattatgactcaacctcaaataacagttggtatcctttccgggaaagagattgaattctctttcccggtgaaatttagttcttctgtcggaacggaaatttccgggacacagaaagttatttatcaggatgggaagattcattggcaagggaaagagtacgacgaattatccttcattcctccacaaaatgcacatgctttctttgaactgaaagatgtgaccatcggaatcaacttccattgggaacgcaaagaagtccagaaattcaaaggggaattaaagattatcatcgaaggagaacaactaaccgccatcaatgtgatttccattgaagaatatcttaccagtgtaatttcatccgaaatgagcgcaacagcttctttagaactactaaaggctcacgccgtcatctcccgaagctggctactcgaaaaaaataaagaattaagaatgaagaatgaagaatttaaaagaactttgcaaaaagacagcgcagccaattcttcattcttcattcctaattcttcatttattaagtggtatgaccatgaagcacatagaaatttcgatgtatgtgccgatgatcattgccagcgttatcagggaattacacgagcctcaacaccacaagccatcgaagcagtctccaccacgcggggggaagtgctgatgtataaaggagcgatttgtgatgcccgtttctctaaatgttgtggcggagcttttgaagagttccaaaattgttgggaaaacgtaaagcatccttatctaatcagacaacgggatagcaagactgaaaaacaacttcccgatttgaccatagaggcggaagctgataaatggatacgtacctcacctgttgctttttgtaatacgcaggataagaaaattctaagccaagtactaaacaactacgatcaggaaacggcagacttctaccgttggaaagtcagttattcgcagcaggagctttcagaactgattcatcaacgttcggggattgacttcgggcaaattctggatttaattcctgtagaacggggaacatccggacgtcttgtccgattgaaaattgtaggaaccttgcgaacgcttattatcgggaaagaactggaaatacgccgtaccttatctacttctcatctgtatagttccgccttcgtagtagacaaggaatatgaggaaaaaggacataaagaggataaaatcccttcacgattcatcctcaccggagccggatgggggcatggagtaggactttgccagattggtgctgccgtaatgggagagcaaggttacaaatatgaagaaatactgtctcactattaccccggcagtacactcgaaaaacaatatcaataaaaaagaataataccatgacaacacccactacaaaaagaaatccctggagctggatacccaccctctacttcgcagaagggctgccatacgtagcggtaatgacgattgctgttatcatgtacaagcgtttgggattatccaatacggaaatagccttatacacttcctggctctaccttccctggactatcaaaccgctatggagtcctttcgtcgacttggtgaaaacgaaacgcgcttggattattgccatgcaaggtttcatcgctgccggatttgcaggaatagccttctttattccaacggctcattatgtacagttgactcttgcttttttctggctgttggcgttcagttccgctacgcatgacatcgctgcagacggtttctatatgctcgggctcaataataaagaacaatctttctttgtcggtattcgaaatacgttttatcggcttgccaatattttcgggcagggaattctagtcatgctggcaggatggctggaaacatcacagaacaatattcccttggcatggagtattacattctacctccttgccggattatttctgactcttactatctatcatcggcttatcctcccccatcctgattcggacattaaacgtcccggactcacaccgggtaagttgttgggggattttctcctgacctttgtcacattctttcagaaaaagaacctcggtctcatgttctttttcctcctcacctatcgattgggagaatcacagttagccaaaatagcttctcctttcctgctcgacaccaccgataaaggtggactgggtttatccacagcaactgtcggaatgatctacggtaccataggtgtcatagctttattgctcggtggaatcattagtggtttcctcgtttcccgtgacggattcaagaaatggatattacccatggcattagccatcaacattcccgatctattatatgtatggatggctgccgccaccccggacaatcctatatttatagccatttgtgtagcgatcgaacagttggggtatggtttcggctttaccgcttatatgctatatctgatttatatagcagaaggtgaacacaaaacggcgcactatgctatcggaaccggatttatggcactgggcatgatgattcccggtatgcctgccggatggatacaggaacatctcggatacacaaacttctttatctgggtttgtatttgtaccctgcccggtatcgtcgcctcattaatgattcgcaaccgactggaggattctttcggaaagaaacaataaaaaactcaaagatatgatactcattgcagatagtggttctaccaaaaccgactggtgcatcgttttcaacggcaccccaatcaaacgaatgggaacgaagggaattaatcccttcttccaatcagaagaagaaattcaacaagagctgacacattccctcctgccacaactaccggaaggaacgatcaactccgtctttttttatggtgcaggctgcactcccgaaaaagctcccgtcctccggcgggctattgccgacagcctgcccgtcatcgggaacatcaaagcctactcggatatgcttgccgctgcccgcggactatgcggacatgaagcagggattgcctgcatcctcggcacaggttccaattcctgtttctacaacggtgaagagattgtcaacaacatctcccctcttggattcatcctgggagatgaaggaagcggcgcagtcttaggaaaactattggtaggcgatgtactgaaaaatcagcttccgcctgccatcaaagaagctttcttaaaacagttcgacctgacggctcccgaaatcatcgaccgtgtttatcgccagcctttcccgaaccgttttctggctagtctctctcccttccttgcacagcacttggaagaaccggctatccgttcactagtactcaacagctttatcgcttttctccgcagaaacgtgatgcaatatgattataagcaatatccggtacattttattggttccgtagctcactgttacaaggagattttgcaggaggctgcgcaaacaacaggtattcagatcggtaagattcttcaaagtccgatggaagggctgattcaataccatcaacaataatgcttttacctattgtaatttataaccagtaattataaaaatgcaaataaccgaacaaccgtccttttacgatcatctggaaaagaaatctgtgcgagagatcttagaagatatcaaccaggaagatcagaaagtagcgttagccgtacaaaaggctattccacaaattgaagagcttgtcaatcagattgtgccccgcatgaaacaaggcggacgcatcttttatatgggggccggtacaagcggtcgcctgggagtattggatgcttccgaaattcctcctactttcggaatgtctcccaactggattatcggattgattgcaggaggcgatacagccctgcgcaatccggtagaaggagccgaagatgatgaaaatcgaggttgggaagaactcgtcgaacaccagatcaacgaaaaagacaccgttatcggcattgccgcttccggcactaccccgtacgtaatcggtgctttacgggaagcccgtaaacacggtgtcctgacaggttgtatcaccagtaatcccgattctccaatggcggcagaggcagatgtcgccatcgaaatgattgtaggaccggaatatgtaacaggcagttcccggatgaaatcgggtaccggacagaaaatgattctgaatatgattagcacctctgtcatgattcaacttggacgggtgaaaggaaataagatggtaaacatgcagcttagtaatcataaactggtagaaagaggcaccaggatgattatggaggaactaggattaaatcatgaccatgcacaaaaattgttactgttacacggttcggttaagaatgcaattgacgcttaccgatattctcaagatcattaaaatctctacttactcttgtttaaccaacttatattatacgcatcacataccaatcttattaatacggaatatgacacattaaccatcattattcatccgacagcctcatagatacaatacaaaaagattttgaaacaaaatcaaaaacatttattgaacaaaccagtttgttcacacttcttcattttatctccgaagaaaaaacttcaagaaaaagtaaattggtatcaacagtataaataattgaaacatacccaaagcccgttcttatcaataccaactatctttgcatcgtgtcacagtacagacaaaaaataaaccatttttggaatttaagacacaaagaagataatttcattaaatatagtatttatgaagaaggatatttgcatcattttgagcctgctgttatatacttttcaattaccaattatctgcaaagtagaatatccggttacagtgaaacgtaagatcaatgattaacaacaaattattaaatattgaaaccatgaaaagattatttctattcttctacctctctgttgtgagtatagcggcatttgccgctgaacaatttgtaatattcacaccggccggtaatcattttccgttgattgccaacggagttccttgtccgatatatgtagattcttccgaagacaaaggggtaatgatagctgtcggcaatcttcaacaagatatactgcaagtatgcggaacgaagcctgattttttaacaaacgtaagttcgaaacactgtgtcattgtaggtacctatagtactccttttgtaaaaaaactgatagctgcaaacaaaatagataaaaaggagctggaagggaaaaatgagaaatatatcctgcaagttgtcaccaatccctgtgaaggagtagatgaagcagtggttatcatcggcagcgacagacgcggtacgatctatggtatctatgaactttccgaacaaataggggtatctccctggtattggtgggcagacgtccctatccgaaaacaacagaatgcatatgtaaagccgggacagtatacagacggagaacctgcggtgacctaccgcggcatcttcctcaatgatgaagcgccctgtctgaccggttgggtaaaacagacctacggcacaaactatggtgaccaccgtttttatacacaagtttgcgaattgatactacgcctgaaaggtaatttcctttggcccgccatgtggagctgggctttctatgcagacgacccggagaatagtaaaacagcaaatgaaatgggagtcattatcggcacgtcccaccacgaaccgatggcacgcaaccatcaagaatggtcacgcaagcgcaaagaatatggagcatgggattatgcgaccaatcaaaaagtgatcgatcagtttttccgtgaaggcatcgaacggatgcagggcacagaagatatcgtaaccattggtatgcgcggagacggtgacgcagccatgagcgaaaacaccaacgtgaaactgctggaaaatgtagtcaaaaatcaacgcaagattattgaagaagtcaccaaacgtcctgccaaagaaaccccgcaagtctgggcactatacaaagaagtactggattactatgataaaggtatgcgtgtgcccgatgatgttatcatgctattatgtgatgacaattggggcaatgtatgccgtctgccaaatgccaaggaacgtaagcatccgggcggttggggcatgtattaccatgtagactacgtaggtgctccgagaaactccaaatggctgaacgtaacccctatacaaaatatgtgggagcaacttcaactcacatacgattacggagtagaaaagctgtggatactgaatgtaggcgatttgaaaccaatggaatatccgatcacgcttttcatggatatggcatggaatcccaagcaattcaacgtctctaacttgctggatcatccccgtcgtttctgcgcacagcagtttggcgaagatcaagcggatgaagctatgcgaatcttaaacctgtacagcaaatataacggtcgcgtaacgggagaaatgctcgaccggaatacttataacctggagaccggcgaatggaaacaagtatctgatgaatatctgaaactggaagcggaagctttgagacaatacatatcattgaaaccagaatataaagatgcctacaagcaattaatcctcttccctgttcaagccatggcaaacctgtacgagatgtattatgcacaagtcatgaaccataaattgtacaaagaaaacaatccgcaagctaacgaatgggcagataaagtggaacaggcttttgcacgggataaagcgttgagtgacgattataacaacgttatgtccggcggtaaatggaagaacatgatgattcagaaacatatcggttatacctcatggaatgataatttccccgctgatacactaccacaaacctaccgaatcgaaaatccggaaaaggctgtcggtggatacgtcttcaccgggaaagacggatatgtagctatggaggccgaacactattacagcactaaagcagcaccaggtacggaatggacagtgatcccctacatgggacgaacccttagcggcatggctctgatgccttatacccagccgaccgacggagcttctatctcctacaaaataaaattgcctaaaggagtcgacaaagtgactgttcacgtgatagtgaaatcgactcttgctttccacgaccggaaagggcatgagtacagtatcggattcgaaggaacaaaggaacagactatcaatttcaatcataacttaaatgagcttcctgaaaatgtatacagcatatactatccgacagttgcaagacgtatcgttgagaaaaaggtcaaactgaatgtgccgaatacatcagacggcatgcagacactaattttcaaacctcttgatccgggcatcgtgctggaaaagttggttgtagactacggaggctacaagaaatcttatctgtttatgaatgaatcgaaaagcaagagagataatagataaaaagatccatgtagagacaagtcaattactacacactgattctatttacatataaattttgcagtttttattgtcagccgtcatttctattcattagataaatgattttcaatccattagatgctgacaataagccctgacaataggctgacaataacattttataagttttattgtcagcctattattttatgattttgctctcccatatctcctatccagctttacttacttttcaagaaaagcctccattaaacatccgtcatacaaccggcatacttatatcattcaataactattgttcgatcaggataccggtatacttaattcttcacggccgtggtagcttcttcccacagccgtgacgagttcctaccacggccgtgggaagatcttgtcacggccgtggggaattaatgataccggtactttcatagaacaataccggtatcccaacgcaactataccagcttcccttcttatacctccctacttaatcagcttgcaaataagctatatgacaagagggcaaggctgataataaatcaaaaagaaaccagcagttattattttaccctgtggaacatacaccatatatattagtaacacaaatatggaaagaagttacttccaaggtagatttcagaaacagttttttgccttttgtattgggaaatgagctacctttgctacaaatccatacaatatgaacagaaacactttttttgtattattcctattaataagcaaccttgtttcaggacaggacctgaaactgtggtatagtcaacctgcacaaaattggtcggaagctctccctattggcaactcccgtcttggagccatggtatatggcggaatcgaacgcgaagaattacaactcaacgaagaaacattttgggcaggctctccatacaataataataacccgaatgccatacatgtgctaccggttgtacgcaaactgatttttgaagggagaaacaaggaagcgcaaagactcattgacgccaacttcttaacccagcaacacggaatgagctatctgacattaggtagtctttacctggaatttccggaacaccaaaacgcatccggcttttaccgcgatctgaatctggagaatgcaacgacaactacccgttatcaagtggatgacgtcacttatacccgcaccacttttgcttcatttactgataatgttattattatgcatatcaaagcaagtaaagcaaacgcactgaactttactattgcatataactgccctctagtacataaggtgaatgttcagaatgataagctgaccgtcacctgtcaagggaaagagcaggaaggtttgaaagctgcactacgggcaggatgtcaaatccaagtaaaaacgaatggcactctccgcccggcaggaaatacgctccaaataaatgaaggaacagaagcaaccctttatatatcggcagcaaccaactacgtaaactaccaggatgtcagcgccgatgaatcccgacggaccagcgaatatctgaaaagagcaatgcaaataccttacgaaaaagctctcaaaaaccatatcgcttattataaaaaacaatttgaccgtgtacgccttacattaccgacaggcaaaacttcccaactggagactcccaaacgaattgaaaacttcggaaatggagaagacatggcaatggcagctctacttttccattatggacgttatttactgatttcttcttcgcaaccgggtggacagccggctaatctgcaaggtatatggaacaacagtactcatgcaccttgggatagtaaatacaccatcaacattaatacagaaatgaactattggccggcagaagtcactaatttaagtgaaacacatagtccgctattctctatgttgaaagatttatctgtcacaggagcagaaacagcccgaactatgtatgattgtaggggatggatggcgcatcataatactgatttatggcgaatttgcggagttgtagactttgctgcagccggcatgtggcctagtgggggagcctggttagcacaacatatctggcaacattacctctttacaggaaataaagaattcctgaaagagtactatcccatcctgaaaggaacagcgcagttctacatggatttcttggtagaacatccagtgtataaatggttggtagtgtcgccttctgtgtcgccggaacacggacctatcacggccggttgcaccatggacaatcagattgctttcgatgcgctgtataataccttattggcttcatacatcgcaggcgaagccccctctttccaagattctctcaaacaaacactagagaagttgccacctatgcaaataggaaaacataaccaactacaagaatggctggaagatgttgacaatcccaaggacgagcaccgtcatatttcacatttgtacgggctatatccgagtaatcaaatttctccatactcgaatcccgagttattccaggcagcaagaaacacattgcttcaacgcggtgataaggctaccggttggagtatcggctggaaagtcaatttctgggcacgtatgctggatggaaaccatgccttccaaattatcaaaaatatgattcaactattgcccaacgatcacttggctaaagaatatccgaacgggcgtacctatcccaatatgctggatgcccatccgcctttccagattgacggtaatttcggttatacagccggagtagcggaaatgttgctccaaagtcatgacggtgccgtacatttattgccagcattgcctgatgcatgggaagaaggaagtgtgaaggggctggtggcacgtggaaactttactgtcgatatggagtggaaaaacaatgtgttaaataaagcgatcatccgatcgaatataggcggtacgctccgcatccggtcttatgtcccactgaaagggaaaggcttaaaacaagtaaacgggaaagagtgctcaaatagattattcgccaccactcctatcaaacgacctcttgtagccaaaggggtaagtgcgcaatctcccaaactgcagaaggtttatgaatatgacattgaaacaaagcccggtaaaacctatattgtaagtacaaccgaaggaaaacaataatacataacgagaggtaaatcttttctcatgttacattatttacaaacgatgttacaacatccgattgtactcccggagcctaatgaaaatattcatcttttattaggttatatgtaggtttttagttttctttgtactaccaacaacgatctattgactatgagaaatgtattgacttttctattattattgttttctttgttatgcaacgggcaatctcctaagttattcactactgacaaagagctctccagtagtctgattaatcaaatatatcaagaccggaacggcttcatttggattgcaacagaagatggtctgaaccgttatgacggtgctaaatttaccatatacaaacatgagcccaataacgaacattcgttagcccacaattttgttcgtactgtttttgaagacagcaaaggtcatttgcttatcggcacatatataggaattcaaatgtatgatccggccacggacaattttactccacttgccaaattggaagataccggagaaacgcttgaaagcaacattaattctttcatcgagcgaaaaaacggagagatatgggtatccggaaatgtgttgtgcaagctggacatcaaagaccatctgttgactgtccggaaagtcgatattgcagtcacttcacccggaagcctgtttgaagataaaaaacaaaatgtatggatggcaaaaggggaagaaggagtatatcaactcactcccgacaatcagcttacgttacacttgtctaaagacaacggatacgtcaaaagtatatgtgaggatcaacgaggcaacatttatgtaggaagtatacgaaaaggactattcatttacgataaagaacgtaaaacctttgttccaatcgatttgaaagagaaaggcgaacttcctgtttgtttcctttattccgggatacccaatgaattgtatatcggcactgacggcaagggagtagccatttataatatccgaacacacgaaatctccgaatacaagtttgacaataattatttcgattcggggaactcgaaaatacactccatcctaaaggacaattcgggtaacttatggttagctgtttatcagaaaggagttatattaatcccagcccgcaccaacagctttaagtatatcggacataaatcaacagataaaaattgcataggctcctgttgcattacttcgttctgcaaagataataacgggactctatgggtgggaacggataacgacggtatttatgcccttacagaaaaattggagccggcaaaacatttctcacacaccacccatcctcattcagttccctcaactgttattaaattgtatgaagactccgaacacaatatgtggattggttcctttatcaacggtatgggaaaactgaacaaacagacaggattatgcgattaccagtacaaactggtagataagaacaacaactatatacaacgtgtatatgatttcgcagaagataaaaacaagcgtctttggattgcgacaatgggattcggtttgttctactatgacctgaaaacgaaagaatttacatccgtacaatctcagacatctctaatcaacgaatggataggttgcctgcactattccgatgataataaactgtatgtcggaacttatgacggcgtcaactgtatagaccttgacagtcctgattttcaaagtcataagatactctcacaaaatgttatttattcaatctttgaagatgccgacggagttgtctggttgggcagttccgaaggattatccggttggaataaaaaaacgaaagaactaactacttatactactgcagacggattgcccagtaatacaatatatgccatacaaggagatggaaaagattttctttggataagcaccaatgccggaatttcccaattccaaaagaaaaacgacaaatttatcaattattatgtcagcgacggattacagggaaatgagttctacaagaatgcctccttcaaagataaacaaggtattatctggtttggcggaatgaatggtatcacctatttcaatccgcaagacattatcaatccggcaaaaacatggaatatccggattaccgactttttcctgcataacaatccggttagaaaaggaatgaaatccggtattcacaatattatcaactgccctgtattcaacgcaaaagagttttatctatcccataaagacaatgtgttcagtatcgagtttgccactctggaattaaatgcccccgaacacatcaactacctttattctatcaacgatgaaaaatggattagtttgcccaaaggtgtaaaccgtatctcattcagcaatctgaaacccggtacctataactttaaaatcagagcaaaagacaacactgtgtattcaaatataaaagaaattaccatctttatatctcctgcatggtatgcttcatggtgggccaaagttatctactccttattattactgaccattatatttatcattattcttcagatcagacatcggtacagaatgcatcaggaaatgctgcaacatatccataccgaacaaatcaatgaagcaaaattgcagttctttatcaacatctctcacgagatacgcactccgatgtctctaatcatcagccctctacagaaactgattaagaatgaggagaacaatgaacgcctgaaaatatatcatattatctacagaaatgcagaacgtattctgaatcttgtcaatcaactaatggatattcggaaaattgataaaggacaaatgttcctgatgttccgggagaccaatattattccttttattgaggatttatgtacaactttcggtcaacaggcaaatacaaaaaatatccggctacaacttcacagtacgctccgggaactgaatgtatgggtagacacaggtaattttgataagattatcctgaatattctgtctaatgccttcaagtttactcctgaaaaaggaaacatagatattaccatccgtacgggagaagataatacactgcccgatcccttgaaacaatatgccgaaataattatcgcggataccggaacaggcatcgatgaacaggaaaaagaacatatcttcgaacgtttctatcagatccgtaacagccaacagaatccgaaaggcggaacgggaataggattacatctgactcgttcattagtggaattacatcatggaattatctatgtagaaaataataaagaacaaccgggttgccgttttattatccgattaccgttgggtaacaagcatctacgacctgaagaagttgacaacaatgagcaaaaggtaacagtaaccataccaactgttcctgtcatctctcccattatagaaaatgaggaagaaaagaaagtcagggtaaaaactaaatatcgcgtattagttgtagaagacgacgaagaaatccgaaattatatagcgaaggaattcggggacaaatttcatatcatggaaagccgtaatggtaaagaagcattagagcaaatatttaaaaaggctccggatttagtcattagtgacatcatgatgcccgaaatggacggacttaccttatgccggaagatcaagcagaatgtaaatctcaatcatatcccagtcattttgcttactgcgaaaacgagggaagaagacaacctggaaggtctgaatacaggagccgacgcctatatcatgaaaccattcaatatcgaaattctgcaaaagacggtagaaaatctgattaatacacggcagcagttacgcaaagtatttacaggacagcaaaatctggaaaacaaggttcagaaactggaagtgaaatcacccgatgagaaattgatggaacgtattatgaaagtgatcaatgaaaacatcggtaaccctaacttgacaatagagacaatcaccaccgaagtaggtatcagccgcgtacatcttcacaggaaactcaaggagctcaccaaccagacaacccgtgactttatacgtaatatacgtttaaaagaagccgctcgtttattgtccgaaaaacagcataccatatccgaaatagccatgttaacaggattcactgatcctaataatttctcgacaacattcaaagaattgtatggaatgccgccttcaatgtatatgaaagagcagttgagtaaaaaagaagagtaacccaactgctctctagcatgtttatctgttaaacttgtaccaatcaaagttaaacagtttgcagcctttacgtcctttgaatacaaaataaatatcttgtattcctgtgaccggttttacaatatcagtctgcaatgttttccagcattcccaacctcccgttgaaggaatagtcagttccgcaattaatggtccgcttatactgtctgtacgtacttcaagtgttccgccacgaagggcactggcaacggtagcagtgaaccgtttgggggatttattgccgaaatccacttcacgtacctttatataatctccattatgaatttcagatatatatataccggttttcacatttggttcggacttcacaccttcagaaaaagcgattgtttcagcttccaccctttcgtaaggattgagcgtacctaccggtgacaccccttcccgggtagcattaataatcgggaaagtgccgtcagcgttatacttaaattgctccaccgccgcacttcgcccgaagcctccaccacccggcagcttacccgtatgatagaagaaataagaattgcctttatagtctatcactccacaatggttagtaaacgagcccgtatcttgtaaaggcatgatttctcccatatacttccacggcccaagaggtccgtcactcatggaataggcaatatgttcgggtacacctccggcagcataaagaagataatattttccttcccatttatgaagccatggaccttctgtataagtatctttatacttaacatctttgacacgtttttccggattgggtgcaccaaagctctcaacagtctgttccagtttgcccacttcacctttcaaggaaatcatgtcgtcattcagttctgcataatagatattcggatttccccaatacagataagcacgaccgtcatcatcaatgaagaccgtaggatcaatatagtcccagcttccgtcatgaagcggtttgccgatggcatctttaaaaggaccgacaggcgtatcaccgactgccacaccgattgccatcgtattggaaagtttggaatgcaggcagacataccaataaaacttaccattacgctctacacattgtgctgcccaggcacggtcgtccgcccagtcgaatgattcgatggcaagaggagagccgtgatcggtccagttcaccatatctttggtagaatatacacgccattcctgcatccagaaaaaatccgctttgtcttcatcgtgtcccgtatacacatacaaggtgccgtcgtgtaccataggagccgggtctgtagtaaagcaagtttgcacaatcgggttttgcgct

SEQ ID NO: 8163 - DNA, 3889 bp, Unknown
  gut microbiota DNA sequence
atctttataagatagtaacattctcctaacaatcaatctctaaccaaacatctacctatttcaactcaaatggtacaatacctttaatatctctggatgaactaccgatgatcgcctcaaacttgcccggttcggccacccattcgtgtttggcatcatcaaagaagctcaatgctttcttatcaatcgtcagcgttactgctttctcttcgcccggagccaatttcactttttggaaacctttcaactcttttaccggacgagggagagaagatttcttatcgctgatataaagctgaacaacctcctgaccttcacgagtgcctgtattcttcacattgactgtgaaagaaatggtatcatctgcagtcattgttttcttgtcggccgagggttttccataggcgaaagtagtgtagctcaatccgtgtccgaacgggaacagcggtttgattttctctttatccgcccagcgataacctacgaaaatatcttcccgatagatttcattaatggtgtcccctctatgtttagactgtgccagttcttctttattacccggatattctcccagtttatgagcacctacatcttccagttttgcagggaaggtgaaaggaagttttcccgaaggattggcgtctcctaccaatacggaagcaagagctgttccggcttccgaacccaggaaccagccttgtacaatggccggcacttcatttacccaaggcatagccacagcattgccggagatattgaccacgatcaggtttttattcacctttgcgagttcactaatcactctatcctgtgcgtatggtaaacctaaagaagcacggtccgaatcttcacaatcctgatgattgctcttgttcaagccaccgaagaagactacatagtcggcatctttagccacttgcaaagcttctgcaagcaattcatcttccgaacggttatctttcaagtcctgaccggttttcacaccgttatactctcctgtcgggtcgcctacatacccacgggcatataccacttccgcttttgagcccacacggcttttcagtccatccaacggagaaatctcatatttcactttcaaagaagaactaccaccgcccacagtcatcatctttatcgcattttcaccgatcactgcgattttcttcgttttattcaaatcgataggcaatacgttaccgttgttctgcaacaatacaatgccttcttcagctatctcacgtccggcttgtccgtgttcgggagaacctaaagagccgaacggtttgtgcggatccattgaagtacggaatatcagacgaaggacattgctaaccttttcgtccagttcctttgttcctactttaccctcttttatcagtttcaagtaagggaaagcaaggtaatagttgtcatacgcatttctcgttccggcagacagtccgttcgtccaggaaccaaattccaagtccataccgttatgaatagcctgttcggtgttgtgcacaccaccccagtcggacactacaacaccatcaaagccccattcatcacgaagaatatctttaagcagacgtttgttgtgacaagcgtgctgtccctgataaagattataagagcccataatcgaccatgttccaccttcctgaacagccgctttaaaagcaggcaggtatatttcataaagagcacgatcactcaattgcacattagtggtatgacggttgaactcctgattgttcaatgcataatgcttcacacaggcagctaccccgttctcttgtacacctttgatgtaaggaaccaccatagtggcggatagatacgggtcttctcccatatactcgaagttacgtccgttcaagggagtacggtagatattcacaccgggacccaacaagatgtctttcttgcgataacgcgcctcttcaccgatacttttcccataaagatgcgacatttcgggattccatgtagcagcaagacacgtcagtgccggataggcaatacaagagtcgtttgtccatcctgcctgatcccattcatcccacaacacttccggacggataccgtgaggaccgtcggtagcccatacttcggggattccgaggcggggaacgcctgccgaactaaatttagactgtgcatgaatcatcttcaccttttcttcaagggtcatccggttcaatgcatctttcactcgctcttcgataggcttaccagtatccagatacacgggcttctgcgcaaaggcagacaacgcagtcatcacagacaagccaagtaacattgctttgagtttcatgtttattgatgatataagaaatgagttaatactttatttatatagactcccaaacaggggatatttcctagtggcggacgggtttattaatgttttttacattattccgaccaaagatgaatcctgaaagggtacaattcatcataccctttcaggataggttcaataaaaatccggcatcaatcttcagatcaatttattttctcaaccttcaaatcagcatttgcattaccattcgttacatcaatggtaaatcgatagacagccccttcttcaaatgctttattatcctgcatttccaaatttccggaatctgcaagtttaagctgttccactaaaatagagtttgcataattgccgaattctcctccccaatcattttgatggaagaacttaaaactaatcacttccgggtcaccactagtcttcaacgtttccccagctttcaaggttagctgatactttttaggagcaacttgcgccagacagagcgctttacctggctcccaacctacttcggaagacgtaacagaaggcttaccgattcctttcccgatagcccagattgcacccgttccgtcatcttgcaatttggccggtttaccatctttcaaagccattacagaaaaatacttcaaaacagcattagctgtcacccgataatctccgttaatcggcaggaacttcaatgcaccatcactttgtttctcaaagaagtcaggatcgatccaccattcattcaaattatcaatgcccgtgacagttatcatttgtccttgtgtaaacgcctgatccgacttatatatatcagtatctgtcacctccatcttatcattaccaaagaaaatatccggtgcaggtaaatctaccttccctactttctccactgtcaacactgccttggtattgcctttcgtcacatcaactgtaaacctgtaaatacctcctctttcgaacttctgaccttcttccaatcccaagtttccgtccgatgagattttaaccaattcactcgttgtagaaatagcatcacccttaaactcgccgttgtcccatttattgatatggaagaacttaaagttaatatcatccactttcatggtaacgccagctataaatgtcagttgatacttcttcgcagtaagctgtggcatacacagaccattttccggagtccaccctacttcagaaagtgccaccgacggtttaccgattcctgttccaatagcccagatagcacctgttccatcatcctgcaacttggcagcctcaccattcttcaaagcaatgacagagaaatacttcattttaccattggctgttatttggtaacttccgtcaatcggcaggaatttcaatgttccatcttcctgcttttcaaaataatcctggtctatccaccaattatcataatcaggcaccccttcaaacgctagaatgtcattcttcttcaaagtcaacttgattgcatagatatcattctctaccaattccatatcttcaccgttcacctttaacttggcaaatggttctgcctcgtaagtcaacgaattaaacttgatagcataatttcccggttccgtatta

SEQ ID NO: 8164 - DNA, 2482 bp, Unknown
  gut microbiota DNA sequence
tataaaacttcttttaataagacgtttcccttatttttttatactactctccctaatctgcaaatgtgttggaatcgtcacctgcttgatagtcttatctccttttatctgatcgataagtagttggcaggcagtttctcccattttataggtctgatgtgatactgctgataatttcggttccacataattagcatgctgctcgtctgtatacccgatgattgccacatcatccggtatgcggaggccatggtttttgataacttccattgctgcgaaagccaatgtgtcattcatggcaagaatagcatccggaggctgtggaagtgacagtaaagtttctgtggcaatcttgccttcctcataatcaattttccggcagactaccagctctttttcgattggaatacgattctcacgcaaggcttccagatagccatgttttcttctctttacaatatccaaatgattggctccaccgataaaggctacccgcttgcttccattatccagaagatgttgtgtagccatctgtgcggattgggccccatctgctatcaccgatgaaaattggtcggtcaggcaaacacggtcgaacaggataagtggcatattaatgtctttcaaggcggagatgtgggagaaatcggttgtttcttgagacagacaggcaatgataccttccacgcgcatattgaccagattctcgatatttcttttttcgtgctcgtaagactcatgcgaggtcgtgataatcacgaaatacccgttggcaatagccatattctctattccattcagaattgatgcaaagaaatgagtgacaatatccggaacgatcactccgatgatacgtggcgcatttttccgcaggctcatggcaaaagggttgggacggtagttcatctctttggccagtgcctttgctttggcgcaaagttcacggctgatttccggactatcttttagtgccctggatacagtaggaatcgacacccccaatgcttgggcgagatcttttaatgaagtatgtttccggttttccatttgaaagtctgcaacttagattctttttacaaagaaagcacattcccggaaaattaaaagcatctgaagcaatattttttacgtaaaccgttacgttggtttttcgaccgctctctgctgcactgaaactattactgacctatttttgtcgcatacaaaatgatttaaaacctaaaagtatgcaataccatgaaatcggaaagacagggatgaaagtatcatctcttagttttggagcttcttctttaggaggagttttccatgatttgaaagaaaaagaaggcattcaggctgtgtttaccgctgttgaggcaggaatgaactttatcgatgtgtctccttattacggacattataaagcggaaactgttttaggaaaggcacttaaagatcttcctcgcgaccgttattacctttctaccaaagtgggacgttatggaaaagatggagtaaatctgtgggattactctgcaaaacgtgcgacagaaagtgtgtatgagagcatggaacgtttgaatatagattttatcgatctgataaatgtacacgatgttgaatttgccgatttgaatcaggtagttaatgagactctgcctgctttggttgagttgcgtgaaaaaggagtggtaggacacgttggaattaccgacttgcaactcgagaacctgaaatgggtaattgaccattcaccaagcggtacgattgaatctgtgcttagcttctgccattattgcctgtgtgatgataaattagcagacttcctggattacttcgaatccaaagaaatcggcgtgattaatgcttctccgctttcaatgggactgttgagtgaacgtggtgttcctgcctggcatccggctcccaaacccttggtagaggcttgccgtaaagcaatggaacattgcaaagctaagaattatccgattgagaaactggctatgcagttctccgtcagcaatcctcgtatagcaacgactttgtttagtacgactaatccggagaatgtgaaaaagaacatcgctttcatcgaagaacctattgactgggaactcgttcgggaagtgcaggagattatcggagagcagaaacgtgtaagttgggcaaactcataaaacagcgtcattcgtatggactatacaattattgatgcgcacgcccatctgtggttacgacaggatactgttgtggacggattgcctatccggactttggaaaatggccgttcggaatttatgggagaaatccggcaaatggttccgccctttatgatagacggagtgaatagcgcggaagtttttctttcgaatatggactatgcgcaagtggctgcggctgtcattacccaagagtttattgacggtattcagaatgattatttgtcggaagtcgtttcccattatcccaaccgtttctttgtttgcggaatgtgtgagtt

SEQ ID NO: 8165 - DNA, 8787 bp, Unknown
  gut microbiota DNA sequence
gaagattacaaaaacgacaacaaaccatgtactgaagaagcttgggctgacttgaaagctaaagctgtaaaacaactttccggcaaacgtttgttcgttgttgatactttctgtggtgctaacgaagctactcgtatgaaagtacgtttcatcatggaagtagcttggcaggctcacttcgtaactaacatgttcatccgcccgactgctgaagaacttgctaactacggagaacctgatttcgtatgtttcaacgcttctaaagcaaaagttgacaactacaaagaactgggcttgaactctgaaactgctacagtattcaacctgaagactaaagaacaagtaatcctgaatacttggtacggtggtgaaatgaagaaaggtatgttctctatcatgaactacatgaacccgcttcgtggtatcgcttctatgcactgctctgctaacaccgatatggaaggaactagctctgctatcttcttcggtctgtctggtacaggtaagactactttgtctactgacccgaaacgtaaattgatcggtgacgacgaacacggatgggataacgaaggtgtattcaactacgaaggtggttgctacgctaaggttatcaacctggataaagaaagtgaaccggatatctacaatgctatcaaacgtgacgctttgcttgaaaacgtaactgttgatgctaacggtaagattgatttcacagataagagcgtgactgaaaacactcgtgtttcttatcctatctatcacatcgaaaacatcgttaaaccggtgtctaaaggtcctcacgcaaaacaagttatcttcttgtctgctgatgcattcggtgtattgcctccagtatctatcttgaacccggcacaggctcaatactacttcttgtctggatttacagctaaattggctggtacggaacgtggtatcactgaaccgactccgacattctcggcttgtttcggtgctgctttcttgtcattgcacccaactaaatatgcagaagaactggttaagaagatggagatgactggtgctaaagcatacttggttaacactggatggaatggttctggtaaacgtatctctatcaaagatactcgtggtattatcgacgctatccttgacggttctatcgacaaagctcctactaaggttattcctttcttcgactttgttgttcctacagaacttccgggtgttgatccgaagatccttgacccacgcgacacttacgaatgtgcttgccaatgggaagaaaaagctaaagatttggctggacgtttcatcaagaacttcgctaaatttactggtaacgaagctggtaaggctttggttgctgctggtccgaaactctaattggagaatcagatataatatggaaggcggttcgatttcgaaccgccttttttattgctatactgtgtctttctatgaaaaggaatactgtctgtttagttttttttcctatatttgtcaaaacgagactatttacttttaaagacagctatgacgtatctggatacagacaaacagacctatgcggatttaagcataacggagactgcaaacaatgagcagtttcttttctctttgttttctaaaacagagacgaaagaaggaaaatcattgatgatgaactgggttatgtatccgctaagtgatttggatatgatccgcaaaaggcaggaggctgttgcgtgggatgctttacctgaacttcttttgaatgaagaagaactggattttattgaatattatctggcttatcgcgaccagatcagggaagcacacgtcttactgtcatgtgctactgtcatagatcgcctgttgagatatgattcaacccgttatgttatttgtcggggagtgaaattggtaatacatttgctgcattgtttggagaggtgggcgaaagaattggatgaggatgccccacaattgatgaaggagtcagcccgtatggtgaatgatattttgtccggaagtgaattaggtgaagtcttggaacagacttctggcgaagaaaggcggctatctaattatacgatagataaatacgattatctatttcgatgtacccgtttgttgtctttgaaagaattattatcagttttgtatttattggatgtctgtcggacagctcaccgggtagcgagagagaaaaatttctgttgtacaccgaaagtggtggaaacaatggatttttcggttgagggtgtagttcatccttttgtgaaaaatgtacgggagaatagctgggtgatgtcccggggaaatatcagtatttttacgggttctaacatggcgggaaagtcaaccactttaaaagcactgactttggctgtctggctggcgcattgtggactgcctgtcccggtgaagtcaatggtttgtcctctttacgaaggtatttatacttctattaatttgccggactctttgcgtgacgggcgaagccatttcatggcagaggttcttcgtataaaagaagtgatgcaaaaagcgcttacaggaaaacgttgtttggtcgttttggatgaaatgtttcgcggaactaacgctaaggatgcttttgaggcttctcttgcagtcaatgaattattgaaaagattctcttgttgccatttccttatatcaactcatattctggagtatgcgaaagcatttgaaaaagatcctgcctgttgtttttattatatggaagcggaaattattgacgatgcatttgtttgtcatcatcggctattgcaggggatttcggaggctagggtaggatattgggtcgtgaaaaaactactggccggtttgatatagtttcaccttattattgtgtccattaagacagtattttatttttattaaaggcatattttgattacttttgtacaaaccatatacgagagaataatcttgaataataatgcgacaaccatgaagaaactctatttctttcttatctgctctttgtttcttgtctccggactttacgcgggtgaaactgattataccaaaggactttccatctggtttgatactcccaatactttgcaggggtatgccgtgtggtatgggggaagaccggatctgtggaaaggtggtgataaaccggaaacagcaggaaatgcaggtcataatccggatcccgcttgggaatcgcaatcattaccgatagggaatggtagtttaggtgcgaatatcatggggtcggtggaagctgaacgtattacctttaacgaaaaaacgctttggcgtggcggcccgaatacggcgaaaggagcggactattattggaatgtcaataaacagtcggctcatcttttggatgaaatacgtaaggcatttacggaaggaaatcaggaaaaggctgaaatgctgacacgtcaaaacttcaacagtgaggtgtcttatgatgctgacggagaaacacctttccgtttcggcagttttactaccatgggagagttttatgtagaaacgggattgaatattataggaatgagtgactataaacgtatcctttctttggactctgcaatggcagttgttcagtttaaaaaggatcatgtggcttatcagcgcaattatttcatttcttatcctgccaatgtgatggtgatgcgtttcagtgcggatcaaccgggtaaacaaaacttggttttcagttatgcgcctaatccggtgtctaccgggaatatggcttctgacagtaataaaggactgatgtattccgcatctctggacaataacggaatgaaatatgtcgttcgtattcaggcggagacaaaaggcggaaccttgtctaatgcagatggaaaactgatggtgaaaggtgcggatgaagttgtgttttatattacggctgatactgattataaacctgactttgatccggattttaaagatccgaagacgtatgtgggtgtcaatccggaagaaacaaccaaggaatggatgaataacgcagtgtcacaggggtatactgctttgtttagtcagcattacaatgattatgctactctgttcgaccgggttaaattgaatctgaatctggcaatcaagggaaagaatatgccgactccccaacgcttgaagaactaccgggcaggacaaccggattatgatctggaagaattatattttcaattcggccgctatctgttgatttcaagttcccgtccgggcaatatgccggcgaatttgcagggtatctggcataataatgtcgatggaccgtggcgtgtggactatcataataatatcaatattcagatgaattattggccggcttgctccaccaacctgaatgaatgtatgcttccattggtcgatttcattcgtacgctggtaaaaccgggcgaaaagaccgcgaaatcttattttggtgccagaggatggacggcatccatttccggaaatatattcggatttaccactccgttggaaagtcaggatatgtcgtggaacttcaatcctatggcaggtccctggttggctactcatatctgggagtattatgattatacaagagatcttacattcctgaaagaaacgggttatgagttgataaaaagtagtgcggactttgctgtcgattatttgtggcataaaccggatggaacatatacggctgctccatctacttcgccggagcatgggcctatcgatcagggtgctacctttgtgcatgccgttgtacgtgagattttgctggatgcaatcgaggcgagtaaagtgttgggcgtagataagaaagaacgtaagcagtgggagcatgtgcttgccaatctcgttccttataaaatagggcggtatggtcagttgatggaatggtcggtagatattgatgatccgaaagacgagcatcgccatgtgaatcatttgttcggactgcatccggggcatacggtttctccggtcaccactcccgaactggcgaaagccgctaaagtagtactggtgcatcgtggtgatggggctaccggttggagcatgggatggaagttgaatcaatgggcgcgtttgcatgatggtaatcatgcttataccttgtttggtaatttgttgaagaacggcacgctggataatttgtgggatacacattcgcctttccagattgacggaaactttggcggaacagccggtattaccgagatgttgcttcaaagtcatataggctttattcagttgctgcctgctttgccggatgcatggaaggaaggctctgttagtggtatctgtgcaaaggggaattttgaagtggatatggtttgggagaataatcagctgaaagaagctgtggttcattctaatgcgggaggaaactgtgtgataaagtatgctgataagactctttcttttaaaacagtgaaggggcgtagctatcgggttgaatatgatgtgactaaaggacttattagaaagtaaatagaaaatatcggaaaattagaaagtaggaatggtattagagtatttgaaattgttcgtgacgtttgcgaagattggaatgtttactattggtggcggttatgccatgattccgttgattgaacgggagatcgttgccaaacagtggatgagtaaggaagaattcatggagatgtttgccttgacgcagtcactaccgggtgtgtttgctgtgaatatttctatttttgtaggatataagttgtataaagtgggcgggagcctggtatgtgctttggctacgattcttccctcttttgttattatgatgttgatagccatgttttttgcacggtttcaagataatgaagtgatgattcgcatctttaatggaatacgtcctgccgtggtagcgttgattttgtttccttgtatttctgctgtaagagctctgaaactgaaataccttcagttggttgctcctgccatagctactcttttgatttggcagtttggactgtctcctatttatattgtattggcaggaattctgggaggattggtatatacattgtggttgaaagaaaaaataatgaataaagaggtatgatatatttgcaattactttgggtgtatcttaaaataggtatgttcggttttggaggtggatatgcgatgctttcccttattcaacatgagatagtggatattcatcattggctgactccccaacagtttacggatgtggtggcgatttcgcaaatgactccggggccgattggtatcaatagtgctacttatgtagggtatgcggtaacgcaaagcgtgtggggagcggtgctagctacggtagcggtttgtttaccttcttttattctggtgttgctcatttcttatttctttgcgaagtgcaaggataacaagtatattaaggcggctatgtccggactgctacctatgtcggttgctttgattgcttcggctgcattgcttatgatgaatagagaaaattttatggactataaaagtatcggtatttttgcggcagcctttttggttacatggaaatggaatcttcaccctatcctgttgatttgtctggcgggtgtggtaggattgttgttgtattagtaatacgtgccatactgcagaaaaaaataaaatcccggtaaaacactgcgtttcaccgggatttctattataatataatgaaagaatggttagttcttgttggcacgtttacgttcgatttcgtccaaaatcactttacgcatacgcattgcctttggagtaacttctacatattcgtcttccttaatatattccagtgcctcttcaagtgagaactggataggcggaatcagacgtactttgtcatccgaaccggaagcacgcatattcgtcagcttcttcgatttggttacgttgataaccaagtcgttgtcgtgagagtgctcgcctactacttgtcctgcatagacttcgtcctgcgggaaaataaagaacttaccgcgatcctgtaatttgtcgatggcgtaagcaaaagctgttccgctttccatagcaatcatagaaccattggtacgacgttcaatttctcctttgtgcggctgatattctttgaaacggtgtgccataatggcttcaccggcagaagccgtcagtacattggtacgcaaaccgatgataccgcgtgaaggcatattgaattcaagattgatgcgttcgcctgtattttccatctttaccatttcacctttacggcgggtaaccatatcaataatcttgctggaatattcttccggtacgttgatggtcaactcttcaatcggttcgcatttcacaccgtcgatttctctgaagataacctgtggctgacctacctgcaattcatatccctcgcggcgcattgtttcaatcaatacagaaaggtggagtacaccacggccggaaacaatccatttaccgtcttcttcactctttcttacgcggagggccaggttcttgtcgagttccttcatcagacggtcgtggatgtggcgtgaagtcacaaacttaccatccttaccgaagaaaggagaatcgttgatagcaaacaacatactcatggtcggttcgtcaattgcgatgggtggcagtgcttccggactttcgaaatcacaaactgtatctccaatctcgaatccgtcgatacctaccagcgcgcagatgtcaccggaagaaacctcatttgttttcacacggcctaaaccttcgaaaacatggagctctttaattttgctcttgaacatatcgccgttacgtttcacaagcgttatattcataccttcttttaatgtaccacgatgtacgcgacctacggcaatacgaccggtataagaagaataatccagagaagtaatcaacatctggggagtaccttccaattgttgcggtgccggaatgttttcgacgatacaatccagtagcggagtgatgctgtcagtttgttgctgccagtcggtgctcatccagttgtttttggcggagccgtaaatcacggggaagtctaactgatcttccgttgcgttcaagctgaacatcaagtcgaaaaccatctcgtaaacttcttccgggcggcagttaggtttatctaccttattaactaccacaatgggtttcaaaccgatttcgagcgctttttgcagtacgaaacgagtctgtggcatcggaccttcgaaggcatctaccaacagaatacagccatcggccatattcaatacacgttctacctcaccaccgaagtcgctgtgtcccggagtatcaataatattaatttttgtaccgttgtaattgatggatacgtttttggagagaatcgttataccacgttcacgttccaaatcgttgttatccaggataagttcaccactattttggttgctgcggaataaatttccggccaatagcatcttgtcaaccagcgttgttttcccatggtcaacatgggcaatgattgcaatgtttcgaatattttgcatataatacctattatttggctgcaaaggtacgaaaataggattagaaatatgcgcaatgatagcaattttttcttgtaaatcgttgtgtgatataaagataatgcctatctttgcacgctcaaaagaataatttatcaattaaaattctaagaattatgtatttagacgctgctaaaaagcaagaaatcttcggaaagtacggaaagtctaacactgacaccggctcagctgaggcccaagtggcattgttttcctaccgtatttctcacctgactgagcacatgaagctcaacagaaaagattatagtactgaaagagcgttaacaatgttggtaggtaagcgtcgtcgctt

SEQ ID NO: 8166 - DNA, 12951 bp, Unknown
  gut microbiota DNA sequence
atattgacggatattatatgaataatattcctctcaccaaaggtggaaatctggtcataaatgccaacaacggtacaggtgactggaacgatgctgctaaggataaatataaaatagatggtgatatggaaaaaatgttcgataccactgtagaagcagacaaagttatcgcatacaatttattccctcaaacagcaacaaacggcacaggcgccagcactaccgatgtaaaaacaagtatgccgcacttcgtcctgaaacttgccactagcggtacagcctccacccgatggctgacaatccgtgcattgaaagctgcggatgcattggttacctctttcgacgccggcaaagtatatgtactgaatgccgccgatattaatatcaatcaatattccgccaagctgaaagttaccgctaacgatacagctggtcctgaaataccggaacccatagacccgacagacccgaatccggaaccggtaggcaaagacctcgacgttcttgtcaagatcaccgagtggaccattgtcaacgtgaaacccgagtggtaattacgaccattaccggacgttaaacgacgcataaaaaaggggggacgtggctgattaccacttcccttcacgaagccgtctcccttcccccggaaagaatgacggcaacgggtgataaccgcaccctgtaacggttagtatgagattcattttttgatgcagaattatgagaaaagtctttttcgtagggttgattgccatgctgacaggttgtagccaggagagccgcgttgcttcaccggaagcctccggcatcgagctacaaattaatttatcgttaggcagcgtctccaccagagccgtagacgaccccatcaccggcaacgacggcaaaggatatgtattgcctttcacagaggtaaaaacgctgaaagtcgatttataccaatctcttgaagccgctcctatattcacctatacagccaccgatgcagagattgcaggcatcaggaataccgccatcggagaattggcaagactctccatacccaagattccggtaacaacccaatacgtgaaagtgacgataaaccggtttaaagaggagaatccgcttatcaaccagttacaggtgagcagtcaggacgacccgcccgcccctaccatgaaccggacagagattccttacgaaggagttaccaaagaaattatcgtcatccccgaggaatcggaccctttctccgtcaaggtgaaagccatcgtggaagtggctcccgtattgagccggtttgaaatcataccgggggaaatcgtggtcaccaaccccgcaaccacaggcgcttcattcgactggacggacggacccataggcagagacaaaatcaagaacttcaccgaagccgatatcgctgctgccgaagcaggcgctcgggagaatttcaggaagaaatacggaacggacgctaccgctgccgctatctattcctatcgtgtccggctcatccggtcgcccttccccgacggcttcgatatcaacagcacgccaaccggattctatttttatatgaattatttcaagccgagcctcaacgccgccactatcataaagaatacaaacgatggtatctccgactggaacatgaccacaggttttgctgaatacaagaaaggaggacagcagtccaatatgtatgacgcaagaacatcagagactacaaaggtgaacgcttttcatctttttccccaatcggtggcggcagacgctactttgcaacaaatcaaagacggaatgcctcatctgattatgggctttagtaccgataagataaaacgctggctgacggtcagggcattcagcgacaaaagtaataatgaaattatcaacgcatttaagccggggtattgctattccctcgaccttgatgatgtcgttatcaccccatggtcattgggtttggacgttcgcattaccgatggcgataaagtgacggagtcagatcccatcatcaaagatttcgatcagacgtctcacgtgcccgaacctgaaggcgcagatctagcactcgggcttcgtgtctccaagtggagagacaaagacttggaagtagaactttaaccggagaaaataaaagaaagaatgaataaaacatatttcataggaatactcctgattactgcatctcttttcgcaggatgcaccaaagagaacacggaagattgcttttcgggactcagactcgatttctacttcacccatcataccggcaacggcaatctcttcggcgaaaaggtgcggcggattcacgtgtacctgtttgacacggagggcatacttcaactccacgcgacagacaacggagacaaactggaatatagttacctgcaaaacggacaggtacagacggtgtcaaaaccgaacccgtggggaaagctctctgacgagtatgtgatgaatctggataaagtgccgccgggaaaatacagaattatatcatgggcggataacgggcagaaagacaacactacttattttcatggagaaatgaaaaatccggcaagccataatttaaggaaagacgtcacgctgggagcgacaatggcggacgacctctatatgttcttaaaatgccggacggcatccggactgcccgaagaacttgttccggaagcagaggagataaacgacctgtggtatggcgcggcaggctcccgccatacccaaagcgatatgtatacctatgaaaccgtggaagttaaaaacagcgtggtcaccgcacgccgcatcgaactgatccgcaacaccaacctactgaaagtcactttaagcggactggaacatctcacgccggaagtccgggacacgcccgccgcgaaccgggatacggacttcaaactgtgggcggttgctaccgacgagaggtataagtccgacaacacatttgacgggtacacccgctccgtccgctactctccattcaagacatcgatggacgcgaacacgctctctgccgacatcaaggtattgcggctgacaatggaccgcccggtgcttttatatatcgaaacacccggcggacgcaggattccggaacagccgattgacatcgtcagtatgctgttcaaggcacgcaaccccgacacgggagcgtatatctaccaatcgcagagtgatttcgaccggatatacgaacatccggtggaagtacgcatcggccccaatctggacatcagaatctttatcggagaatgggaaattgtgaacgtgaaacctgctgaataggatatgaaaatgagaataagatatagaatactggcattggccgcggccgcgctcctgtcgggctgcgccaaagaatccactgtgatgaacctgcctgaagcggagaaagtgaccgtacagataaagaccaaagcccttaccggcagcgtggtggagggagtgaccatagagaaagtgcgtttcatgctctttcagaatgagacattattaaataattataccacttccaacgggacgctgaacgttgacgacagcgggttgttcaatcttgctgtcagcccgggagtatattctttcgccgccatcatcaacgagacgcccgaactgacggagaaactgaatgccgtgacgaagcgtacggatatcgacggcgccggattcgactggcaaagcagcgcgctgacctccggcaatatgccgttggccaatctgggagagataaagattcaaccgggaacgacgtccggacaaggagtggcgcaactgcgccccgtatacaattcggaaggcggcagatacaaaggtgatttcacgacagcatccacaaccgcaagcatcgatatgccccgcgtgatgtcgcaagtatccgtgtttttgcgacaggacgatgcggtgacggaagaaataaaaatcagcaacgtgcaggttagcaatataccgcgttacagttatctgatagaccaacaggataccgacaataccaatctgaatcttttcaacggtcccgaatttacaatttccgcatccgggggaggcaaagagtacaacggcaaacagtaccacccctttcctaccgccattattgcggaaaaatcgttctataaggatggagcagacgacgagacaaaagccgccgacccagattatgccgcttatatatttatcaacgcaacctacgggggcatacccactacgtacaagatactgcttcgtgaaggagatgctaatttcaggctccttcgtaataccaattacaatgtgtatgctacaattaagcaaataggcagcaaaggcatctatgtggtgattgaacctgtcaaactgtacaatatcgcggttaattgggctccggtagaaggactggtcatcgtgagtgaccgggaggcggacttcaacaagaatgtcaatgtgtggagtgactacacggcttattccggcatacttaaagtatataaaggcgacgcctaccacgatgccctgttcaaatacggcagcctgatagctaccggtaatgatgctacggctactacagagcaggagttcactgccccgacggctgttgaaacgaccaacgatgtaatctggtatcccggagatttcaatgtgacgggtatcggtaactgggatgatgtcccttatatcacggatgcgagcaatatcccgtcagggaatacgcccgaactggtagcacagggtaagggagatccctgccgtctggcagcattatcccctcatcagataggcgtggaagggaaggtagacaaccaacagtggcacatggccaatcctaccgaatataccatattgatgaaggcagcaaacgggacaggaagtgaaaatgataatggatactgttcttttcatgaactgctgatacccaacgtcaagtaccgcaatgaaagcggagtgctggtttcctcccataattacaagggaaactattggagtacggaaagcaacaagacattctccttcgacagccagaatccgacagcagcagcactcgacgcagccgctcccggacaaggatataccgttcgttgcgtaagaaacagcattcctgaagctcgtataacaatcaatcctcctacttccgtagactataagggggcagccgtcaacggacttcctttctatatagacagcaacgtgccatactggaaaatggaacttatcaagaacggagaacacgcaggtacctccaccgatttcgaggacttctcattcaagcctttagccataggagtgacgcacgaaatcgaaggttcttatacccagactcccaaagcatacatcgcacgcagagaatcaagaaacgaagaccgtacttttggagtaaaattcacttccatgcacttcactggtgaagagaatacttattatttcactataaaacagaatggatatagcatcagcggaaaactaagtatcaataatctggaagataataatagaattaaaaaagagggaggcaagtataccatacatattgaactcactcctgatgacgtacctatgcctgtaggggctgaacttaaagttcgatatacctatcttggtgcttcccgtggtgaagaaagcacaatcgccaccactatagatgaaagacaacgtgaatatgacgtggaactgaacatcctccctaatgatacgccggatgttatcggactggtatttcatgtatacatgaacgaaaaaggcagtttgggatatcgcgagataacatcagattcttattaccaaaataattagtgacaatgagaaatagaataacaagcataatcatagtaatggcaataatgactctgacctcatgtgtcagagaagaacttttgtcatcctcccgcaatggagaagaaggcgaaagcgtaaaagtagaacttagctttaagatacctccggcttcgagtccgcaggaactacaatcgagaagtatgtccactgataatgctttctctgtagaattcttcaaagaggcgtctctgacaaaaacgcggtcgggtgaggtggcagagctatataatctgtggttatttcagtttcatagtgacggctccatacatggttcgccccagcaagtatccgaccaggtgacgatggtaaacgaaatggctctattaaacgtcacgctacgtgtgggtactgaccagacactctacattgtagcacttggcaaaaaagtaaccgtagtgagtaacctgatggaagtccggactatcaaggaacttgaaaacctgcaactggactatgtcgacaacagaaacggactctattattcgcggataaccaatgagagcgaaatcccatacgccggagccgcgaaaggtatcagcgtaaataaaacaggaaatagcgacaacggtgagattgtttacggcacacctgatggtttctccggtggcatagaagtcaaacgtctggtatcacgcatcacactgaagcacaaattcgatgtcacggaaaacacgcttgaaggcatgagactgctcaaagtaccaaccaaactgtgtatcaatcccgcatcagcagataaagacgtaatagacaatatcccgatggcagacctggaaagcgacaatgctttcggggatgcggacaaggacacggatggtttcttcacatcgcaatggtatgttgcgcaaaataaacaaggaaccatatcagatatagtatcagaaagagacagatatcggaaagtgactgacggatcgggaaaagcacccgaagccggcacaaatatcgaagcgtggtcatattctaaaagtgaccgaaagctctatacagttcaccagatatacgttggaaataacaacacaaacaatttcgatgtggaaataaacagctactatgatcttcgaacaatcatcaattctgtagatcttaatgacggacgtatccgctcctacacagccgtccagaaagtttatctttcatcctcttcctatcccacaagcagcggaagcggaactggaacaataaccggaaaaaccaatgtatattttgacgctcactacggatggcggcctgttatcatctatgcacaagggcgtaaggtgactgtcggcatttataaggatgcacaatgtacgcaattagccaacatgaactctgcaacggaaaactggcttcaactgtcagcataccccaattatacggaggtggtacgtaatggtggcgcaaatgtgctcacaaaccagatagaaactaatattttcgtaccgacacggttcaaactatacctatatgcagacgagtatatcactgacgagaatggagtgattacagaccccgaattcgatagaaacaaggtttataatgctgctacaaactacctgccgaccaatttcgtatctgaacgaactctctatgtaaaagtaacgaccgaagatattaccgctgaaggaacctcccaaaaacgagaagggaagtataccattaagcaaaaacaaggacattatgtcggtctatttggcggtgaaatagagaatggacaatacacagagggactcatcattgatgcatttaatgagaataatttccaaattgacgatgaaatagcaacagcattctacatgtactccggatattataatgtcatgaccaattatgtatggaaggaaggagaagatcccgagacaaactaccgcagttttatgaacggcaagcaagcaacattcaatttagcaacaaaccctaagaactatgttgttaataatgggcaagaaagcatcattccacctatgcggaaaatcaatggtaatatagatttatatcaatataattactataatagtttccaggcaagattctgtcatgatttaaacagagataaaaacggaaacggtgtgatagattatctaccggatgatcctgaaaagaatgaatttgaatggtatttgccatccacatatcaggcattcgggatactgacctccgcaggaactattatttatgatgccccgaacgcattagcattggaacgtaatgcaaccctagctaccggttggatgatggaggggggaggctggtattccagcaacacaggtaaaaacagttggaaatgggttcgttgtgtcagagacatacctgttcctccagaaagaaaaacaggaaccaaagtaaccacatatatagacaatggagacacctatgccctgatagatttatcaactctgccttacggaatcacagatagaaccactgcagaagggaaaaccgagctatatgaggaattggacctatacagttattctacaaaaggtacggaatatgacccggagaaccctcaaaaagatgcttcccaaccattaggtaaaaaagttttccgcggaagaaaaaattatccgccgagtaagactactactaccgtcacactccaaactttagtgtcctctttttcttcaccaagatttatcgtatcacctacagacgtatataatgatggcgacacgaaaagtaactctgcaagcagtatacttcaagacactgaaggtactccacaatccaatagtatcacaatgacttgggctgaagcgaacggaagactcaatactgccaatagtcaaggctggaatatcccatcaaaagcaatgaataccggatgttatgcctataaaggtaagagcgggaaagacgagcccggaagttggcgcgtgccaaatagtcgagaattatccatgattttagtattcgctcacgaattagaacggttttcttcagaaacaggttttcagaagttatacgaggcaaaagcggcgaattatctcagtaatggatattggagttccacagaacaaagttctactttatactctctagacaaagccacgagtggtcttattgatgtaaattatggtcttactatatacgaaggtgctaataaaacctctacagataaaaatcggctacgttgcatcaaagacattccgttgaattagcaacagcaaagccaatcgatattctataatttctctaataagtctacctttgccatacaacagtgcaggggtagatttattagagaaacttattggaaacttcatttccgcattttaaccaacaatttgttcctcaccgagaaactgtagtttcctcggtgtggaaacacttgtttctcggtgagaaacggattcttggttttaaaccaatgtacaaaagtaaattcaactaattagaattggaaatatatgaacggctgaatctccgaactcttcatctgaataaccagataaatcaaagctaccatcaaaacagcttttcctacgaaaggcaaacggatcactcctcgacaaactgcattttcccaactatcgggagcaaaatgaagcaggaagccaagcaacatcaacgcaaacactttccaatatccttctagtaattgcgggaacagttgcggacggaaagtggtgaatatctgtcccagcatatccattgaattctggaaatcggcattgcggaagaatatccagcagaagcagacaaaatggaaagtgataattactccaaacacacggcgccaaccgtgactctcctctcctttcttacgtccggtgattgtcatccacattttatgcaatgctaaagcaacaccgtggaaggttccccacagtacgaaattccaagatgcaccatgccacagaccgcccaagaacatggtaattatcaagttgagatattgccggaatttaccttttcggtttcctcccagagaaatgtataaataatcttttagccaactggataaagagatgtgccaacgacgccaaaattccgtaatagaggcagacttataaggtgaattaaagttgagattgaaatggaagcctaataataaggcgataccgatagccatgtcgctatatccggaaaagtcacagtaaatttgcaaagcataaccatagactcccatcagattctcaacaccggaatagagagtaggattgtcaaaaatacgttctacaaagttgatactgatataatcggatatgatggctttcttgaaaagaccggaaacgatcagaaagattccgcgtccgaacatctcctgcgaaacgaataagggtttccggatttgcgggataaagtcgcgggcacgcacaatagggcctgccaccaattgggggaagaaagatacgtaaaaggcatagtccaaaagattggttaatggttttatatctcttcggtaaacatcaatggtgtagcttaacgactggaaagtgaaaaaggagatgccgaccggcaggaatatatcgagagcggtaaattctcctcccatcaatgacgcaatcactccacccagaaaattggtatatttgaaatagacaagaagtcctaaattaactcccaaactcaaagcaaccaatcctttacgtttccaataaccctctgcacgatccataagctgcgcaaggaagaagtcggcaacggtgactatggcaagcaggaaaaaataggtgccgctactcttatagtaaaaataataggagaagagagtaacaaacatgatacgggcggtgtatttgcgttgtaacaacacatacaccaccatgaaagcagcgaacaaccaaaggaagataccgctgctgaatatcattggcgcttgcggatcgtaggtaagtacctctttcagtctactgaaatctatatcaatgggaaacatagtcattatatgctttgataagtgcttggtataataaatttccttgcaggatgtatccttcgggtaaataatgtacatgatcggggcgcatcagttttgcgtctgtccagttcgtgcaggcacggcgcttccctccgactacatcgtacatatcccacacgagcagacgatggtcttttgcataacgacgaatggtttccgctgctgtcgctgtacgtggattgatggcatacgtgcgtctacgccttcgctgccggaaactttcataagaaccgggaggggtagtcagaagaatgggtacgttaggaagactgtcgcgcaacagtttcaccagttcatccatctgattgtagtgcacatttatattataacgccggttatggctttcattggttccgaaagagagaatcagcaattcgggcttcagggcggcgatttcggcaatacgatccggatgggtaaaggtaaggcaagtagctccgttgacgcctttatctatataagaaacagcaccgaaagtttctgtcaaacgggcaccggtggtttgagggtagatatgcccacgtacatggctgtcgccaatatgaacgatgcggactgtatcttcggagagtccggcacgcacctgacggagatgttcgaagacgggagctagcagagcgatactgtcaataatctcattccgaccggtttcgcggaaagctgaagggaaggatatttgtacagtgatcgtatcattcgcccagttcatttcccgtaagggctttataagttttgcgacctttcccggcggaggacatacaggtatacgatcttgtgcgattgcttccgcaaggaaacaaggaacactcaacataccggcgagaataagaataaagacagacgacagattattcttgctcataagcacgcctcctgtcgtattgttccttaccataaatcatcgtttcataaagtagtcccgccaaatgcttgccgccacggaagtttatatgtgtataatcgtagtttgccatagaaggtttggcatgcaccagttttgccatgctgccttctccacccatggcttcaaacatattccaaaaggcgatgccgctttcggcggcaatgttctgctgataacgaatcagattcttcacaccgggcatggtacgaagttcaccgttctcgtttttagaatcacggtcgccgacgctcaacaacaggattcctgcttgtgggaaacattctttcaaatgctcgatagctgtgagcagtcctttttgatagttatcataattacgtccccgttcggtagctacattcaaaccatattcgaggataataaggtcgtaaggacgttgacggttaaactgtttcaacatttgtggaggaatgccccgcaaagaaagaccggaactgccacgcaacgagaagttgtcgagaatgattcctttctttccatccattgccaaaccatagaacaatgtagagtctgcacggtctactgtccaacggatagagccgatgcgtccgtccacctggatttgctgcaatccgtcggaagggcctaatgaataattcttgttttctcctttgttcacacggacagaaaggaggacggagtctctgctatggaagaagatggaggcacgctggcaagtatcgagcagggaggcatatttattttgcccgcgcagttctacataagctccgttgcggggaacgaaataatgaccggatatgccttgtttcttcttatcgaaatagacactgtctgttaccgcatgactggaccatccgccaaacgtatgtcgcaccgtaggacggtaaccgcttgtcatggaagtgatggtaacaaaacctacaccacaaccgccgaattgtttctgaagcatttcgcgtaagtcagcggtaaagatatccgcttcgataaaggaatctccgaatacggcaatacgtacctgtttgtcatcggagtcatcggaagagacacggtcgagtgctttataaaaaggagtcatcccccggagagtggaatcactgtaatcttcaatgcaagtcatacctgtacgacaggtatctacaaaggcaggttttacaacaggaggcaaagggatgctgtccgaatcagctgcggcagtctctgattccggataacgaaggtcgctcaaaaggtctacacgcctcatcgtgtgcccgtcaatagtcagcgccggaagccaatgaagcccgagtaagactgcaaacacaatcagtacgaaccacaacgaatatttcaaataattctttattatctccatctttacaagtagatatag

SEQ ID NO: 8167 - DNA, 18933 bp, Unknown
  gut microbiota DNA sequence
atggaactttgtttcgaatatacacgacgcttcgatctgatccgctggggagactattacaaactgatgcaggaacaagtaagtaaagctcaaactgatgaatcctggaagttcggaatcaatgtatatacttacttcaatattccgaagtcttacaactatttcccgattcctgcgaatgaaataggatcaaacggtgctatcaaaacgaataatccgggttggtaaatcgcttattaactttaaaaagaaaaggatatgaaaacaatatataaaagtttgatgactatcgcttttgccggactgtgtctcgcttcatgcgacaaggaattaaaagaagaaacagcaatggaagtgggtgtggtgacagacaacaatgtcagctttaacggtaacactgtaactgtcaaaaaaggcagtccggtaacgttcagctttaatggagaccctgactttatcactttcttcagtggagaaataggtcatgaatacaaacatcggaaccgtacagaaatgaaagtagaggatattgaaaagtgtgaacttagtttccgcatttggtatagatatggaaacgcaagcacaattaaaggctctactcatgtactcgtttccgaccaatttaatggcataaacggcagtaatgtagatcaagataaacaaactgtagaaaactgtgaatggacagaggtatttgcacaggaagaacttccaaccaaaccgaacagcactagcgagacagcagaatccagcaaaacttttacattcgaattatcttcttatcttgctaaagaaataacaatagcggttcactataaccccattgataactcaaatacaatgccacagctcaacatcatggatatgaatattgacttgatgttcacaaacggcaaagggaatacggttaatgcaaaagatttcggtttctcaccgctaaatctcgtatatgatttaacgaagctaaatgacagtcacaaaaaagttcttaagaaggcattgggaaatgagaaaatgccggatgaggacctaaacagtgaagagaacataaaaaaatatccatatttgcttgttgacggacaaatccctgacttctggagtaccaccacacctaccagaatacaaatcgcaggaggaagtaaaggaacaacaaaagcagacacttggcttatctcggctcccgtcttgctgggtacttgctatccggatgcaggacaaagcatcaagaatatctcgcaaacattagagatatactcacatacctacgaagaagccgggacatacaccgctaccttcgtagccaacaatgcaaactacgtccatcaaggtggtcaagtagtacgtgaactgactataaacgttgtagaataatagtatatcccccaatttttctaaccttcaatcatagaaaacgtttataaaaatcagactttaatcaatttaacattaaaaagagagggtccgcgaggttcctctcttttacttttaccatatcttttcaccttcttccctttcttctcctccgaagaaaatatttttctttactcaactagcgtataaatcaacatttatatataagtttgcacaaaaataaaaacaatgcaaaagactcttcctattcattttgccccattacaaggttacaccgacgtgatttaccgtaatgctcatgcggcctgctttggaggtatagacgcttattacactccatttgtacgacttgagaaaggcaccttccgccatagagacgtccgaggaatcgaacccgggaataatcaggttccgcatctgattccccaattgatagcccctactgctgaaaaggcagaaaagattttatccctattcattgaaaagggatataaggaagccgatattaatatgggatgtccttttcccatattagccaaacgccacaatggctccggtattcttccctatcccgaagaagtgcaagcgttacttagcctgattacgaaatatccgcaaataagcttctccatcaagatgagacttggttgggaagatccggaagaatgtctcaaactggctccgattatcaacgagttacctttacgacaagtcgttatgcatccacgcctaggaaaacaacaatataaaggagaagttgatcttaaagcattcgaggcttttcagcatgtatgtaaacacccactcatttataatggggacattaaccatatagaagatattcaccgtattcaggaacaatttcccggattagccggaatgatgataggacgaggattgctcgctaacccggcactagcatgggagtatcagcaaaaccgcacacttgaattcgatgaaatgaaggaaaaaatacaatctatgcacacatacgtatacgaggaatatatagaacagctaaaaggaggagacttgcagattttgaacaagatgaaagctttttgggaatacctactaccaaatgcagacaggaaattattgaaagctattcataaaagcaccaacctccacaaatatactcaagcagttcatgccttttttaaccaacgatagattaattgccagtaattttgtgtaattttgcgcccgtttataaacaagcacattatgaaaaaatacattttattatttctttgtctgatacagttatcaggcagtttcgcacaaatgcaggatttcaagttcaaattctacggacagattcgtactgatttctattataatagtcgtgccaatgaagaaaccgtagacggattgttctatatgtatccgaaagataaggtacgtgatccggacgggaatgatttgaactcaacgcccaacagcaatttctataccttgtattcacgtctcggagtagatgttgcgggtcccaaactgggaacagccaagacatctgccaaagtagaggtcgacttccgtggtacaggtacttcttattcggtcattagactccgccatgcttatttgaatttggattggggaaaatcggctgtattgctcggacagacttggcatccgttatttggagatgtatcgccgcagattcttaatctttccgtaggagcaccgttccagccatttagtcgtgcacctcaaattcgttatcgctatacaaacaaaaatttccaacttaccggagcagcagtatggcaatcacaatacacttcacaaggtatcaatcctgacaaaccgaaagaaagtaaaaaaagtcatgaatacttaaagaatggctgcatcccggagatatatgtaggagctgactacaagaaagacggcttactggcaggcgtcggcattgaattgttatcattaaagccacgcacaagtgccttgggagcgaacggagataaatataaaatagacgaacgcataactaccctgtcttacgaggcccatgcgaaatatacccataaagcctggttcattgccgcaaagagtgtattgggctccaatcttacacaagcttccggattaggcggattcggcattaagtcagtcaacgaacacaccggagaacaaaaatatactcccatacgtttctccagctcttggttgaatgttgtttacggacagaaatggaaacctggaatctttgtaggttatgctaagaatttgggaacaagcgatgcactatatgctcctgatggaactgacgctcaagtgtatggaacgggaaccaacctcgaccagttagtaacagcaggcgcagaactgacctacaatgttccccactggaaattcggattggaatataccttaagctctgcatggtatggttcactcaatgcctccaacggaaaaatcagagatactcatgccgtatgcaacaaccgcattgttgctgttgccatgttcatgttctaatctctctctacacaattattttgattatatatctgtcacctgtcaccgattactgcctaatgatttgattataaacgattagcattgtgacagcaatcggtgacagcattgtgatgacaatattgctgtcaccgaaaacagcaaactacatttcattaatcggagacattcattacgggagccccaacagtcatatttacttcatttatatacaacctttgtttcattacgggaaacgattagtttcacaccgagaaaccaatcgtttcgctatttgaaacttttggtttccttacttgaaactagagtttcatacgcttgaaaccaaagtttccctttgtagaaactaaagtttctgcggctagaaacaacagtttcaaagctttggaaaccacgcttatacaaagggaaacaaaacatctcctgactacctgacttcttatctctttagttccacttcaaaactagcgccatctttacaactgaatcgtaagattgtttgcttttcattggaggagactaccgtacaatagggagtttcttccacattccatcggccttttatggtcacagtcaccggtatttcactacttccattattaatccacggacgagagtagatactacgttcaatccgcttcccgtctttgtcaaacgcttcgtcacttggaccgcgatacaaagccaaatcaggttgtgctaccgtcagtttaatcttatcagcagattctttatgagtcataaccaggcaggaagtatccacacgctgcaacagaccacccggcaacgttgtttcaggagtttcaaacaatacataagaaacaatctgctcggaagcggacgctacaatatgcgccttccggtcttgctgcaatactttataagttggctttttcgcaaacttcttcatcgcggtttcattcgtttgaggcaaaacagcatattcataccttccgtttttcggcgcctttccatgatctacaaccaaagaaacccaatcaccctttgtttcctttcccgtattctgcagtcgcgaatattgagggaagtttttctcaaatcgaatggctgtcggaacataataacctgttcccaaatgatctacccatactttcttatcttcctgataatttttccaatagtcatgtcccgccttatctgtgactgccaattggaagatagtcgtttcagtggggaattccgtatttgtattttcaatatccgatccaaggcagacaatcattccatcgatgaaatggtaagatttacgtgcccggtgcgatccattatacttgtcgtgctcgtgcagcttcattccgaagttaccattcatcttctgttgagacaacccgcctgcaaaagcttcatcagaataaagcatttcttccattcctgaataacggtctacattgagcactttagcctgcaattgttccaacggcaaatgaatagatgtgactcccgggatacggttccagtcaaaaccttcctgctgccaaccactagtggccggagtcactgtctgccccggtgcagcagtcaatatctgcaaactgccgtgcgccagatagcgaccatataaattcgctcccaaataatgttcagccgcccataaataacgggaatgtccacgggccacggcagaccagttactgcgacgttgaacagagatacaaccatagcccattgctatattcccctgcggatccggttccggacggaaacctttctctatcagaagctttgccgctttgcgttcttcagcatttgaaactttgggcatatattcgggagcatcattctcaacgcccgaatttgaaatcaaacgaagataagaagaagccatttcactatcatattccgcctttccatcgggagaaccggctaaagccatcatggcaaaatgcataggaaccagtttaccttttccatccggatgacgaccggacatagaaagagggaaattcagtttattgcaataaaagcgcatggtcagcaatacattcttcaccgtttcatgagccaacttggaaactgcaaattccgtccggctaagaagataaatcatgtttgttgccccatccagtccgcctacggcataagccggatagttattgcgatgatggaaagcacctccgtccactttaaatgaaccggacagccccagtgcaggacggcaaccataatcaatccaacgagagaaagaccgcaagtattgcagtttctccggtgtatcttccatcattagaatactggcaatacgccctgtggtctgtgtattgaaagagtccatatcaattccgtcaacttccggtttgggatacacttcgttagtaatcgcataccagcgtaatgtccgttcggcttcttggagtttgcctgcttccctaagcacatctttcatcaagaaatatgccagatacaggccgcgaacactatacccgtaatgatggatatttccccaacaactaccataagccacgccctgatcggttatgtgatcgtacattgccaagaacttcttcttcatttcttcccgaatcaccggtttcgccgtactattattatatgcaacagctattcttttcatcagatcgaaataagcacgcatttccacacccatcttagtgagcatatccttgttccaatccggaatgattcgttcataagcttcggcggcacgtaccatatagataggtactcccgaaacctgaccgtttttgtaagtgatctgatagaaatcatatttcttgcgaatattttcaacctctttatctgtgatcttgcctttcgtgtagatcatatcacgaaaacgcttttccaacagttgcatttctgctctttgcttatcgtctacaggagtcaattcaatatccggtttcaaaagcgagtgttgatagacaaccagccaatggttggtggttccggcattgacaaaagggacttgcagatcggccgtctgttgacgtgcatcaaccttagtagccgtaatcaaatgatcgatgaaaagggttccttttgaatttggagcaataattcggagttcattcatgccttcttccggtgtgccttgcatatcacgttcatagcagacccatgcagcgcgccaaccactgaaattaataccaaaagggaaagatgtgcatcgtttgccgtctttcagaaactgaaactcaatagtcgcattctgaggcacttcattataaacccacacaataaaagccgaaagatataaatccttgccggtcggatctttcttctcaaacttcaggtctttcttgagttccaatataccacccggttcaaatgtccattccaacgaatgttttccatctttataatgcagatctgataccgacaggcgggaatgggtagcggtgatacaatccggtatttgcggtttttcaaaagaaaacatccgctcatctgttacgacttgcgcatgaaggaatgttgaacacaaaagagaaaatagagttgtcactccaaatttaataaaaggttgtttcatcatggatatatcgtcttattaggtttttcagtatataagtcagagagtagtcactttaaaatctgtaaacagtacatgattctgcaagagacgaagaccgaagtgtccgtcaccttcgtcgcctgtaagaacatagcggaacagttcttcaccattcacagaataagtcgtgattcctttttccactctaatccgaatctgataccactgactgggaacaagcaagtgagaggcatcagtatattctttcaataagggtttcaccttgtcatctgctactccataatattctcctctgtaacgacggaaacgagtcgtcgaattatcatttcccccgtatccaacgtagaaaaggtttaatgtgttgtagtttttaaagatgccgtcgcgccactgactacgagcaaaaagatcatctgggtatttagggtcattggcagcccaaaaacaattcaagtcactcaagcgatcgtacttccctccttgcatcaccatacaaatgcggtaactaacctcataattccccgccaatcgctgctgataccacatagtcaatccatccggcacaatcaattctaacgtatctgtacgttctatcacctgcaaggcatgggatgcatcttctatcttccattgttgtgtaaacgcattttcgcgttgtgcaaacagcactacactattcaagagaaataaagtaatcaaactgtagctaataaaaaatcgcttcgtcattacggtattagtttaaagataattcttccggatacaaagaaacccctcttttcgaaaaaagaggggctcaaattgtacaaaatatctcaaataatgtattgaccgggaatttgtattaccaagcttctaccactttttcagcagccggatgcaaataccaatccttgttatcagatccattgctagtcacccaagcacggaattcaggataagcgtcatcaaaaagcaccttttcataagcatgttttacgccaacaggaactttaattccccaaacaaaaccattcttattacaatatggaacaccttccatcatttcaccggctgaatcagcttcgtaattagtataaagataagaaggtctatagcctttcatgtgaatctctttattcgtatttgtcacaataaagaagttctgattatgagtatcagtaataagagcacgataagctttcaattgatccaaatcttcagtaagactagtacgaaccttagctcccaaaataatttctgcacgcaacatgccttgtcccggatttataaaaccttttgtagtctggaagaaattagtattatcacccaaagcactcaaaccatccattatgataaccgggctaccgtgttccgtgtctaccgtaactttacaaaattgcgattttccaaagagttgctgttgaggcatttctgctttcatttccccagtagcaagttcggtttcttttccttgtccttctttcaaaagaatacgggttgcaacagtctctatatactttttatccaagccacctaatactacacctaatttaataggatatctaccgcctttagcacgaatatccaaagtcaacttcaatccttctttatatccctgaccagcttcgaaccatttttcagcctgacattcggttactttcaaatcgtactcaaaaacaacatcgttcaaatcattgtcttgacctggttcaatcggccaattgtcttcaaacatagcaacgcctgtattatgatagaaaaaccatccatcatcttcttcactagttaccgccaccgcatcttcaggtacagttattgctacagtctcgccactccgagtcacgctatttatcggaaatgatgctgttttatctgttccatcagaatacttcaaataaatattagcacagtgaataggcacattcaattccaagtctttctctccatcaacaagcaggccactcaccaacaaacttctttcctgattttctgaatcccaatacaaatcaaccgctacaggcttacttgaataaactttagcagagacagtacgactagttgcaaaatcaaaccctgccggaataacatactgcggggaatcatctcctcctccattatccactattccttcttcattgttactgtctgtacaagcaacaaccaacatcgtccccatgaggacgtacatcaaacttttaatcttcattttaatctaatttttaaatttattgtttgtttcagtttcctatgaaagctctaccttatcgcacccatatccgagccctatatgttaacttatcaaaaatataattaacgcttaatggcattttacctgcctttatttgtaatttcaatcctttccatcgaaaataatcacaagagctcaaatatggctcaaaagccctgttcataaacaatggataatatatacaagttatttagtatatttgcattagacagaacattcaatacaacaaatatagaacttttgttttgaatatacaagttttatagattaaatatcaagggaaatggatcaagtactgtatggtatagattacatagaatattatttctattggatatattacaagtttattggctatcctttaatcataagaatatgctcaattgcggtaatgttttgtattattgcgtacttgtttctcctattccatattatatatggtatattcaaaaggcggaaagagaagcgaagatacaacaaagctttcgacaaatattacgaggaaatgaaatctatctcgctagattctaacacattaagtgaagaggaaatcgcagacagattacagtatgatacgaaaaaacgtcccaagcctaatgaattacgtattatcactcaactattaacagaaatcaagagtgtacatgaagatgacatccatgaactaaactatcaaacgattcaaaccgtattccagatcacgcgtttccttgaacgcgaacttcaattcggctccaaaagagcaaagatacaagcgctgaaacttattcaatccatcaacggatatgcctctgaagcggtattggtacgcttcctctatcatcgtgaaatagaattgaggaactctgcacgctacacttatatgtggctaagccagggagatccgttccgtttcttcgacgaagacatcggcatgaagttgagacaatgggatatgatggaattgcatgccattttggaacaccgcaagaaggtgggatataacacaccgagctttataaaatgggtgaatacttcggccgaagagaatgttaagatattctttatcaacgaaatccggttatataatgaaaccgatagtgctcccatcctggctaaacaaatcaacgcacgctctaccgaaatccggggcgaagcgatcagaactttaggaaaactaaaatacaaagagatcgagcccaagctgattgaaatgtatcatgtgcaaccggaagaagtcaagcgacaaatcatttcggctgttgcagacctgaaaacagataaggctttaggatttctttacaatgcttatgatgaagcagacaactgggggacaaaacgtatcatcctgaaagccctctatgaatacagtgcaatgggaagaaaaacattcgatcaattggagagaaaagcagattcccacacagctatattgtttgcccataccaagcatccgttaatcaaccagttaatttagagaatatgagagatataatatttacattcttcaattatttcgtattcttttatacgagtatgctggcgatattcttcgtcacattcgccttcctctctttcatttctctgaaacggagaaaagattactatgtggaaagttatatgcggaaaacaattaaagaatctccctatacaccgggtatttcggtaattgcccctgctttcaatgaagaaaagacaatcattgataacgtgaactctatgctcgcattggaatacccgcttttcgaggtggtgattgtaaatgacggaagcacggacagtacgttgaagaagatgattgaacattacgaactgatagaagtgccctatgcctatattgagcgaatcaaaaccaaaccgttcagaagactcttcaaatctaccagtccgaaatacagtcgactcatcgttgtagacaaagagaatggaggaaccaaagcggatgcatccaatgcaggtatcaatgtttcttcatatccttatttcatctgtacggacgtagactgtatcttagagaaatatgctctttaccgctgtatatcgcccattatatcttccgataaacaggtaatcgcagtcagcggaacgatgttgatggcaaacggatgcgtagtgaaagacgggcagatagtagacgtgagaactccgcgtactccgattccgcttttccagaacctcgaatacatgcgttcctacctgattggtaagatgggatggtctgcaatcaatggtatgccgaatgtttccggtggattcggtcttttcgaccgttccgtagccattgcagccggaggatatgacggtacttcctttgcagaagatatggacctcattacccgcatggtaggatatatgtgcgacttctcccgtccttataagattattcagattcctgatacttgctgttggacggaagggcctcccaacttggcgatgctttaccgtcaacgtacccgttgggcacgaggattgttccagacacttagtatccaccataagatgatcttcaagaaaacatataaacagatgggattgctgactctgccttatatgttcgtatttgagtttttggcacccatcatcgaacttaccggtttgatcgtatttatctatctggcctttacaggagcggtcaactggaatacggcgtggatgatttacctgacgatctatacgttctgccagttcctttccatcgtcgttattacctacgactattacgtcgggatgctttataaaagaggatacgaatacctgtggattatcatagcgtccatattggagcccatcttctatcatcccatcatcactttctgttcattgagaggataccttagttatctgaccaatagagacttcaagtggaagaatatggagcgtaaaggattcaagcagaaagaagaaaatacggatgatgctgaaacagcggctatgaagcctgaaccggcaacgatttaaacaagaaagaaagattaaagacaagatagaatgaacagagaatttctccataagatcaccttattaggttgtctgtttttgctgataacctcttcctccggaaccgataatggattccagacgccggagcaatatgcccagattgtgcaggagcattttgcgaacgaggaatgggaagcaggaaaagagctgttggaggagggccttcagaaatacccgaatgtttctgaccttgaatggctcatgggcaaatactggtttcacgaaaagaattatgaccagtcgcgttatcatcttgttaaagcaatagacgacaattataacaacgtcaatgccaaacacctgctggtagacgtggaagatattaccgaaaactactccagtgccatttgctacgttaatgagttgctggaagtgaatccgtattggagaggcttatggcgaaggaagattgaactataccgcaagcagaacaacgatgtggaagcggatcgcctgttgaaacgaatcaatcagatttacccgaacgataccattctaaggaaggattacatctacagcatggaagtaggctaccaacaaatgaaaaaaggcggtaaccggaaagaagcgatcgagagactgacggagctaatcaaagtatctcctcaaaacgaagaatattacctggacatcatcaacctgcatctgcaggaaggaaaccgggaggctgctctaggctggtcctccaatggtttggctgccataccgggaagcggcgcgctcatcgtcaaaaggacaagtatcctcagtgaattggcgcgttatccggaagcactggcatttatacgcgagcaaatgaagagaaataacagtcctgccatacggcgtatgtataacgacttattgatggaagctgcccgtgcagaaaaacaacgagacccttatgtattatatggcatggcctacgaaggaggcaacaagaacaaggaagcattagactacttattgaacacttccgtcacccgcggatataccgacgacgccctcttctatatcagagaagctaaaaaacaatatggcaacaatgataaaggaattctctataaagaatatatgctttatcgccagatgaatgaggatgatcttgcctattcaacgctgaaaaagatgtacgagatgtatcctgatgattatgacattacgcttgccatgagcgcgcagcacatgaagaaagctgaaaaactgatggaactcggtctgtatgcggaagcattgccgcacgtattgtttgtatcccaaaaacatgtagacaacgacgtgaacggtgccgcatgggaaaaagccttgagttgctatatcaatatgaaacgctacaatgaagcacttgccacattggataccatcacccttcacttcccggattacgaaaatggtacgttgaaaagggcctttattctcgataaaatggacaaaaccgaagaggctttgcaactatatttgtctgccatcgagcagagcgacgaggatatgcgtatcttctacgtcatcggatacgaggaactggcagtgccctacatcaaaaagtgcatggaagccggagctacgaagaaagcatacgaagaagccatcaaactggtcagcctgaatccatcaagcgatcttggattacggtatgccattaactcgtccggtttactcggaaaatacgatgaattcgagaaatatacagcgcaaggaatcaattactatcctgaagaacctttctatcaggcaaagagggctactgtccttgaacgcgacaagagatacgaagcttctttggaattcctgaaaccgatactcaataaatacccgagcaacaaagagattataggcgcattctcacaaagcagcgaatatcgtgccctgcaactgacaaaggcgaaagaacccgaaaaagctctcgctgttcttgatacagctttgctttacgacagccagaacaagtctttgaaatacaccaaaggcgtggtatatgaagccaacagacaagcggattcagcctattattatcaaaagtattacgagccttccatcatggaataccgctctttccaacggcacttatcgggccttagaagcatgatgctcaagaatgagatcgctttgacctacctgcgtgcacgctacggagaagaagacatcattacctccgttgccaccgccgaatacacccgaaaaggccagaagaacagctacacgggacgtctcaactatgcaggacgaagcggctcggcaagcgacagcatggaggctgaagaacagacaccgggaggggtcggcatccaggtacagggagaatggacgcaccacttctcaccgaagtggagcactacggtcaatgccgcctttgctaccaaatacttcccggatattaccgccgatgttgccgtacggcattatctcaagaatgactgggaaataggagcacatgtgggatacagacgtgtagctgcctatacgaaacgttatgaatggaacgacgaattctttacaggaggcaccggagataacggttatctatttaccggctggaatgagtcaaagaccaacctgctcaccgtaggcggagaattagccaaaactatcgaagtcgttcgcctcaacacgaagatagatatgcatttcttcaattccaacttctactacaatgcacagattggtgccaaatacttcccggctaatgacggaaagacgaatatcaacgccatggcaagtatcggatcggccccggaaacggctgtattggattacgcgctgcccggctctttctcacacaccaatacaatggtaggactgggaggccaatacatggtcagtcctaatattaccataggtctgatgggtacttggaatacctattataaccagaccaacaccgtgcgagggagcagtccgttcaacccgatagaatccatatcgacacgctataaaaacttatataacatctatgcacaagtctatatttcattctgacacgctttgccccatattggcaggaatgatatgtatttgctgccttttatccggctgccgcatgcaggcacgcacggagatgttcccatctaaagaaggatacctcatcacaatcggcgaagatccgacggacagagatacccgatgggccaaatacctgtacgagcacctcaagaaacgtgcaaacgacgatgaaatggtcgctttcggtgtctccgagatggatatgtggcgtatcatcatacagatagacccaacattgcagagaggattcaaagtagcctgcaaaggttcggatatcagactgaccgcaagtgacggcaaacaaatgttatggctgcaataccaactgataaagaagatcagcaaagaagacccgcgtatagacggttcagatcttcctcccgcccttatcaatctcaacgatacttgcggagcttttgcatttgactatcaaagtatttattctccatacggcctgaacgccgatcatacaggcgttatcggcctgaacaactttgacgacagctggggaatatggggacacaacctgcgaaaagtattgggaaaagatgcagagaaagtatatgccaccattcacgggaaaacagatgactcacaactgtgtttctcttccgaggatatgtatcgccagatagaaagttacatcgtagataacttcggtgaaaaggggaatttccgttttgtaatcgcaccggatgatactccgtacgcctgtacgtgtgccacctgcaccgcattgggaaatacagagaagaacgcaactcccgccgttacggaactaatcctccgcctgtcgcagcgttttccaaaacacacgttctttacgacttcctacctgactacgcaacaagtcacagacaagcagctcccgtccaacgtcggggtaattgtcagcgctatcgactacccgctccgccggacagacggcaaggacgagcaagacaagaaatttgcggaacaactcgacaactggaagaaagtaacgaacaacatctatatatgggactatatcaacaacttcgacgactacctcactcctttccccatattaaagatagcccagcaaagactccaacttttcaaacaacacggagccagcggcatatttttcaacggaagcggttacagctattcttctttcgatgaaatgaggacttttgtattatcagcccttcttatcaacccggaacttccagttgatgagttaattaaaagctatttcaatcaggaatacccggtatccaaaaaatggctgtacgattactacacagagctagaaaacaacgcccaatccggaaagcggctcggactttacgccggtatcagagaatcggaaaaaggattcctctatccggagaagtttatcaaattctatgatgaaatgggagattttgtatccgaagcaaaagggaaagagcgcaaaaagctgcacgagcttcagaccgctttgtctttcacgcgcatggaattagcacgtgaccacggtttcgacgcttacggatatgccaagcgaaatggaaaggatattcaaccgcttccccaagctcgtaaatggatcacccagctcaaagaacatcaagcatttgccggaatggaatattacaatgagtcagcttatgagattgactattatataaaggaatgggaacaatatatacttgcttccgacataaagaaaagtttgtttctgggaatgaatccttccacaacccctaaactgaataaaaatgattcaaagaaactgaccgacggcactcacggtttacccggagactatcattgcggttgggttatcattccgggagaagaatgtaccatcgacctgccggttaaaggactcaatgcatcaggaacattctatatcagttctctgaatcttccccgccaccgcatctatgcgccacagcagattcaactgttgaaagacggagtagcctataaaacaatagatttgaaaccggaagactccccagaaaaaggagaaatgatgaaagccactgttccggcagacctgaacggaacagaacaattaagcataaaaatcagttgtttaaagaaaccgggaacgcaaatgggtatcgatgaaattgcattcatcccttagatgctgaaaaagtgatataacaaaaataaatggcaacaatgaataaatctatattctatattttactactgacggcacttccgctctgctttacaggatgcaggaaggaagtacgtcccaccagcatgacgataaaagattccgtcaggcactattaccctatcaagcaaggtcagcaactcgatatcatgtttaccatcaccaacacgggagacgctccgttaatcatttcagaaatgcaaccttcctgtggctgtatcattctggataaaagttcgcatatcatcattcccgaagacggtatcaggcaattcaaagcaacctacaacagcatcaagaatgtaggcgaagtggttcaccgcatccggattttcggcaatatgctcccaaatggaaaagcagaactaaaatttgatgttaacgtagtccccgacgcagattatacacgtgattatgaagaactctatcaggatttcaacactaagaacggtattgtcagggagatggtggacggaaaagaatcggaactaggatattatgtaggagaaccctaataataagtattaagtatcaagtattaaatgactggctaatacttgatacttaatacttgatattgatacttatctctacggatgtatttctttgaatgtggtattttcttctttcacattctgaatagtctgttttaactccccaatcggcaagtcatatccataccagcctgtatagcaatccaccacataccatttcccgtcagcctgcaattcgaactcaacacgcaaatccacttcggactcttcatagcccgcttcaaagattttgtgtttcggttcattcagcgtaaacttggagacatagattcccccttcttcctgggtgatacgttcttctttcatggtttcgctatccagcaacggccatttttccttggtgaaagggaatgttttttcggtttcgccgtcatctgccaataaagtaatcggggtctttaatgggaacttgatacgagtatactggaaggctgcactggaagtaaatttatccagaaacgatttgaaatcttcaccgtcttgcgtagtcagttcactatcggctttcgccttggaactattaccgcaggagataaacgaaacaccggcgagcaacagcatagccagcaagcagcatacaaactttttagctctcataacactatataaattaagagtttaattgacggcgcaaagatagtaacaagtttggttttgcaatacttttatacattaa

SEQ ID NO: 8168 - DNA, 6408 bp, Unknown
  gut microbiota DNA sequence
atactttatttgcaatagagacattctttcatcagattccccactcaacattaggtttatcacccataaacagttccaatgtacctccagctgcaatgtccgcaaaatcaagataacatttattgtattcctgaccgttcaacaaggccttttgtatatagacgttatttatgctgttattatgagctattaccgtgaatttcttaccagtataatagctgagatcaagattgaactctactttatcaaaaaccggacttgtaatctccatacgtgtatttcccggacaggaaggatgaataccggaagcagccaacacataccacgccgacatctgacctacatcttcattgccaacaatcccttcaactttgtttgcataagccttttcacatgtatagcgtgtccatttttgagtataccagggaacttcaagctgattgaacaaaaaaggaacgaagtgcacaggttcattcgcatggttataatattcattccacagcatattagaaggagttttattaaagaaatctgttaaatccgcaataactttctccttaccacccatcaaattcaccattcccggaacatcgtgaggtacaaaccaaccttgctggtaagagtttgcttctatacacccataccattctttaagacgtgcattctccggccattccacccatgtaccatctgctttacggggacggaaccatcccttttctttatcaaaaatatgatgatatgcctgtcccttttcatagaaacatttggcatcgtcttctttccccatagctttcgctaattgagatatacaccaatcagtataagcatactccaaagtggttgaaatactcaatggttccggagcataccccaatgaatcattaccaaaacgacgggatgtgttaatggcataacgatatgctttctctgcatcatacgtacgaatccctttgatataagcatctgccaaaacagacaaagcaggatttcccaacatacagccggaataggaattcagcaattcccaacgttcatagtattcgcgcccactctgatctgccatagtaatcaatgagttcagttcatcacttactaaacgcggattaattatagtctgcaaaggaaactgactacgaaatacatcccatccactgaatatagtacgttttgtaaaagtgctgtcagccgtatgtattttataatcaccacctacataacgtccgtctacatctgtatagatacgaggatcaatcatcgtatgatacatggcagtatagaatatcgttttttcatcatccgtaccaccggatatccggacacgattaagttctttattccacaattcagtagcttcctgctttacttgtccaaaatttttagaggctatttcttgttcaaagttatttgcagcaccctccatatcaacaaaagagataccaactttcatctctacagtctctccctccttcgttggaaattcagtaaaaaagcccagatgtttacccgtcagttctttcttgtcttttataaccggagcttgtgatacacgagtcaaataaggaatactcactacttcatcacgtttccgaacccaatgttcgggaatatctgcactccaaaagccataattagtcaaaggtttactaaattgtgcataataataaacggtataatcggcttttccttcaccattaccccatccaccaccatcaggtgtacacttcatccatccttgaatagtgtaatcatctacaactttaatatactgggaagtagatgttccccctactctacgagctaaatcaatctgaatacgcgattggtcactagaaggataagtaaaatgtaaaattccacagtgtggtgtcgcgctactttctactttgatatgataatcagtcaattctaccgaataatatccggccttagccgtttcagtggctttgttataagccgaacgatatccttttatactatcattattctctttacctgccactttatataattcaccagttgtaggcatcacaagaaaattgcccaaatcaccaaaccatcccacaccactcatctgggtaaaggcaaatccttcgattgtcttatgttcatcactgtatccggaaccgttatcacctcccgttattgtattaggactaacctgtaccataccatacggagtcgtagctccgggaaaagttttacctaatccgtgataaacaccggcagcccctacactagtactggcaccaataaacgggtttacataatcagtcggaaccaaatcttccgatacggtattggttgatgagcaacccgtcatccaacacaaaaagcaaacaattaaaagattagcagtcgctttatacataacaataatctaattattttaagtcaaactaagaacgaaagtcttaataccaaaacgaggcattgaaatcgtcatttccgatttacctgcacgtgtttttatcttctttctttcgatacattgtccattcaaatcaacttcctccactccggataatggcatgtcaatggtaaccttttgtaatctttcgtctccttcagaattgaacaggcgcaatagtacctttccatctttcatttgaagagcactcacttgataaccagtattctgtaaatcaataaatgatttcgattccggttttgccactggatagcaagaatgcagcaatggttcattccaacaatcgctatcatctgcgattgatgctttgtcccatttgccacgatgaggtataattgcatacttcatcctcaaagggtgtgttattttataatcaggtccccaaagtcctccacccgaatattgagcagtcagtcctagcggatagtcctctccataagaataagaagtagtatggtctgataataaagccagagcatagtcgccttcctgttcagccaagtcaacccaatgaagtataatattatgtttgatttgatcccaagagtcaaagaaagtatcagtcagtttgctttcgcatacatcaaacggtgcatttttataaacacggggagaatgtaaatcagtcgggaataatacacttagtttaaaccgatcgtcacaataagcccgacgattatcacgccaacgttcctctttatattcaccaatacctacattctttttccagtcaaccgtcaaatcaaaatcgattcgtctcgttcctttagtgagagtgattacctgtgtaaacggatgggaagcaatctcaccctctatcttaattttttgctcatatacattatcccttactactgtcagcttggccggagtctctatagaagaacgaaatttgccttcttcataaaaaaagcctcgtaactcccctaaagcatatttccccgttttacctgcaaaatccttattcccttcttttttagctatcaggctttttatggttcctccctttgataagtcaaaaacaattttatacatatcattttcaaccacgtattcctgtttattcaccttattaccttccaaaacgaatctactctccgaagcctctttcttaccggcttctttcttttttatacaatacgtggaataaccaaagggaggaatctctgcctcaaaaaataatcttatctctttaccttcattttctaccaaacaacctatatctttacctttccagtcataaacacttaaatccgcattttcagattccgtaggcagaagaacacttacgacttcctttcttctcattcctaatgtattaaaaacacgtatatattgctgttgagcattattttgcggaataaacttttcattaaagctccgcatagatgcctcaataattccatctgcaagatgattggtactatctgtccatcgcttaatctgatcagcccatgttccttttctattcagtccattataaggcacaatccacgaatcatgatgttgtgccaacatcagtgtacgccaagcctcatccatatctgcctgtcgacaaatatatttattttccagataagccattacagacattttctctgccatgacaattctattttctgaaacacgtacttcttgcgctattttttgcaaaacctgacttccccacataagattcacatgtatatcttcctgtgaaaaataccagttatcatccgtttttccgatggagacattttcaatgtaatctctccatgtcatatatatagagttattttttgtgttctttccactccccagccatgggccgtttttccatccggcatcctgaaaacacataccaacggggtgtttgatacctgcgttacggcaatcttttaaataagcatccgaatttccccaagcagttgtctgccaagttgatcccggctctagtttttcacaagcatatctgggaacggtcaagattgcagtcccgtccggtcccacccaattaaccaattctccgccataagcagcagtataccctccccaacaggtattgggacatttcaatacagcatatttaaagccgaattgtttaaggatttgtggcaagcaacttgtgaagcaaggttcttctaccgaataggttacaaaatccacccccggaaaatgtttgtttattttagcaataccatattgaaactgtcttattatactctctcccgagatattatagcaataaggctgtgcataagtagggttcgtaaactctacctggtcactggtagccatctctttaaaacgcaaataagcctccggagtctgtactctgactgtatcccatgtttcaggctctatctccatacaaatccgccagtccggatgcatagccagctgatccacaatgaattgagttttccactttaccggataatgtccatatatcccgccatgatacccatcaacaaaataagcttgttgagaataaacatttgtataaaagaaaacagtcagtaatatgatataaattttattcatggtatcctaaacctatttatctttgtgttgctccattctacacataaattcatataatttatgttggacaacttctttattattttcatattccggagatatccaatcaacgagtgccagcaaagtctgattttctataaattcttccttcagcctttcgttgttttccacttctatgagaaactctgttttttcatcagaagtaaattcatccgcaaaatatttattcagacaattctccatatacacagtccttttttatcaaagaacgattatctcaataaatacccctaaaaaataccgataaattcattaaaaagttatgcagccaatgttacattgagttttgctctcaacttttttagtgctattcccatctgacattccactgtatttaccgaaatgcccaaacgttcggatatttccctatacttcaatccttccatgcgacttaacaaaaatatgtcacggcatcttttaggcaaactattgatagcatcccgtatcaggttctccatctgatttctttctgatatatcatatacatcaaaacgatccaaagattgtaatttcagattcaactcaatctcaaaagaagccttcacattctcgacatacttttgctcgaatactttatgctttaaataatccaaacatttgtttctcacaagtctgaaaagataagcattcatattctcaatatgattcattgactctctcttttcccataagtctgtaaacacatcttgcgttatgttctcagcatcctcttccgacatcacaaattcttttgcaaaccgaactagtttgggataataaataagatacaattctgaaaaactcatagttgtgtgtttctttagattagtattcagttatcaaaaatcttgtgatgcaaatatagagatgaaaaaagcctacttcttagtggaagtaggcgggaaagtaaacgttttataaatcaattattgtatatacatttaataatcaacaatttacaacaataccattttttagttttggtaaaccggatagaatcatttttgagacaaagaaccaagcttttttacctcctccgcaaagatattactatcaagagtggacattctcttcactttactcttataattatagattgtctgcacagaataatgcaaaaatacagcaatctgtccaacatcggtaattcctaatcgtatcaatgcaaatatgcgtaattctgtattcagttggtccttttccagtttataacgctcctccggtttcaacaaagaattgaacttttccacaaagttaggatacaatttaaggaacgctttatcaaagttatggtatagttcttcaagttccttttcaaaaggtcgggaggatgacttatataaatcatcaatctgtccggtcttgattttcctgttcacattcttcctgtactcatcgagtttattaatataaac

SEQ ID NO: 8169 - DNA, 30883 bp, Unknown
  gut microbiota DNA sequence
atcactcccgtaacaaaaccgggtaaggttacagatgtgtgttgtgaagactttatacaatgggtgattgaagataatttcattgcaggccgtcctgcatgggagaaggtgggagttacattcacccatgatgtgaccccgtatgaaatcatgaaattaagtcttctcaatgcgtcacatactcttctttcttatcctgcctatatggaaggattcaggaaggtcgatgctgtaatggcagacgagaggtatcgtgcaatgataaagttgtttatgaacagggacgttactccttatgttccggttcccgagggcgttgaccttgaagcgtataaagatcagcttatcgaacgattttcaaacaaggcgatcagcgatcaggtatcacggctttgcggcgatggcattgctaagtttgcggtttatgtggtacccatactcaaacagatgttgcaggatgggaaggatatttcgatagaggctttcctgatagctgtttattgcaaatacctgataggtgcgcgcaccgagtctggtgaaaatatagctatctccgaacctcacatcacctcggcggacaggaagttgatttccggaggatcgccggccgagttcttgaaaatatcaccttttgtgtcattgggactggacaaatatcctgtgtttatggaaaagtatgagcagttttatgctatgcaggtagcagaaggattgaaggtcttattacagtaaacaactaaaaaatacaaagcaatgaagaagtttttcataacggttgttctgtcgcttttgtgcgtattgtcggtttcggcacaaaaacagacggaggcgtcaacgcttaacctgataggtaagccgtttgaatcgactcccaatccgtatcatagagtcgatacattggtttataaaggttttaacaggacggagaatcgacaactccgttgctctgccggtatggctgtgttgtttaaaacgaacacgcgtaatatacagattacgacaaagtggggatatgtatattcgagccattcaaccatgccgatctcttataaaggatatgatctttatatcaaaaatgcagacggtcaatggcagtatgcagcaagcggttcattgaaagcgtataagggcgagaaaaccgagacattcacgctcattgagaatatggatggtacgatgcacgaatgtatgatgtatatgccgatgtattcggaggtcatttcttgtaagatagggatagatgacgatgctgttatcgaaccgttgaagtccgattttcgtcacaggatagcggtatatggctcttcgtttacgcagggagtgagcacggatcgatccggtatgagttatcccatgcaatttatgcgtaatacaggtcttcaagtcgtgtcgctcgcaacaagcggacgttgcctgatgcagccttacatgctcgacgttcttgcggaagtcaaggctgatgcctttatattcgatactttttcaaatcctgacgcagaactgataagagagcgcctgatgccgtttatcgatcggcttatagcggcacatccggctactccgttgatatttcagcgtactatctatcgtgaacgacgttcattcgatacagttcttgatgcgaaagaacgggctaaggcggcaaccgtagaggagttgtttgcgaaaatcctcacgaacccgaaatataaagacgtttatctgattacgcctgatgcttccgatgcgcatgagacatcggtcgacggaactcatccaagtagttatggatatgcactttgggcgaagtcaatagagactccggtaatagaaattttaagtaaatatggtataaaatgagacaagcggtattagtagaaccaaaacatattgaatttcgtgaagttgaggcgcctaaggcgtcggacctgaaagaacatcaggtacttctgaatattaagagaattggtatttgtggaagtgagatacattcttatcatggatgtcatccggcaactttctatccggtagttcaggggcatgaatattcggcagtggtagtcgctacggggacggcggttacgatctgcaaggtgggtgacgttgtcaccgcacgtccgcaacttgcgtgtgggaagtgcaagccttgtcagcggggagagtataatatttgtgaggagctaagagtgcaagcctttcaggcaaatggagctgcgcaagacttttttgtggttgatgatgacaggattgcggtgttgcctgaaggtatgtcacttgattatggggctatgatagaaccggtggcagtggctgcgcatgcaaccatgcgtggcggggacttgaaagataagaatgtggttgtatcgggtgccggaacaatcggtaacctcgtggcgcagttcgctaaggcaagaggagccaaacgggttcttattaccgatgtaagtgatttcagacttgaaatagcccgtaaatgtggtatagtagatacgctcaatgtagctaagacgccgctcaaagaaggagcgaagaggcttttcggggatgaagattttcaagctgcgtttgaggttgccggagttgagtcgagtattcgttcgcttatggagtgtattgaaaaagggagtaccatcgttgtagtggcggtatttggcaaggatccgtcgcttgatatgttctatttgggagagcacgaactgaaggtgaacggaacgatgatgtatcgccatgaagattatcttacggctatcgatcaggtaagttcgggagctatccgtctcgaaccgcttatttcgaatcatttcccgttcgagcagtatgacgaggcatataaatttatagacgagcatagtgcaacatccatgaaaataattattaaactataaaaccatgaaaataataggtataggagaagttgtttgggattgcttcccggaaggtaagagactcggtggagcacctatcaatttctgcttttttgcgaaggaattgggagcagaatcatatcccgttacggcaataggtgacgacgaactcggtgatgaaacatttgcggtgcttaaagagaccggacttgatttaggatatatttcccgtaatattttgccgacaggtaaagtgcttgtgtcgttgaatgaggccggtgtaccgcaatatgagattgttgagaatgttgcttgggatgctatcgagtgtagtcctgcgaccatgaaacttgtcagcgatgcagatgctgtttgttggggctctttggcacaacgaagtgaaaagtcacgtgctgcaatcttgagactcatagatgccgtgccggatacctctttgaaggtgtttgatattaatatcaggcaacatttttattcgacagacttgattgtggagtccttgcaaaaggcaaatgtcctcaaattgaatgaagacgaattgccgttattgatctctcttctttccctttcgactgattttgtggaagctatcgcagaactcattgctcgtttttcgctcaagtatgttatattcacacaaggggcagtacgtagtggcatatatgatgcaagtggggaagtgtcatccataaacacacctaaagtcgaggtggccgatactgtaggtgcaggcgactcgtttactgctacctttgttgtgaatatacttagaggggcgtcggtcgctgaatcacaccgcaaagcggtagatgtatcggcatatacttgtacacaaaggggggctattaatccgttgccggatagtaaaaagtaatctcttttgattgcattttatagataactccagttaaatagttatttttgcagaaataactgatttttacgaaataaaggaacccatgttgaaaatattagtaacctacgccgtacaaggcgaatttgtagaacttaaatggccggatatagaaccttactacgttcgtacaggtattggtaaagttaaatcagcctttcatttggcagaggcaatccgtcaggtacaaccggacttggtgctcaatatcggaagtgctggaacagtcaatcatcaggtaggagatatttttgtatgtcgcaagttcatagaccgtgatatgcagaaaatgaaagagttcggattggagtgtgagatcgattcatcagctttgctcgaagaaaaaggttattgcacgcattggacagaagatgggatctgtaatacgggagatggcttcctcaccgagttgactcacgttagcggagatgttgtagatatggaagcatacgcacaggcatttgtctgccgttcaaaagaaatcccgtttatttccgtgaaatacgtgactgacataattggtcagaactccgtgaaacattgggaagataaacttgccgatgcacggcagggactatcacactatttcaatgtcttgaaagaaagaatatgataagtgactcctgcggctatcaatcccaggagaatctttacccatataaaaggaatcaggaagaaaatgcaataaagcatcgttccccacattaatacgagagaaattattttggcacggagaggaatcgccttgttttcgcggaaattgcggatataaggaccgaagtgccgatgattgagcagccagttatataatcggggtgaccctttgaaataaagggcggcggtgagtaatagaaaaggggtagtgggcagtagcggcagaaagatgccgagaataccgagcgcaagggaaatactacctaaaacaatatatagagttttcatgcggcaaagatagtgcaaaaaaagggaaaaaataacactctttgctggatgaaaactctattttatattacctttgccgttgcatcgaggtgacattagatgcgtgtaactattaaaatacatacactcatgtttacagtaatcaaacgcatggagatctcggcttctcataagctggtactcccgtatcgcagtaaatgcgccagtttacacggtcacaactggattatcaccgtctattgccgttccgcacggctcaactccgaaggaatggtggtagatttcacccgcatcaaagaagtggtcacggagaaactcgaccatcaaaatctgaacgaagtactcccatttaatcccacagcggagaatatcgcccggtgggtatgcaaacagattcctcaatgctataaagtagaagtgcaggaatcggaaggaaacattgtcatctacgagaaagatcccggcagcacagaaggacaagaatagcaaactaaacaaattttgatgatgagaaagattaatgaaatcttttacagcttgcagggtgaaggctaccataccggaactccggccatcttcgtccgtttttccggctgcaacctgaaatgtgacttttgcgacacacaacacgaagaaggaaaaatgatgaccgacgatgaaataatcgccgaagtgaaaaaatatcctgccgtcaccgttgtcctcacgggcggcgaaccttccttatggatagacgatgaattgatcgaccgtttgcaccaagcaggcaaatatgtgaccatcgaaaccaacggtacacgccccctgccggcagctatcgactgggtgacctgctccccaaaacaaggggcgaaacttgccatcgaccggatggatgaagtgaaagtggtctatgaaggacaagatataagtatttttgaactccttccggccgaacattttttcctccagccttgttcttgtaataacactgcttcaacagtggactgtgtaatgcgacatcccaaatggagactcagcctgcaaacacacaaattaatcgacatccgttgaacaaaatagacgggtgatgcggaagaagcttaaattattacaaaatatagtatgaaagtaggtttgtttattccttgttatatcaatgctatttaccccaatgtgggagtggcatcgtatagactattgaaaagtttgggagtagacgtcgattatccgttggatcagacttgttgcggacaaccgatggcaaatgccggttttgaagatgaatcgatgaaattggcactccgttttgacgatctgttccgggaatacgattacatcgtcggtccttccgccagttgtgtggcatttgtgaaagagaatcatccgggcattctggagaaagaaggacatgtttgtcagagtgcgggaaagatttatgatatttgtgagttcattcacgatgtcttgaaaccttccaaaattcctgcacgctttcctcataaagtcagtattcacaatagctgtcatggggtgcgcgaactgttgatttccgctcccaccgaactgaatatcccttattacaataaattgcgtgacctgctcaatctggtagaaggcatcgaagtattcgagcccagccatattgacgagtgttgcggctttggcggaatgtttgcggtggaagagcaggcagtctccgtctgcatggggcgtgataaggtaaaagatcatatcgctaccggagccgagtatattgtcggagcggacagttcctgcctgatgcacatgcaaggtgtcatcaaacgggagcatctgcctattcagattatccatattgtagaaattctagcgtcgcaatcatgagtacaaaacattcaaaggctgccgaaaagttcttgcaggacagcaagatggcagcatggcataacgaaaccctttggatggtccgtgccaaaagggacaagatgagcaaggaagttcccgaatgggaagagttgcgcaacaaggcttgcgagttgaaactatactccaacagccacctcgaagaacttctgctggagtttgagaagaatgctaccgccaacggcgccatcgtacattgggcaaaagatgccgatgaatactgcgccatcgtctacgagatactgaatgagcataacgtccaccatttcatcaagagcaaatccatgctcgccgaagagtgtggattgaatcctttcctgatggagcgtggcatcgatgtcgtagagtccgatttgggcgaacgcatcctgcaattgatgcatctcgaaccaagccacatcgtactgcccgccatccacatcaaacgggaacaggtaggcgaactattcgaaaaggagatgggcacggaaaagggaaactttgatcctacctacctgactcatgccgcacgtaagaacctgcgccatctcttcctcaatgccgaagccgccatgacaggcgccaactttgccgtcgcttcaaccggtgacattgtggtctgcaccaatgaaggaaatgccgatatgggtacttcctacccgaaactgaacattgccgctttcggtatggaaaagatcgtcccggatctggacgcattgggtgtgttcacccgattactcgcccgttcggccaccggacaaccggtgacaacatatacttctcattaccgccgtccccgcgaaggcggtgaatatcatattatcatcgtagacaacggccggagtgccttactgtccaagcccgaccatatcaagacattgaactgtattcgttgtggtgcgtgcatgaatacctgtccggtgtaccgccggagtggaggctactcttatacgtacttcatccccggacctattggcatcaacttgggtatggctcacgctccggagaagtattatgataatctttcagcctgttctctgtgtatgtcctgttccgatgtctgtccggtgaaagtagatttggccgaacagatttacaaatggcgtcaggatttggacggactggggaaagccaatacgggaaagaagatcatgtccggcggtatgaagttcctgatggagcgtccggcattgttcaacgcagctttgtgggcagccccggtggtaaatagcctgcctcgtttcatgaaatacaacgatctcgacgattggggaaaggggcgtgaactgccggaatttgccagcgagtcgttcaatgaaatgtggaagaaaaacaaagtacagggaaaggaggaatccaaatgagcagcagagaagaaatattagccagcatccgccagcatacgcagacgcgttatgataaaccggatattgcggatatgaaacgattgtcatatcctgataagatagaacagttctgtgcaatcagccgtgcagtgggtggtacggcagttgtattgggtgaaggggaagatgtgaatacagtcataagacggacttacccggatgctatgcgcattgcttccgtattgccggatatttcctgcgctacgttcaatcccgataatttggatgatccgaaagagttggacggcacagatgttgccgtagtgaaaggagaaatcggagtagccgaaaacggagccatctggataccgcagacggtgaaatataaagcaatctattttatttcggagaagttggtcattctgctcgaccggaataaaattgtagataccatgtatgacgcctaccgcgaactggacggacaggaatatcagttcggaacgttcatctccggtccgtcaaagactgctgatattgagcaggctttagtgatgggagcgcatggggcacgggacgtgttagtgatattaacctaatgtttccgtgttgattattctaaaataaatttggtttcaaaacaatggagttttatatttgttagtacaaacgaaatggagactccgttgacgctgtaaaaacagaggctctattgataagaaatagagcttttgttttatataaacagagcttccgtttgatgtaaatagaggctctgtttggataaagtccggtttccatcggatgtaatagagtcttttggagaatatagtagaatctcctttgatgtaaattgaatatctgtttctgtttgtccatagtagataaatgaatttgtaggataagagtagtaaaacgtttaattataaattatatgtatgccaataaagtaaagaaaatagctgccgtccatgacctttcgggaatggggcgcgtatctctgaccgtcgtcattcctattctttcatccatggggtttcaagtctgtccgcttcctacggctgtattatccaatcatacgcaatatcccggtttctccttcctcgacctgacggacgaaatgccgaagattattgcccaatggaagaaactggaggttgagttcgacgctatctataccggatatctgggttctccgagacaaattcagattgtttctgattttatcagggattttcgccggccggatagcctgatcgttgccgatccggtgttgggagataacggacggttgtacgccaactttgatggagagatgataaaagagatgcgccatttaatcacgaaagcagatgtgattacccccaatctgacggaactgttttatttattggataaaccctataaagcagataacacggatgaagaactgaaagaatatcttcgtcttttgtccgacaaaggtccgcaagtggttatcatcactagtgttcctgtacatgatgagcctcataaaacatctgtctatgcatataaccgtcagggaaaccgctactggaaagtgacctgcccttatctgcctgcacattatcccggcacgggagatactttcaccagtgtcattaccggttctttgatgcagggagacagtctgccgatggcgttggaccgtgccacacagtttatcctgcaaggtattcgtgccactttcgggtatgaatatgataaccgagaggggattctattggagaaagtgcttcataatttggatatgccaatacagatggctagttacgaactgatttaagataggctttgtgttgttattactatgccaataggttggcacaacaatgccaccttgtttgcatgtctgtgccactgtgttggcacaaatgtgccttcttattggtatttattaagttcagaatcgtactgttactcttgccgggagttttccacttgtccacttaggcccttctttgacaagccggatggcttctttatcagcgaattcacataatccatgaataacagtgatattttgtggctttccttcttcatcaacaaagaaagaaaggactacctcccccttaatatctttacagttatcatccgttggacgaacgagattctctttcaggtatttctgatagctacgtttaccgatgacaggttgcggagtaatctctttctttgcctgttccttaaccgtcacaacatttccggcagttgttgacttcttatttttcttagcgccatatcccactaccaccacttcattgagtgcctgtttgttttcgttcatggcaatgagcatcgtccggctggtatctacccggatttctaccggatcatatccgatatactccgctgtcaattgtttcttatcatcctttttgactaacgaaaattctccattcatatttgtgatggttccgatattcgttcctttatatgtcacactggctccgataagcggttctcctttttcgtcggtcactctccctttaatcatattcttttgaggaaggatagtcgctaccttagccaacttcattttcttatcagattcagattcgaaagtatccatcgttgctactacttcttgcaatgcggcagtctcttccgacacttcctccatcaccggcacagttgccacaggtacaccttgttgtggttgggaagtcgcttggattttggcaatcatatctttcttatccgcttgtcttgcagtaatttcggaaacaggagtggaatcttcggaagcaggagtggaatctgtttttacctttgcggtagccaatgcgatttccttttgtggagttgccggaactgttggagttgcaggaatggccggagtgggcggaactgcgggttcagccaacttggaggaaacactctctttggcaatgaacacttcgtccgtcatactctttttcaggaacaggaaataactgctgataccgaatccgatagccagacaggcagcgatgctccaagtgatagcacgggtgttctttttctttgccgaatgagctgaaacctgcatccgcagtttctcgatccgttgttcgtgatttccctccacttggctgtaaccatccatagcatcggccaggaaaggatcctgcatcgactctcgttccagtcggtgtgcctcttttcctttgcggagtcctcgtatgtagtccaatagtttcatagggcttgtttcttgatacaattttttaaatttcgctttccgttctggatatagcttttcacattgttcagagtaaatccggtttgttccacaatgtcggcatacgacatctcttccagaaagaaacgcgtaatactggtccgttgttcttcgggcaacttttcgagacagtgatgtaatgccttcagttgttcctccgaactttcctcttcacttaatagatgcagaaattcgtcagattccataatattaaccgtataatctaacggaatttctttattttccttccgtaaaagttgcaggcaatgattcttcgccacccggtagagccatggcttgaaaacttttatctcataatttcccagtttaggcaataaatcttcaaacaactgcatgactgcttcctgtgcccggtcttcatcatgcaggtatttcaggcaaagtccgtacagtaacgggatatatcggttatataattcaccgaaatattccgtatcgccggacttcgtatagtgtatcagtaattcctcgtccgatagtttcgatatgtttcttttgaaaaacaacatctattcctcttcttcgtcgataacaacttgatatttttctttcattctttcaaaatcacctgttatctgctctaatatttcatgtgtatccgtactctttaccaaagcgggcataccataatagatggatgctttgtatggcaacaggatcatctttcctttgggtaaagagcgtcccataccggtcatgaatacaggaatatatttcacttcaggccgtagcgacaggatacgggcaatgccggattttatttttcccatctgctccggtttccctctggttccttccggaaaaagaatcagtgaatatccggcatcaatggcttcaagcatcttacggatcggatcgtgctccgaatctttttccccttttcttctgataagaagcgtattgatgaaaaagttgctgatggaagcctgaaagcgggttttcccgaaatagtcttctgctgctacgggtttgactttccacaaaagatcgccgggcagggaagccaacaggcttagggtgtccaggtgactgttatggttggcaaggataatgaattgcttttcttttttaaggaagcggcaatcggtgaactgaacccctacgattaatttcaggaaccattggaaaacacctttatatataatctgcatcgcagcagcttgcatgaatcttttttccattctctccgtttaatatgcaatgtaataaactaaatgaaaaaatacaggagcagtgtaggacagcgaatctatccggtcgaatactcctccatgaccgggaatactgttccccatatctttaattcctttatctctcttgatagcggagatgaccacgtctcccgagaagccggcaatcgcaaggagggcgctaaccagaataacgttaggagcggagaggggagtcaggaaaccgaggaagtaaccaatgacagtggtactgatgacaccgcctaggaaaccttcccatgtcttgttcggacttactttcggaagaatcttatgccgtccgagaagtttgccccagataaattgcatgatatcattgatttccgtaaggaatacaaggaacaacagcagaccccgtcctccggaactgaatcccggtagttcgggaagcgacaggagataagcgaggtggctgataccgaataccgaaagcatcagaatccattgcaagagtgccattgacttggtgattccgtgtgtgtctccctttaaaaccagccgtaaaggcaatacgaggaacatgactaccggaatgaagatgatgaatgctccataccaggcaaggtaagccagataatattgaatggggatagacagtatgccccaaaacagtgctccgcgatctgcctctctgaatcccaatacagaataaagttctctgaaagcaatgaaagagagaaaggcaaggaagaaataagaaatgttatagctgataaatacagcgccgataaacatacccgccataatccaccatgagcgcgtgcgtgcggcgagttcgctgatatttgttttcggagatatcttttttacgaggaaaagaataaggcttgccgtaacaagcaatccgatgataagcgagatgacaataatcagttcatcgcttaatgtagggaatattttatccagtagatttttcattttatttcagtgtttgttgtgtgtgacatgaggtacaggcgatgtatcagtgtcgcgataagaccgatgttgataatgattagagcgatgaagcataccatccggtcgtatcctgaatggatggtgcaggtggcgactacaaaggtcagtgtcagcaatgccatgcggtgttgtttggccatcggaccattaaagaaatgctgatgtgttttataggctcctatccagcggaaataagctgtcataacagcaagaagggcgcccagccatcccaattcgactccgaatccacctgctacatacccgacgggaatgatgaataatgcatcggcaaaacggtcgggcatatcgttataaagatctccgttggcgcttttctttcctccttcaatggcaaccatcccatcgaacaggttgcagagcaaccgcgactgcatacaaacgatgaacagaatataggctacatatttattgaagccgggataaataactgtgccaatcagcaggaggcaacctatcatagcgaagaatacactcatcatggaaatttgattgggagtgacaccccaacgagttagtttgcgggcaatgttattagcccaggccgtgtttcgcgaggctatttcccgccttccgtcgacttcgtttttcatatttgtgatatgtttatgattcgcaaatatacacatcatctgatgagtggcaaaggaataagggagaattttgaaaggactctttttttctgccggataaaaaaaagttcaagtcatttatggaatcagtgtgaaatctgcatctctatagtaaaagcgaactattagtaacattttaaataatgaagttatgaaaacaaatcaattcagagcaatgatgctcgtactgctgatggcagttgtttctttagggatggtgaacgcgcaagctattaccgtgtcgggtactgtgacggatgcaaaggatggaactccgcttgttggctgttcggtacagataaagggtactacgaaaggtacagtaacgaatatgaatggccggtacacgatacaggctaagaaaggggaaacgttgttgtttcagtatatcgggtataagcaagagagaagggtggtaaaatcggccacgctggatgtgaagatgaaagctgacgaactggtattggaagaatgtgtggtggtaggatacggccatgagacaagagctgcaaaagtaatgtctactgcttacaaggcagtatgtccgactccgggaatcatgtatgatgctgcaaatgcggaagaatacggagagtttcaggagaatggtttcaagagtgtgtcggatgctccgctttctactttctctattgatgtagacgccgcttcttatagtaatatgcgtcgttttatcaataaaggtgaactgcctccggttgatgctatccgtacggaagaattagtgaactacttttcttatgattatccgaagccgacaggaagtgatcctgtgaaaattacgatggaatccggagcctgtccctggaacacaaaccatcgtcttgtacgtatcggcctgaaagcaaaagaaatcccgacggataatctgcctgcatctaatctggtattcctgattgatgtctccggttctatgtggggagccaaccggttggatttggtgaagtcatctctcaaattattggtaaataacttacgtgataaagataaagtagcgattgtgacttattcaggcagtgccggtgtgaaactggaagcaactccgggtagcgacaaacagaagattcgcgaagcgatagatgaattaacggcgggtggctctacggcaggtggtgcaggtatcttgttagcgtataaaatagccaagaagaatctgatctctaacggcaataaccgtatcatactttgctccgatggtgattttaatgtgggcgtttcttccgctgaaggattggaacaattgattgaaaaagagcgcaagagtggagtattccttaccgtactgggttatggcatgggtaattataaagataagaagattcaggtgttggctgaaaagggaaatggcaatcatgcttatatagataacttgcaggaggccaaccgtgttttggtaggcgaattcggtgctacgctgcatacagtggcaaaagacgtcaaactgcaagtcgaatttaatccttcccaagtgcaggcatatcgtctggttggttacgaaagtcgtctgttgaaagacgaggactttaataatgatgctaaagatgccggagatatgggtgcgggacatacagtgacagccttttacgaagtgattcctacgggagtaaagaatgaatatgtaggtaaaatagacgacttgaaatatcagaagaaagagaaagtgtccgtgaagccgacaggctctaatgaactcctgactgtgaaactgcgttataaagccccggataaagatgtcagcaagaaactggaacttcctttcatagataataaaggaaataatgtttcttccgatttccgctttgcttctgcagtggctatgttcggacagttactccgggagtctgactttaaaggaaatgccagttatgacaaagtgattgatctggccaaacagggactgaataatgacgataaaggatatagaagagaattcattcgtttggttgaggctgctaaaggattggaaagaacaaataagaactaggaaagcaaacaggagtcattggaaatgtacatcatattattatgcgtaatattcactgatatgaataaacgtacaattccagatagataatcctaaaaaataatagtgacggtatatgctcgggatagtgacgctatcactgttgtataccgtcactatctttgccggataccgtcactataattaatttcgtccgaaattcgtctgacctaaaacgaaaaatagccataaacttatcgtttacagctatttaactctgcacgggaggagaggctcgaactcccgacacccggttttggagaccggtgctctaccaactgagctactcccgtgtttgcggctgcaaaggtagtagaaacttctgaatctccaaacattcgggtaaataagttttgaattattttaatttttcccactcatcgggcttgaaaccgaccagaacgaagctgtctgtcactaccaatgggcgtttcaccaatttaccgttcgttgccaagagtgctatctgttcttcctcactcatagcaggcagcttctcgcttagtttcagctctttatatactaatccgctcgtgttgaagaatttcttcaccggtaaaccgctacgtggaatccatgcttttaattcttcaactgtaggattttcttctacaattaatcggtttgtaaactcaatgttattttctgttaaccatttcttggctttctggcatgtgctgcatgccgggtactgcaaaaataatgttgccatattcatttataatttaattcttactatgtaatacttaatacttaacacttaatacttgatacttaatacttaccacttaaacctcacctcaatatctgcaaatcctgaaacataatccggtaagcggctgctttcttatccaacgccagtggatatgctcttgatgatgaaggcatccggtaaagccgcatggcgcgtccttcaaaaacgaactcggagtaatcgcctactttcggctcttctatttcgaattgctgtcggagagtgtccgttgctttttgcccggtagtgacgatggctttgcattcgggaagttgtcgcagcaatgctgctacatcggtagcctccactacttcgagaaacttatccgatgcgttatcctgcaaccggcggatggatgaagcggtatcaaacagggcaattcccttttcgttcaaaaagtctatgatttgctcacgacaaaacgattttagtgttgaattcagaaagtgattcttatcattaaagaataagattccgtatatacgccacatgtcattgtttaggtttggataataaaaatccatcgaccatctttttttctgtggcgggaaactgcccagcataagcaattttgatttcgctgggagaaatggttctagcggatgtgtttcgatttccatgttatcgttcattttaatttcgtacaaaaatagtgataatgtttatttccctcaaaatcaatgagaaaaaatgctagatttaaaatatttagttatttttgcggtgtgatgaacaaacagtatcttattatatcattgaaaaaagaaattttagtaagttgtttcttaatgagcttatttttcctggagggtgggaattgttatgcttcggagcaacaactgttaagagggacgatagaaactccttctgacaattataccgtgagagggcgtgttatggatgtctatggtgaaccactaatcggtgctacaatacgagagaaagggggagccaatggtactgtgaccgatattgatggacgattctttttatctgttccggatagtgctgtcttgcaggtttcttttgtaggttacaaaactttagaagtcaatgtgacaggtcggactatgcttgaaatacgccttcaggaagacgcggtgatgcttgatcatgtcatcgtaacagccttgggaattgaaaaggatgaagctacactggcttattctgcgcagaaaatcaaaggtgaggaactaaatcgtataaaagaaataaatatgattactgccctggcgggaaaagcagccggtgtacaaatcaataaaaactcttccggtatgggagggtctgccaaagtcagtctccggggaatccgttcggtgtccggtgataatcaaccgctgtatgtgatagacggagtgccgatgtcgaatacctcttccgagcaggcttattcggcaattggaggtacggcgaatgccggcaaccgtgatggaggagatgggatttctaacctgaacccggaagatgtggaaagcatcagtatcttgaaaggtgctccagcagcagctttatatggtagcatggctgctaacggggtcattcttatcactactaaaaaaggaaattctgtcgggcaaaggaatattaatttctctacgggactaactttcgagaaagcattcagcctgcctaaaatgcaggatcgttacggtgtcagtgatgtggtagacagctggggtgagaaagataatctgacggctcatgataacctgaatgattttttccgtaccggattgacctcaatgacttctgtgtccgtcagctatggaaatgaaactctacaaacttatttctcctatgccaacaccaccggaaaggggattatggataaaaacaagctgaagaaacataatataaacctacgcgaaacagctaccatgttcaacaaacgtctgaaactggatggtaatgtgaatgtaatgaaacagactgttgagaataagccggtatcgggaggcttttatatgaatccgttggtagggctttatcgttttcctcgtggtgagaatctgtcttattataaagaccattttgaaacctatgacgaagaacggaatttgaatgtgcaaaactggcatacatttaccgaagacttcgaacagaatccatattggatagtgaaccgtatacaaagtaaagaaacgcgtacgcgcattatcctttccctttcggcaaactttaagataaatgattggttgacgattcaagctcgtggcaacatggattactgggctgacaagttgcgtcagaaattctatgcgtctaccgctactgccctgtgtggagcgaacggtcgatatattgaaatggattatcaggaaacgcagatgtatggtgatgtcatggcgatgtttaagaaaacctggggagattttacactggatgcggctattggcggtagtataaatgatcgaatcagaaactcgacccgttatgattccaagaatgcttctctgaagtttgctaatgtatttaatattgccaatatcatcatgaacagttctgccagtattgaccagaaaatagatgagcatcgtcagcttcaatctattttcggtacagcacagattggctacaaggaaaaattatttcttgatttgacagctcgtaatgactgggcatcaaccttggcttatactgaacatgagaaagcgggatttgcttatccttccgttggtctttccatattgcttgataaatgggtgaagctgcccgaatggatttcttttgcgaaactgcgtggtgcctatagtaaagtggggaacgatattcctgtatttgtcactaattccgcttcgcatatcagtgccggtggcgagatacaggcaaatgatgccgctcctttcaaagatatggagccggaaatgactcatgccatggaattcggaacggaatggagattcttccaacatcggttaggaatcaatctgacctattatcgtaccaacacttataatcagttcttcaaacttcctgctcttgcaggtgacaagtatgctttccgatatgtaaatgctgggaatatccaaaaccaaggatgggaagtgacactgaacggaactccgatactgacttctgatttcacctggaaaacttccatcaacttctctaccaacaagaataagatcgtgaagctgcacgacgagttgaaagaattggtctacggacctacgagcttttcttccagttatgcaatgaaactggtgaaaggtggttctatcggtgatatctatggtaaagcctttgtgcgtgatgccgcaggaaacattgtttatgaaacagaaggagattacaaaggacttccattggtggaaggtgacggaaatacggtgaaagtaggaaatgccaaccctgtctttatgatgggatgggatcacacattctcttacaaaggattcagcctttatttcctgcttgactggcgttacggaggaaaagtcctttcgcagacacaagcggaaatggatctctatggcgtatcggaaattacggctgatgcacgcgacagaggatatgtgatgcttgaaggtcagcagatcgataatgtgaaaggattctataaaaatgtagtgggcgggcgtgccggagtgacagagtattatatgtatgatgccactaatttacggttacgcgaagtatcgttgagctacaatttctcaaagaagtggatacaaaaaacgaaggttctgaaagatgtgcagctttcgtttgtggcccgcaatctatgtttcttatataagaaagctccttttgatccggatttggtactttccaccgggaatgataaccaagggattgaagtattcggaatgcctacgacccgtagtttgggctttactctgaaatgtgaattttaaaggtaggagagagaaatgaagagaaaatatgtatatttatacttgctgggcttactgctcttttctgtagcatgtaccggtaatttccgtgattacaataccgacttgtccggaatcacggatgatgacctgattattgacgacaatggttatggaatccgtttgggcattattcagcagggtatttattttaattatgatttcggaaaagggaagaactggcctttccagctgatacagaatctgaacgcagatatgtttggtggatatatgcatgacggtaaacccttgaacggaggttcgcataattccgactataatatgcaggatggttggaacagcgccatgtggacgcatatgtattcttatattttcccgcagatataccaatcggagaatgctacccggaatacacatcctgctttgttcgggatcacgaaaatattaaaggtagaagccatgcatcgtgtgacggattattatggtcccatcatttataagaattttgcgaatgcagaaaaccactaccgtcctgataaacaaaaagatgtttattatgagtttttcaatgaactcgattctgccgtggttgccctcaccggttatatagaggagaaaccggaattcaatggatttgcacgttttgatattttgttggatggtaaatacccttcctgggtaaagtttgccaattcgttgcgtttgcgtctagctatgcgtattgcctctgttgcccccgataaggcacgtgctgaaatacagaaaataaaagaaaacgattacggcttctttgaagcggaaacaggcggagctgttgtttctaccaaatccggatataccaatccattgggagaacttaatcgtgtgtggaatgaaacttacatgagtgcgaatatggaatcaatcttggtgggatataatgatccccgtcttggaatttatttcgaactctgtacggatgaaaccctgaaaggacaatatcgtggaattcgtcaggggacatgttttgctcatagtcattattccggattgtcgaagctgtttgtcaagcaaagcaccgatgcgcctctgatgactgcttcggaagtttggtttctgcgtgccgaagctgcattgcgcgggtggacggatgaagatgaagaaacctgttatcagaacggtgtaactacttctttccatcaatggggaatctatggcgtagaagattatctgcaaagtgaacagaccgcctccgactttatagacacgtatgatgaagaaaataatatagaggcccgttgtaaagtctctcccaaatggaatccgctggatgataaggaaacgaaactggagaagatcattacgcagaagtggattgctatgtttccggaaggttgcgaagcttgggcagaacaaagacgaacagggtatccccgtttatttcccgtacgattcaaccatagcagaaacggttctatcgacacggagattatggtgcgccgtctaaacttccccggtaccttacagacggaagacccggaacaatattccgcgcttgtggaagctttaggaggaaacgatcatggaggtacaaggctttggtgggacacgggaaataataacctggaataaaaaaagataaaagtagtgtgtttatatgtgtagctttaactatttttgcatcttcatttaaacacatttacttatgaaacagattatctctgctcttttcctttgtatgttgctctctgccgtaccgggattgcaggcgcaaaacatccagttacattatgattttggacgttctttgtatgataaagatttgcaaggtcgtccgctgttaacttccacagtagagaagtttcatcctgatacttggggaagtacttatttctttgtcgatatggattatacctccgaaggtgtcgctgctgcttattgggaaatagcccgtgaagtgaaattctggaaaggtcctttctctgcgcatcttgaatataacggtggattatccaaaggtatgtcttataaaaatgcttatctggcaggagccacgtatacctttaataatgcttctttttccaaaggcttcacactgaccgccatgtataagtatattcagaaacactcatcacccaacaacttccagttgacaggtacatggtacgtaaacttctgccgtaacctgctcactttctccggctttgccgactggtggcgtgaagaaacgaactacggaaagactatcttcctctccgaaccacaattttgggtaaacctgaatcaaatcaagggagtaaataaaaacttcaatctaagcgttggctccgaagtcgaattgagcaataacttcggtggtcgcgatggcttttatgtgatcccgacgcttgctctgaaatggacgctgaactaaaaaaatcgaaccaaaaatcgaaccaaaaaacggattaaaaagcgagttaaaagaaatagagtaaaaagaagtcaggctaaaagaatccgaacttcagaggaatctccgtttatccctttgtggaacttacaaaatatatagaacaacctattaaatgaaaactgatttaatctacggcgtagaagaccgtcccccttttaaagacgccctgtttgcggctttacaacatctcttggctattttcgtggcaattatcacaccgccgcttatcatagcgagtgccttgaaactggatgtagaaaagacaagctttctagtttccatgtccctttttgcttcgggagtatctacctttatacaatgccgtcgtttcggtccgataggagcaaagctgctctgcatccagggaaccagtttttcttttatcggtcctatcatcgccacaggaatggtaggcggattgccgttgattttcggttcctgtatggctgccgcacctatcgaaatgattgtcagccgcacattcaaatatttgcgtaatatcatcactccgctggtttccggtattgtcgtactgcttatcggattgagcctgataaaagtaggtatcgtatcttgcggaggtggatatgcagctatggataacggtacgtttgctacctggaaaaacctgtctattgcagcactggtacttcttagcgtcttatttttcaaccgttgtgggaacaaatacctgcgcatgagttccattgtactcggactttgtctgggttatggtttggcatttgttttgggaaaagtggatatgagtgcattgaatgtagaaatgctgatgagctttaatattccccaaccttttaaatatggtgttgatttcaatgtgtcttctttcatagccattggtctggtctacctgataactgccatcgaagcaacaggtgacgtgactgccaactctatgatttccggacttcccattgaaggagattcctatttgaaacgagtttccggtggagtaatggcagatggattcaattccttcctcgctggtatattcaactctttccccaactccatctttgcacagaataacggtattatccaactgaccggagtagccagccgctatgtcggttattatatcgcagcaatgctcgttcttttgggattatttcccattgtaggtgccgtattctccttaatgcccgatcctgtattgggtggtgcaaccttactaatgttcggtacagtagcagcggcaggaatccgtattatctcctcacaagaaataggccgtaaagaaactctggtattagcagtcagcctttccttaggcctaggagtagaattaatgccggacgtattacaacaagccccggaagcaattcgaagtatcttctcttcagggatcaccaccggaggcctaactgcaattatagcaaatatagtaatacgtgtaaaagaatgatgaataagtattaagtattaaccgacaagtatcaatcaacaagtttaagtattaatcgacaagtatcaaatagcaggtattatccagcagcttcggtaatacttattacttaatacttagtacttattacttatttctaaattactcattttatcagtagtgcggaaggggaaatcaggatactcgtaaagactgaagcgaggttcggtttctcctttcgtataattccagatagaagcataatcttccggatcttctcccatcttggctaattggcgcagataagcggccagtgatttattttctacgatgtaaatctgtcccatctggtcgataatcgggctatgatgacgagtgccgtcatgttcgaagcgtagaatccgttttccttcttccgttagtcctaccaattggaaggtcatactcttaccgatagccggtaaattcaatacactgcgatccgtagcaaggaaaggcaaatgatgttttctcatgaaacgtcttaattgcttggcaacatcttctttcgtctcctcttccgttccgactttcgtctctaatattttgtataattcctccgcctgttccggtgtcatccgaccataaatcttttcctcctgttgttcctgcatcgaacggctgttgggagcaaatactgcataattctcattgaatcccttcaccgagaaagtataataacataccacccccaatgaattgagcacctggcgaagccgtgtcgtatgtccccgacgcgaagcagccactgtatataccaactgattcgtgataatccatccggcagaaagaatcttccgaatcgcctctttagcttcaggcgtaacctccagcggtgtttgaaaatgagtctggataataaactgtttcacccctatagccgaagccttttctttgaattcccgcaaaatatccaccagcccgtcattgatacgcatcggcaaataagccaataaccgtgaccccagccgtacccgttgcaattccgcatatttctctccttccggtcgttcgagatttgccttctgcttgcgtaccgccatccgatacaccgcatccaaaatattctgaagcgtcttattttgactcatcagcgcatcgccccctgtaatcagaatatcccgcaactgtgtatcctcctcaaaataagtcatcaaccggcgcaacttacgatcccatgactccttcgggcgtaaagactcaaactcgaaattcaaccgttcgctttggaaatcatacatccgctggcaagaagcacaaagtcccccgcaagcccgtcccatcgtgtcaggaatgagaatagccacctccggataccggcgatgaatattatgtccgtccggcaaaagccatcccgcagcattaggtttaccaacctccacaatatcctccttttcccacgcacgaatatttccatacgtctccaccaatcgtggcgaatacagaatataactccggatagcctcatcattatacccatatcctgtaatattgagtagcgataaataataaggagtcgcaaaaaacggcattcccttcttccgtgcccgataaagcaaatacatcgtctccgaagaaagagaattccccaagaaccgattcagttctcccggactcttcacagccatcgccaaatgaaagcggaaatcattccaccactcactcaccaacctgtatttctcctcataactcattccctcctcaaagtggaaacgcaccgaaggcttcgacttcctgttctcaatcttctgaatcagcaagtgcaacatccgctccttattttcatcccgtatctcccgtacctcttcatccagtccggtttcccaccggtcattccgacttttgatacgctgcggtgacggcaaaggcataacttctcccttcaaccgtttaaacatctgaaaaatttcaataaacaaatccgtcggcatctccatattctccaacgtctccgtcagaaactcataaagcagccgaatagtctgtactgacatatcctgtcccgtagacagttcatgaacattctgcccatcataatcaagtaagagtcgaatttgctccctcgcctcctccgcagcttcgttttctatcctgcaagtctccaacaaccgcagtattccagccttgaaatcctcaacagtagagctcttatccgctatctccactatctccggaatctcctgaccatagatttgtttcaactgtgaaaaagtaagtgtaagcattttcttttgtttcataagcaatctatcaatttttaaattatataataagcattttaagtttgaacgacctcccttcccccccgaactatatgtctcaaatcccgaacagcatttcatcccctaagtatcctccatccataacctaccaacataatcatcaaagcgcaacataatacacaatcacaccgcatagcactctacactgcatagcactccacgccgcatggcctcccggcctcgtctgcacggcgtcaagcggaggtttcattcccggcgttaagaagggcagactgtttgagcgaagcgagtttctgccctttagccggggatgaaaccggagtagccgggcagacgcagccttgattttttctttttggtactttttcttttgtatcaagacaaaagaaaaaagtacataaagataacaaaaaaagcggaagtacaaaacccccgctttctctatcatattaatctttacgcttttctaacatttaacgcgacttatttttttgtttccgtgtcgtcatccttccgtttcggttccttcttggcaagtagaacgatattatacacataatccgtcatccactgctccgagtatcccagacgctctttgtattggcggatagccgcagccgtcttatgcacatcatccgctttccataccattttggtgcaaacatcatgcaccgtcttctgcgtcatgccatacagagcctttttaaagatcgacggcatacggaacttccactgcatcagatttcccatcaacatcatcagatcattagaaaatccctgatacatgaacaaataagattgaatatcattttgagtgcggcagttacgttttacggaagcgtcgatttccttgaagaaattctcattcaggccataatcctgcattagcattttgcgtgacgcagacttttcggccaatcccagtttaccgttttgagtaggcactttaaacaaacgtttgaagttagctacgtccggcaagaatcggatattggtgatacctaagtttgtggcgatcactgactggaaatacacccgggtcagtgaaatgaaatcttctacattgccgactttcgtttcatcggattttttcttgaataaaccaaataagcccattgttatatttacaattttacaatttacaatttactatttgagtgcgtggaaggtatataatataactaccatctgtcaatttccgtgcaaaggtacaaaaacagttggttttcaccaacattccaagtccttttcgatgtccggcatagactctttcttaaaaacaggactttggataccggctttcttttgcgcccggtaatcatttaacaggcggatcgcatattttccaaggaagaggatagcgatcagattgcagatagccattaatgccatagtgacatctgccaagctccataccatatccaatgtggcaagtgaaccgaagagcaccataccgcctactaatatcctgtaaccatgaagcacccacttccggtgagtgataaagcggatattggcctccccgtaataataatttcccagaatactgctgaaagcgaaaaagaaaagagccacagcaacgaagacgctgcccgaagaaccgatctcgttcgtcaatgcctgttgagtcaactgcactccattggtcgatccatccagcggagcaccactaaacagaatgataaaagccgtacaagtacaaatcaataatgtatccgtaaatactgccaaagtctgtatcaatccttgtttcgcgggatgactgacatgagccgtggcagccgcattcggagccgatcccataccggcctcattgctgaagagccctctcttgataccttgtatcaatgccatgccgactcctcctgccagtgcctgttcccagccgaaagcatgactgataatcagagcgatgacacccggtaaatgagtgatattgagtataacaatcaccagcgccagccccacatatcccaatgccataaccggcacgataatgctgctgacacgggcaatgcgttgaatacctccgaagatgataaccaacgtcagcaatgtcagtacccctcccaatataatatgattgaccccgaaagcatgctccgcagcagcacagatggtattgctctgtacagaattgaaagcaaaaccgaaagtgatgcttattaatatggcaaaaagcattcccatccacggttgcttcaatcccttcttcatataataagcaggacctccgatgaatgaatcctttccgcgtattttgtataattgccctaaggtagactcgatgaaagcactcgaagcccctaacagtgcgatgacccacatccagaaaatagctccgggaccgccgatagcgatggcggtagccactcccgcaagatttcccgtacccacacggctggcgatagagatagcgaatgcctgaaaagaagatacatgtttctctccctgcttccctttgcccgcagattcgcttaacagtacgatcatttcgcgaatcatgcggaattgtacgaagcgtgtccgtatactgaaccagacagcacatcccaataacatgataatcagaatataggtccagagtatgtcgttaatctcgttgataaaggtcatagttaagtattaagtattgtttgtggttattcgttttttattcggaagtagaatttatgattttcgaatacgggttccacaatatcataacgaacaaatttggcgagcagatgttcagcggcacgtcgtgaaagtccggtttggcgacagtagcggttgagtgaaagtaaagtgccatgctccagttgttcgagcaggagctgttcacgttcggtgtaacggatcagttcgccacgggggctgtcgctctgttgccatacacggagatgtataggtgttgccagaatattttcatccttgatgcggagataggctagaggtttcccggtttcgtctttggcgtaaaccggtttatgcggagtttcttcgatggtcgctaccaacacttgccgtccctccactatatatgtttgcaatgtgtattccacttccggcacgcaataaagttgtgcggcggcttcaatcatatatttttcttcttcggagcgtactcccgcgatttttccattgtcttttacgccaataagtaatcttcctccgtccgtgttggcaaaagccgagagtgttttggcaattttgcgtgcgtcggaaatttcgaatttaaagtcctgttgctggtgctccccttcagcaatcaatgcatgtatataatcggtatctgtaagcagtttcatggctacaaaggtaggtaaaaatggtgaaaagccccttttttagatatttttcgaagaatatttcaaaaaaaatattgattttatgcttttatttcgggaaacagtgtatttttgcggcacattattaacgaaaaaaataaaaggattatgaaagaattggtagaaaaggtagcagctctgtatgctgacttctcaaaagatgctaacgcacagatcgaaaacggtaacaaagcagcaggaactcgcgctcgtaaagcttctttggaaatcgaaaaagcaatgaaagaattccgtaaagcatctttggaagcttctaagaaataatttagaagactactaagatatcgaaaaggggctgtctaaacttgttagacagcctcttttattataatacatgaaaatatatacacgaactttaaacttcttcgcacaccaccattttcatcccttgataaacgactataattttgtgcagcgtcgttgttccgattgctttttgcaccgtttcactggcggcatagcggttggcttgtgtgatagcctcttgccggagttgctccaccttttcgtcactatcctttcctttggcatacttcagttcgataatgtaggaatggagcatatctttataaatatccagtaagggaaacatgaaaatgtcggcatatccttcctgattctcctgttcggagatggggcgatagaaacggttctgtgcggtcatagccaacgtaaatccatgtacgtatgcttcgcctttttgcttgtctctctgggaagaatatcggtgc

SEQ ID NO: 8170 - DNA, 13679 bp, Unknown
  gut microbiota DNA sequence
cgtactgtcatatccggagacaacacctgcctgcaacaactggtagcccgtttcataacgttccatctctaccattcctgcgctgcattgcgtcacattgacaatcacaattccacgttcgctggcctgacaaagccgacgtatgaaccattccttccggggagcatttcccgaaccgtatgtttcgagcacgacagccttcaatccgtcaatccccagaatggcggcaatcacattttcctggatgcccgggaagagtttcagtaccacaacattggtatctagcagataatgaggcttcaattcccgctcttcaccatttacgtgaatctgcacattattatatttgatatggattccggcttccgccaataccgggtaattgaaagaacggaacgcgttgaagttttccgcattcatcttggttgtgcggtttccccgcatcagatgattttcaaagaagatgcacacttccggtacgagcgccctcccttccttgttttgtgcgacggcaatctcgatgctggtcatcagattttcctttccgtccgtgcggagtacacctatgggaagttgtgaacctgtgaggataacaggtttatcgagcccttcgagcataaaacttaatgcggaagcagtgtaagccattgtatccgttccgtgcaggatgacgaagccgtggtagcggtcgtaattttcatgaatgatgcgtaccagcttccgccacatatccggttccatgtccgacgaatccattggaggatcaaactgataggtgtcaatcgggaagttgaacttttgcagttcggggatatacttttgcagttgctcgaagttaaagttctccagagcacctgtcgcggcattctcgatcatgccaattgttccaccggtgtatattagcaatacggaagtatttaatggattcataagctgattttgtgcgattgttttcgcaaatataataatatatttgatatataagtagcaaaatgtcataaaagtaaaggcggatgacaggacgaatagaagacggaagattctttttatcagaaaaaaaccgaaaaaagtgatagattgaacgtttttattattacttttgcgacacttatcaaaaacaagagtagaaacaaggactatgatgaagtactatccacatacagtcacatccatgtgtaccatgacccttaggggttaatggatagtttttgtgtatctacgtgattcacgcttgtataagcaggcaaaattcaatttcaattttattcgtaaacaaccaatcgttctgtaaaaagtaaactgcaggacattgcatttaaataagtatcttcatgaaagtaatgaaattcggcgggacgtccgtaggttccgtgaacagcattttaagcgtaaagagaattgtagagtcggcaagtgagccggtaattgtagttgtttccgcattgggaggcatcactgacaaattgataaatacatcaaagatggcggcagcaggagattcagcctatgagggcgagttccgcgaaatcgtttaccgtcatgtggagatgattaaggaggtgattcctgccggagaaaagcaagtgtcgttgcaacgtcagattggcgaattgctgaacgagttgaaggacatctttcagggaatttatctgattagagacctttccgcgaagacttcggatacaatcgtcagctatggtgaacgcctttcatccatcatcgttaccgaactgattgacggagcaaaatggttcgattcgcgcacttttatcaagaccgaaagaaaacatagtaaacatacgctggataccgacctgactaataagttggtgaaagaggctttccagtctatccctaaagtgtcactggtgccgggattcatctcttcggataaaacgacaggagatgtgacgaacctcggacgtggtggatcggactatacagctgccattattgctgcggctctggatgcggcaagtctggaaatctggacggatgtagacgggtttatgacggctgacccgcgtgtcatttcaactgcttataccattacggaattgagttatgtagaagcgaccgaactttgtaacttcggtgcaaaggtggtttatccgccgactatctatcccgtatgtcacaagaatattcctattataataaagaataccttcaatccggacggagtgggaacggttatcaaacaagaagtttccaacccgcagagcaaggctatcaaaggtatttcctccatcaacgacaccagcctgataactgttcagggactcggtatggtaggggtgatcggtgtaaactaccgcatctttaaagcattggctaagaacggaatcagcgtattcctcgtgtcgcaggcttcatcggaaaacagtacttctatcggtgtgcgtaatgccgatgccgacttggcttgtgaagtgctgaacgaggaatttgcgaaagaaatagagatgggcgagatttctccgattcttgcggaaagagatttagctactgttgctatcgtaggcgagaatatgaaacataccccgggtatcgccggtaaacttttcggtacgctgggacgcaacggtatcaacgtaattgcctgtgcgcagggagcttcagaaacaaatatctcttttgtggtcgattccaaatctctgcgtaaatccctgaacgttattcacgactctttcttcctctccgaatatcaggtactgaatctctttatctgcggtgtcggtacggtaggtggcagtctcgtagaacagattcgttgccaacagcagaaactcatgatggaaaacggattgaaactccatgtggtaggtatcattgatgctgctaaagcaatgttcagccgtgaaggtttcgacctttctaatttccgtcaggaactgttggaaaagggtaaagacagtagtctgcaaaccatccgcgacgagattatcggaatgaacatctttaactccgtctttgtagactgtacggccagcgccgatatcgcatcgctttacaaagatttcttgcaacacaatatctctgtggtagcagccaacaagattgccgcttcttccgcttacgaaaactatcgcgaactgaaaatgattgcccgccaacgtggtgtgaaatatctgttcgaaacaaacgtaggtgcaggtcttccgattattaatacgatcaacgacctgattcatagcggcgacaagattctgaagattgaagcagtgctttcaggcacactgaactacatctttaataagatcagcgccgatattcctttcagccgtaccatcaaaatggcacaggaagaacgctactccgaaccggacccgcgtatcgacttgagtggaaaagacgtcatccgtaaactggtgattctggcacgtgaagccggataccgtctggaacaggaagatgttgaaaagaacctctttgtccccaatgacttcttcgaaggttctctggaagatttctggaaacgtgttccaagtctcgatgcagactttgaagcccgccgccaagtattggagaaagaaaataaacactggcgtttcgttgccaaactggagaacggaaaagcctctgtcggcttacaggaagtaggcgccaaccacccgttctacggcttggaaggcagcaacaacattatcctgcttactacagaacgctataaagaatatccgatgatgattcagggatacggcgccggcgccggagtaacggctgccggagtatttgccgacatcatgagtatcgcaaacgtttaattaaatgaagaactaaaaatgaagaatgaagaattactatgcagcgtaatggtgcagccaattcttcattcatcattcttcattcttaattttcaaaagaaatgaagcatatcattatattgggagacggaatggccgactggccagtgaagtcattaggggacaagacgctcctgcaatatgcgaagacgccatatatggatcagttagcccgaatggggcgtaacggccgcctgattaccgtggcggaaggtttccatccgggtagtgaagtagccaacatgtcagtgttgggatataatcttccgaaagtgtacgaaggtcgtggaccgctggaagctgccagtatcggcgtggatttgaaaccgggcgagatggcaatgcgttgtaacctgatttgtgtggaaggagaaattctgaagaatcactcctccggacacatatctacagaagaagcggacgtattgattcaatacctgcaagagaaactaggcaatgaccgcgtacggttccacacaggagtccagtaccgtcatctgttggttatcaagggaggaaataaagaattggactgtactcctccgcacgatgttcctttgaaacctttccgcccattgatggtgaaaccattggccccggaagcacaagaaacggcagacctgattaacgacctgattctaaaatcacaggaactgttgaagaatcatccgttgaacctgaaacgtatagctgaaggcaaagaccccgccaatagtatttggccctggagccccggttatcgtccgcagatgactactttttccgaaactttcccgcaagtgaaaaaaggtgcggtgatttcggctgtcgatctgataaatggaatcggttattatgccggattacgtcgtattgtggtagaaggggcaaccggcctgtataatacgaattatgaaaataaagtggctgctgcattggaagccttgaaaaccgatgactttgtctatcttcatatcgaagccagcgatgaggccggacacgaaggagacatcgacttgaaacttctcactatcgagaatctggataaacgtgccgtaggacctatctacgaagcagtgaaagattgggatgaaccggtagcaatagccgtattgcctgaccatcctactccctgcgaacttcgtacgcacacttccgatcctatcccgttccttatctggtatccgggaattgagccggacgaggtgcaaacttatgacgaaatatctgcctgcaacggtagttacggtgtgttgaaagaagacgagtttattaaagaatttatgaaataatgttcaccacagattacacagattcgcacagatttaaagtgataagagacttttgtattatgtaataatagagaaaatatctgtgtaaatctgtataatctgtggtgagcactaaaaatatcattccatgaaatattatagtacgaataaacaagcgccggtggcttctttacaggaagcagttgtaaaaggtcttgcagccgataaagggttgtttatgcctatgtctatcaagcctcttccacaagagttttacgatacaattgatacgttgtcttttcaggaaatagcttatcgtgtagccgatgctttcttcggtgaggatattcctgccgacaccctgaaacagattgtatatgataccttaagttttgatgtacctttggtgaaagtagcggataacatctactcgctcgaacttttccacggaccgacactagccttcaaagatgtaggcggtcgtttcatggcgcgtctgctgggatacttcattaagaaggaaggacaaaagaatgtaaatgtactggtagccacttccggtgatacgggaagtgctgtggctaacggttttctgggtgtggacggtattcatgtatatgtgctctatccgaaaggaaaagtcagcgaaatacaggaaaaacaattcactacactgggacagaacatcactgcgctcgaagtggacggaacgtttgatgactgccaggcattggtaaaagctgctttcatggataaggaactgaatgaacatctatcattgacttctgccaattccatcaatgtagcccgtttcctgccgcaagcattttattatttctatgcatacgctcaactgaagcgtgccggaaaagcagataacgccgtcatctgcgtacctagcggaaacttcggaaatatcaccgcaggattattcggaaagaaaatgggattgcctgtgaagcgtttcattgctgccaacaaccgcaacgatattttctatcaatatctgcaaacaggtaaatacaatccccgtccgtctattgcaacaattgctaacgccatggacgtgggagatcctagcaactttgcccgtgtacttgatttgtataatggttcgcacgctgctatctctgccgaaatttcaggaacaacttataccgacgaacagatccgtgaaacggtgaaagaaacttggaaagaacatcactacctgctcgatcctcatggagcttgcggataccgtgcgttggtagaaggcttgaaggaaggcgaaacgggtgtattccttgaaacggctcatccggccaagttccttgaaacagtagaaagcattatcggtgaatcagtagagatacctgccaagttgcaggaatttatgaaaggcgagaagaagagtttgcaaatgacgaaagagtttgcagatttcaagagctatttactttcattgtagtcagtcataatagactgtaaaacagtggcctatgaagcgttgtcagtctgttgaaatgaaagaaagattctcaccgcaatgagaaaaagttctcattactatgagtattttttctcatcgcagtgagaattttttctcatagtgatgagaatgtttgagaattaatatcggtttacatagaagctagaaacactaaatactctcctgtgcattgaatggtaaaacgattgcttgtagcttcattaagagttccttgccaccaattcgtaaagtcgctaagcggataaaccaatccttcccctttcaatcctttcgctccgaaattgataatggatacttgctgcccggtgtgggaaacgaaagtctgcgtgccatttgcgggaataaataccccgtaatccgtaacagttcgtacttccataccgcttttcatatagtccagcaataaactgatatttcctaatgtgtggtcttcccgttttccggtagcaccgacgatggctattctccggtagcctttttcttgcaggaagtggacagccttggtttggtcgtttgtttcctgatcggctatatggtgaataatgtccgaaaagcgtgttttgttttccggcgaaagagagtctccgtcgccaataataatatcgggagtatgtccacgtaagatatattcgttggctgctccatcgcaacaaatcacgaattgagcctcttccagtattttcaggggaagcacatgcataggatattcgccgttggcaagtatgacggcttcgggagtatagtgttcacttatcattgtacgctcattaattttttccatttaaagtagccaaagatagctataatggagtaaagtccgtataaagcagaagtaaaataaaggtctttgtagatataaagtccgcagcagacaatatccacaagaatccaggcaaaccattgctcgacgtatttgcgtgccagcatccacatgccgacaatgctcaatgccgtagtaaaactatccagccagggcacgttgctgtccgtatattcgatcagtatccatgcaatgccgataaatgcaacaataaataccagaaaaagaggtaagtaacatttccatggagtatgcacgataggaaggtctttgggtttgtcaccggttgaagcatctgccgactgttgacctttcttctttctgtgtccccacatccagaagaaccaaccgtagatggcagctatcagatagtagatattgataccgaaatcggcatacagtcctgctttgtaatatacgaagatatagatggcaggcatcacaatacctgctatccaaaggtagatacttgcccggtactccaaccaaaggtagactagcccgacaatcgtaccgaatatttccagaaaattcaattccatagccctgtggtattaaaagcggaaagaaacatgtcccataacgtttgttcctgcctgcgctgcatatccggcatagtttccccgattctccaccgtatcggtgtagtcgctcgaggcccaaccgttgttttcatatttttcattaaacagattgtacacagtgaaccctaccgtgacttctttcaacaccttcttgggacggaaggagtacgccagattgaggttactgacaaaatatttatcaagagtcaatgcttcaacttccgcatttgtcatatactgcttgcttacgaactgcgattgcagagctgcttcgaatcccttataaatgaatgagaagcggttattaaatagaaagtcgggtgagaaagcgatgtgagtgtctttatgcttgatctgaacagttgggagagaagtagagctaccgtcgtcattatagtggtagcccggcaggctttctacaaaattctggatgcggtttttgctccatgtagcgtttatatcccattgaaaccatttacacggtttgattcccagcattagctcgactcccatacgataactgtccggcacgttttcggtcagtgcttcaccgatgtcatttaaagctccggtcagaaccagttggtcggtataatccatgtagtagaagtttgcacctgctgtcagccattggttggcgaaagtatatcccgcttcatagtcgagtaatttttctgctttgggatacgaatccggatcgccatccgtataattgtttctggtcggttccttttgagcaaccgagaaagaggcataaacgcgatggttggacgtgatgttccagtttaatcctactttcgggttaaagaaatcgaacttcttgtctactgccagtggacgcagggaatttttgctccagtcatatttatcattgttgccgtcgatggtatagtcgatgtgtcgatactgaagatcggcatacgcgcttaactcgctggtgagatcgtagtttgctttcagataaatattaccatcggtctttttggatttattgcggtaatattcatggtcgggagatagagtgcccacataattcttcacccagggaactcttccgaagttattgccccggtattgattcaaaccacctcctagagacgcattcagcctgttgactgtataattgagagaaaaaacgccgccaccgaatttgttgtccatcttcttctgacggactaaatcacttttggttatttcggttccatcaattgtgaatggtttcaggccatattctataagggatctgccgtctttgtactcttcgtaatagccgtcgcctttggtataatgcaaggcaacattcagattccaggctgttgagaaagtatgattgaagagaagttgataattcttttgcagataattatcagtttggtcgtcataaaaatgcttgttgccgttggcgtcggtgtacatctcgccacaggggttgtagcgtctgccgaagtcctccatttcctttttggttgcgtatccccaggcgtgatatgtcttttctttcccggcaaatgcaatcagcttcacggatgtgttttctgcaaaataacctccttgcagatagtaagaatttaggtctaccgaagcgcggtctatgtatccgtccgtaccgatgttggaaagacgagcgtcaaacgtccaatgattattgagcaaaccggttcccactttcaccgtttctttgtgcgtgttgaatgaaccgtatgaaccgttgaattcggcatacggcttcatggatgcaccttcagtctgcatattaacgctggctccgaaggcacctgccccgttggtagacgtacctgcgcctcgttgcacttgcatatcttttacggaggaagaaaagtcgggcatatttacccagaacagattatggctttcagcatcgttcatcggtatgccgtttaccgtgatgttgatgcgtgtgccgtcggttccgcgcacgcgaagggtcgtgtagccgatacctgctcctgcatccgatgtagtcagcgtagaaggagtcatgcttaacagataagggatgtcctgtccgaagttaaccttcttcaattccgctttgcctatattggtgaatgctacgggagttttggcggtggcacgcgtggatactacctgcacttcttgcaggtttactactctcatactatcctttacactcgtctgtgcatgaacagtgatgcctacgcccgataaggcgatggccatccatacaatttttttcatcttgcttactaattagttctctacgccggcattacccggatcagattctatgggtatgttctcagcccgtcatgttaaggcacccctaccagtgaatcggttacaaaaatactgcttttgcaggaggaaagcaaaaaaaacttttagattcactaaaaacaatataactttgtaaattgttgaaataacaaaactgtatttattcacttaatatatatatttaattatgctactattattgcaagcaacacaagctgcggattccgtgcaagtggccgcagatgaattaatgaaagaagcgattgccaatgccgacggattggacaaactctcgctgattactcaacaactgatagacttcggtatccgtgccggcgaacgtatattgattgcggtccttgtctttgtcgtcggacgtttccttatttcgctgctcaacaagtttatcagacgtctgatggataaacgaaaagtggatgtaagtatcaaaactttcgttaaaagtctggtcaatattctgttgacaatcctgttaatcatttctgtcgttggcgctctgggagttgaaaccacttcgttcgcagctttattggcttctgccggtgtggctgtcggtatggctttatccggcaatctgcagaactttgctgggggactggttattcttttgttcaaaccttataaggtcggtgactggatagaaacacagcaaggttcagccggtacagtaaaagaaattcagatattccataccatccttactactgcggataataaactgatttatatacccaatggttcattgagcagtggggtagttaccaactacagtcatcaggaaacccgccgtgtagaatggattattggtatagattatggagaagattatgagaaagtacagaaaatcgtttatgaaattcttgctgctgataaacgcatcctgaaagaaccggctccctttgtagctcttcatgcgctggacgccagcagtgtgaatgtagtggcacgtgtatgggtaaatagcggagattactggggtgtttatttcgatataaataaagcgatttacgaaaccttcaatgaaaaaggtatcaacttccctttcccacaacttacagtacatcagggaaattaattattatacgctgattattccaaaaaaaacgagggagtttcacattgagtggagctctctcgttttttggaaaacttgtctggtgtgattgaataaatttctttcttttatttaatgccgaaatcttcggctagttcatatctatcttctttgattcccagtacatgattgatctttcttcttttctcaagatctttaaagtagttttccacaacctgatagagatcgaaattagtggttgagcctgcggctaaatcgagtgattccaccatcttttctacggcttgatggattttctctgcgtctatcagatgcagttcgttgctgtgtattaaatatttttccatgactgcaatgtttttaatgttatataggtataacatctcgtagtcatggaaagttcaatgattgaatgttagattttggcaagtgcctgatccaaatcagcaatcaggtcatcaatatgttctgttccaatggataggcgtacggtgcccggataaatttcctgttcggctagctcctgtgcattgagttgcgaatgggtagtgctcgccgggtggatcaccaatgatttcacgtcggccacattggccagcagggagaaaatctccagactgtcgatgaaccggtgtgcctcttcttgtccgccttttacctcgaaagtaaagatagaaccggcaccgttcgggaaataacgttgatacagtgcatggtcgggatggttggataatgacgggtgattcactttcttcacttttggatgattgtttaagaaattcactaccttcaatgcattttctacatgacgctctacacgtaaggaaagagtttctaggccttgcagcaggataaaagcgttgaatgggctgatggtagctcctgtgtcgcgcagcaaaatggcccggatgcggattgcataggcagccggaccggctgcatcgacgaagcgtacgccatgatagcatggatcgggttcggtcagttgtgggaatttgccggaagctacccagtcgaatttacctgaatctacaataactcctcccaatgaagaaccgtgtccgccaatgaactttgttgcggaatgtactacgatatctgctccgtgttcgatggggcggattaaatacggagttccgaatgtgttatcaataatcaaaggtattttgtggcggtgggcaatttctgccactgcttctatatcaatgatatttgaatttggatttcccaaagtttcgataaatatggcttttgtattttcctgaatagctttttcgaagttcgacaaatcgcttggatcaacgaatgttgttgtgataccatagctgggcaaggtatgagccagtaggttataacttcctccgtaaatggttttggctgctacaatatgatcgcctgcacgagtgatattctcgaaagcataagtaatggcagcggcacccgaagcgactgccagtcctgctacccctccttcaagggcggctacgcgttgttcaaagactccttgagtggagttggtcagacggccgtagatgtttcccgggtcctgcaggccgaagcgtgcggctgcatgggcggagttgtgaaatacataagaggtggtctggtaaataggtactgcgcgggcatctgttgccgggtctgcttgttcttgtcctacatgaacctgtaaagtctcgaagtgtaatttctttgttgccataatcgtatgttttttaagtttatattcttcctttattttcttgcaaagttatgagatgtagatatatcgaacaagatataggtgaaatatagaaaataatgctatttttgtgtcgttatatggaataatgtaactgcgttattcctgaaaatcaccttttagaagaatatttttcttatggatacttttgataagctggataaagtagatttgcaaatactccgtactttgcaagagaatgcccgattgacaacgaaagagttggctgcgcgggtgagtctttcttcaactcctgtttttgaacgcctgaaacggttggagaatggaggttatataaagaagtatattgccgtattggatgcggagaaactgaatcagggatttgtcgtgttctgcagtgtgaagcttagacgtctgaacagggatatagcggcagagtttacacggatcatacaggatattcctgaagtaaccgaatgttataacatatcgggaagttatgattatctgttgaagattcacgctcccaatatgaaatattatcaggagtttattctgaatgtgttggggacgattgatagtttgggatcactggaaagtacatttgtgatggcagaagtgaagcatcaatatggaatacatatttagtgggaacattttagcgttaatt

SEQ ID NO: 8171 - DNA, 5016 bp, Unknown
  gut microbiota DNA sequence
agcaaaggagcttcgcgcctcctgtgaggctatcaaattgataaaggcctatatcgtttatcaggatttggagaaggccaaagaaactatagataacgcccgcgacacctttacacgcggaaaataagtaatcattatgctaaagataaagacgaacaaaggttatctggatttagggggagactttaccgtacagattgatgaaaaatcccctgtcatgaacgaccggggatcgcaaaccgtaccggttacggttccatgtaccggcaacaatgctaaaataaccggttttgctcaccgtctcgacatgggtataaagccgatgaatgaagatcaggcatgtacggtattggacggagcatataaacgtaccgggaagataaatattgtttccgccggtaaaaaagaaggtattacccttaacatcggctttgacaattcggaagcctacagcgcatggaaagcaaaaaaattaaatgctattacattaccagtgaaggagtatagcagcgttaattctctttgcgcacatttgcaacaagttttaggaggttatcagactgattatgccgtatttcagattatgaccggtaacgattcgaaagataatcagttttaccctaaatacttgaactatatcacacctgtatcagaaggaagcaaagtttatcggttacgttatcaagcaagaacagaaacttttttagtaaatggaactccgactgcagtaacacttccggaaggttacggcgtgacagcctttttatatgtatggcgtgtactggaacttgttttttccgaatttggatatacaataatggaaaatccttttaaaacagataaacaactttataacttggtaatcctgaataatgcggccgactgttgtgttaaaggaaaactttcttacgcggatttgatgccggattgtacggtcgaggactttttaaacgccctttatgtgcgtttcggactggtttataatgtttcttccgatacgaaaacggccactttaagactgatccgggatattgtggatgatgttccggacattgatttatcccgtagcctgacagacgaacctttaataacttatgaaacggcccggcaaatgaagttatcggccaaaacttcctttaccggtgcggccccctctgttgaaagacttgaagattacttgaaagatcagaaagtcgcaaggttaactaaagttgatgtatctaaaagggtgatacatctaaattatgaggaaacaacaggacggtggtttaaatgggatgaagataataaccgccttacttattcttcatcgagtttcttttcctgggatcggaaaaccgacaatatcgaagataacgaattaaccagcgacgacgaatgcgttccaatggattttgccccgaatgatattctttcccctcaatatcttgctgattacgtgcaccgttacacgtatcttaaaacttcctctaataataacgatgaagactcggagaaggtggaaacaccgttatccttcgtgtttgcgtttacgtcttcccaaaatagtaaatatcctttcggttctgtgttaccttacacctctgacgccgaagaggttatattaagagacggaagcaagcatacaatgtcgctattttttcaatatgataatggcctgttttttaacttctggaggaaatacgacgctatattaagacattcattcaataagatagaggcaaacgttttgttaccggttcaccggcttacgggtatggatatcttaacaccggtaatacttcgaggacaatatttactttttgacgggctttcttattctcttccggcaaataagattgtacccgttgatctgacattaagaacactccggttgattggtccgtacgatttggataaggaacaggaaacacccgtttttggttccaggctttttacgtgggaatttataagttcaaatatagaaacagccaaagaaaatgaaaggaacaggattttacaacaggcgagggatgaatggaacaaaaggccgaccgctgtgaacgaaatgaaatcaataacttactcgcttgacggatatacaactcgtaatgatgataaatacttggttgaaaactatccccaggaagcgggaattacattacaaaggaactataaatgtaaagcgacagcaataataagtatttactacgagcctggaagttttactcccggtacatatcgggatgttacgtatgaatccgaatttgaatatacagatacttttgtttctgttgtctattccggttaatcccgtcctttattcttcctttgataaacccaacttttgcaccatggaaaagcagaataacatcatccttgccccgtcttcttcacaggtgacggagctttataagctttggagggaaaaccatgcggggcggctctcggacttttacaagttcctgacgtctcccacggatcagcgcgaccgtttcctctccgggcttgaaaataagagtgagtttaacggaatattcatcgttaacacctttgaattatgagtttgacagcaagcatcgacccgacggaaaacgcctttaccagaaatccagtctatctttcggtagaaactacttctatggtgacgtataatattatgcactgtttaaactttgaataccggaggtctttatttaccggcaacggtaacggaagtttcaaggtaaatattgccgaagttctggaaacagtgtttgaggatatccccgttttaagtggaagtagtgatatattgataaacctttcctccggctggtacaacaaggctactatcatgattatcatgcagaatgaagaagcggaaacggaaaccctggttttagccgcctggcgtggaggtatcggcaaacgggcttttaagaagctgcatgaagagggtaataatatcttttccttgaagtttctgaatgaatcctgtaatttcttctttaccacccggagcaacgactggcgtataacgatgcgcgagacggagctttacccgctctgtttcatctatccggagcatgagctgaaaataacggaacttcttaccgggcaaagccttgcagtgccaggccgggtagagaacttttgcgccttgaacctggaggccgtaagacttaaattctttaccgattacggggtactgggcaacctttttgacgtgtatagcggtgaaacgttcgcctgccggatcgggatcgagcaaagcccgacggtccgcgagcattaccggctccggttcctgaacagttacggggtttacgaggtgttttccctggaaggcgaggcgagcgtaactcccggcatggatgaagacgaagacgctgttttccggcgttacgatgaaattaccgatgattattattcggatcgcatacggacggagatacaggaagtcgtaacgattaagacgggattcaaacgcccgcaggaaatacgctttcttcttgacctgctttcctccgatgatgtctacctggcaggttacggccgggaagagatcaaagtaattccttcggcggaagagttttcttaccgtgtccgtccggacgcgccgcagaacgtgacgttaaagctcacgtttgccgacaaggagtccaactggacgggagaaatcacggaaagcggctaccggaaaccgcgggttcattccaaagagttcagcaaacaatttaattaatgtatctatatggcaacacaggagtatatcgatgatcttattatagtcattgaaaccgcggaggacgcggaaagcgttactaaccaaatggtggcggcggttcttggcttcttgaacgaacacctgaaactggtttcccagggtaaggaagtcgaggcggaggaagccgcccgcattgccgccgatgcagcattacagaaggctatagacgccgtttctttacgtatcgaccgacttgtcggtaacaacgcttcgcaggcaatcgacaactttaacgagattcttaattttctgaacgggcttaaagacagtgattcgcttgccgcattgctggctgatattaacgcccgtatcggcagtgaagacggttcggagagtgaagacggttccctttggggaaaactgaaaagtttgtcccaggatataaccagttgttccgatgacataagcacattgcagatagaccgtgacaaaatgaaacaggggttacaggaaacggacgggcgtctgtcttccacctttaccaatgtaaacaaccttttgaacgccggtaccgtttatagtgatctgtcgggggtatttgcagcattgaaaacggcgggaaagattaacaatgtacggaaaaacggtgtaatcctttcttttcttactgccgacggctgggtgacgaaacaatttagaggtaatccggacacggattttgaaaatgtcgaaaagtgggaggatttcggcagcggcggttcggccggcgggaatacttataacgtaaccggtaacataccacttgcagaaggtttctatactcttgcttccgccattgccgcggtaccggaaaaacaacgcggccgggggcgtgttatcacctttgaaacatcgctcggcaaatgggagacgtggcaatttaccggaaccgatccggctgtctgggatcaggaggcgagctgggaagagttcggcggcaaaggaacggtaaagagtgtaacggtaaacggcgagaagcagacgccggacgcggccggtaatgtgaatgtaaacgtggatatcctggaagtggacgaaactttgtccgcggattccaccaatccggtagaaaacaaggtagtaaccgcccgttttaacgaggtggacgcttccacgctgtttaatgtaaatgcggaggtaagcgaggatgaaacatccgtccgtctgtctttccagaacaaaagcggcgcggaaattaccgctgtggatatcccggccggttccggtggaggttccggagaaacggtggctactaaaattgtcttaaatgcggctgtagataatgcgat

SEQ ID NO: 8172 - DNA, 21983 bp, Unknown
  gut microbiota DNA sequence
tataattgagacacagcatataatgggaagatttatcaatccctttaccgattttggctttaagtttttattcggcagagaggtagaaaaggagttgttaatcgacttcttgaacgatttgctcgtaggcgagcacgtaatcaccgacatcaggttccttaacaacgaacagccgccggaagtaaaaacagaacgaggtcttatctacgacatctattgcgtaaccgataccggtgaacgtattatcgtagaaatgcagaaccgggaacagccttattttaaagatcgtgccctcttctatctttctagggccattacgcagcaagcgaaaaggggagtttggaacttccagttggatgccgtgtacggagtgttcttcatgaatttcgtgatggataaggatatgccctctaaaatcagaacggatgtcgttctttctgacagggatacggggaagctcttcagcaacaagttccggcagatttttatcgaactaccgaacttcaacaaagaagaggatgaatgtgaaaatgattttgaacgctggatttatatactaaagcatatggatacacttgaccggatgcctttcaaggctcgcaaggccgtcttcgagcgacttgaaaagttggcttccaaagcaaatatgacccaggaggaaagagcccagtatgaagaagaatggaaagtttataacgattattttaatacgttggactttgctgaacagaagggcttacagaaaggcttacaaaaaggattacagaaaggtttgcaaaaaggtaaagaagaaacagctcgtaatttgaaagaattaggtgtggctgacgatattattatgaaatctaccgggctttcgaaagaagaaatagaaaaattataatttctttcattccattggaaagaaaggcttgtcgaaagtgaaaaaatagtctataacttatgaagcaaaagatagttgtggagacttttaacacatccttttttcgctaagagtaaagtatctaaaaactatatatgtctttggggtaaaataaacggatttggaatattatccacgttaaaatcagaaaaaagttttccgttttggaaaactttctgtatcagcaagaaagaatagtttcccgaaatttaatgttaaaagctaaccaagctatgatataatctcctatctttgtatccggtttcggaactaaaaagaggtttagtcaatgagggaacgctgtgcaaatcggcgacagtacccgctgctgtaattctctaagaatccgcacaataggccactgcatcgatgccggtgtgggaaggtgttgcgggggagggataagtcagaagacctgccgaagagattttctatttttaatttattaatgctttcgggagttaaagttatgaactacgcggaaatttgtatcatcaaacgtgatggtaaaagagaagatttctctatcagtaagattaagaatgcaatcagtaaagcattcagtgcaagtggaattcaggatgagcagcagttggttgctgacatcaccatgaatgttatcagtcagtttgctacccccacgatcaccgtagaagagattcaggacttggtagaaaagtcgttgatgaaagtgcggccggaagtagcgaagaaatacatcatctatcgcgaatggcggaatacggagcgtgataagaaaacccagatgaaacaggtgatggacggtattgtggctatcgacaagaacgatgtcaatttgagcaacgccaacatgagcagtcacacgcctgccggacagatgatgacgttcgcttccgaagtaactaaagattatacctataaatacttgttgccgaaacgttttgccgaagcgcaccagttgggagacattcacatccacgacctggattattatccgacaaagacgacaacctgcattcaatatgatatggatgacctctttgaacgcggttttcgcacaaagaacggtagcatccgcaccccgcaaagcatccaaagctatgctacgctggctaccatcatctttcagaccaaccaaaatgagcagcatggcggacaggcgattccggctttcgacttcttcatggcaaaaggagtggctaaatcttttcgcaagcatctggcatcgttcatcaacttctatgtggctatggaaaacggaaatcaggccgatgaaaaatccatccgcacgttgattaaagaataccttccgtctatcaagtccaccgaggccgaacgcgaaacattgcgcatcgctctggtcgctttacagatcattatagataaggaacaccttgcccgcatcgtcgaaaaagcctaccagcagacccgtaaagatacacatcaggcaatggaaggattcatccacaacctgaatacgatgcattctcgtggcggtaaccaagtggtattcagttccatcaactacggaacggacacttctgccgaaggccgcatggtgatcgaagaactgctgaaagctaccattgaaggcctcggcaccagaggagaagtgcccgtattccccatccagatattcaaggtgaaagacggcgtttcttactcggagaaagactttgagaaagcaatgaaagcggagaacatcgaagcggcaatgaccgacagttacgaggctcccaacttcgacttgttattaaaggcttgccagactactgcgaaagcgttgttcccgaacttcatgttcctcgacacacctttcaaccagaacgagaaatggaaagccgacgatccgcagcgttacatttacgaattggcaacaatgggctgccgtacccgtgtttttgaaaatgtggccggagaaaaatcttctttaggacgtggcaatctttcgttcaccacactgaatatgccaagactggctatcgaagcccgtatcaaagcggaaaatctggtagaggatgaacgcaacaaggacgccatcgaacaaaaggcaaaagaaattttcatcgaatccgtacaccaaatgtccgcgctcgtagccgaccagctttacgaacgttatcagtatcagcgtacggccttggcacgccagttcccgttcatgatgggaaataatgtgtggaaaggcggcggcgaactgaatccgaacgaacaggtaggagacgccttgcgcagcggtacactggggatcggatttatcggcgggcataacgcgatggtggctctctacggacaaggtcacggacacagccagaaagcatgggacacgctgtatgaagcggtgatggaaatgaataaagtggtagacgaatataaagagaaatataacctgaactactccgttctggctactcctgccgaaggactttcgggacgtttcacgaaaatggaccgccggaaatatggaaaaatccccggagtgacagatcgcgactattatgtcaactctttccacgtagacgtgaaagaaccgatcagcatcgttgagaaaatcaagcgtgaagctccgttccacgctattacgcgcggcggacacatcacgtatgtggagctggacggtgaagcgcagaagaatgtgcgtgccattgccaagattgtgaaagtgatgcacgacgaaggaattggatacggctctatcaatcacccggtagacacttgtcataactgtggttacaagggagttatcttcgataaatgccctgtatgccagagtgaaagtattctccgtatgcgccgtatcaccggttatctgacgggcgatttaagctcttggaactctgccaagcgggcagaagagaaggaccgtgtaaaacatttgtagaataaatgtttgataattgatgaatggataatgaacggtgcttgatgaaagcgttacggttcattatccattattcggttattacttgcagcacgttactctcatcttgtactgttctgtaacgagtatttattccacatttatatggttatcatccattctcaaatcttcattttccattagctattaaagaagtgaatttactaggaacttattctgaaacgattgttgacggtgaaggtatcaggttttctatttatcttgccggctgctcccatcattgtcccggttgccacaacccggagagttggaatccgggagcaggagaagaactgacggaggagaaaatacagtccatcattcgtgaaatcaaagcgaatcctttgttggacggcgttactttttccggcggtgatccgttttttcatccggaagcgttcctgcttttgctgaaacgggtgaaagaggaaacagggatgaacgtgtggtgctacaccggatacacatacgaagaaattaaggcgcagcctcgtttgagtgccgctcttgattatattgatgtattggtggacggacgcttcgaacaggctcttttctctccatatctggagttcaggggaagcagtaatcagcggattttgaagctgaagtaaatgtaactcgacatttggagtaagttgaatccagtagttgagcactaaaaaaacttatttttcaaaggaaacaaaaacacctgtaccgttgttttgtttacctttacgaaaccaagtgaatcatttttcatcacagagtaacgcggcgcttttttgtagccggtggggcttgcgtctgtgtttgtgtctgcttgatggtgaagaaataaacgactacttacaagaataagtttttatggtacaaccaataaatccaactcaaaaaaacgatgagaccgatggcttgccaatgcctaaacgtatttgggcggtggtgtctgtcggctttgctctttgtatgtcagtactggatattaacatcgtcaatatcgtactacctacactttcgcatgattttgggacttctcccgctgtaaccacctggattatcaacggctatcagctggccatcgttatatcgctactgtctttttccgctttgggtgaaatcatcggttaccggaaagtctttctttcgggcatcggactgttttgcgtcacttcattgatctgtgccttgtccgattcgttttggactttgacggttgcccgtatctttcaagggttcagcgcttccgccatcactagtgtgaatacggcacagctgcgttacatctatccgaagagccagatcgggcgggggatggggatcaatgcaatggtagtcgccatatcggctgccgccggaccatctgtggcgagcggtattctttccattgccagttggcactggttgtttgccatcaatgtgccgttgggactcactgcattgcttctcggcatcaaacatctgccacgacaggaggagcgtacgaaacgtaaattcgattacatcagtgccatcgcgaatgcggtcactttcggtctgctcatttacacgctggacggatttgcccaccatgagaaaatggacttccttttcattcaactgattgtgttggcagtggtcggtacctactacgtgcgccggcaactgacgcagaccactccgctgctccctcttgatctgctgcggattccgattttccggctgtccatcctgacttccatctgttctttcatagcacaaatgacagcgatggtttctttgccttttttcctccagaacactttgggacacagcgaagtcatgaccggacttctactcacaccgtggccgttggctacgcttgtcacggctccgttggcaggatatcttgtcgagcgcatccaccccggtatcttgggaagtgtcgggatggctctgtttgctgtcgggcttttctcgctttccagtctgactgcggagtcgtccgatattagtatcatactgcgtttgatgctgtgtggtgcaggattcggattgttccagacaccgaacaacagtacgattatctcttccgctcctacgcaacgttcgggcggagccagtggtatgttgggaatggcccgcctgttgggacagaccaccgggacaacattggtcgcattgcttttcagctttgtcgctcatgaccggagtacggctgtctgccttatggtaggaagtggatttgctgttgtggcggctatcgtcagcagcttgagactatcgcagccttccactctataaaaaaagtatcccggatgagagaggagtgaatacctgttctcatccgggattgttttttatgtttttcttctgtcgtttggtctgttagaagaagaaccttagaatatcgttgaagttagcccatatcaacagaccgaagagtagaatcataccggtcatttgagcgtattccataaatttgtcgctcggtttgcggcgcgctatcatctcgtagaagaggaagagcacgtggccgccgtccaatgcggggatagggaggatattcatgaaagccagaatgatggaaaggaaggctgtcatataccagaactggtgccaatcccatgtagcagggaagatactgccgattgttccgaagccacctagctgtttggctccttctttcgaaaagaggtatttcatgtttcctacatatcctttcagggtttttacgccgagggagacacctgccgggaaggattcgaagaaagtatattcttttttcaccatagggagcaggcggtctgtgacgagacaggcggttacacccatcaggtaggcggagtctacacgcatattcaatgtgtcggttacgccgccacgcacataggtcagtgtaatcaggcgcggatctatgctgtctttgagcagggtttccgcgtttttcttacgttctgccatcgcttctttgaagtcggagaaagaaatcggtgttccgttcagggcgataatgctgtcgcctggttggatgcctgcttgtgcggcaggagaattcaccatcacactgtctatcacatacgggaaacggtaggaggcaaaacggatgctgtctgccagaagacgttgcatcaagtcttcagggatataaacggaggctttcgcgccgttgcggataacgcttacttcgcgggcgtcggcaatctggctcaacatatcgccgtcataacgttcaaaaggaacgccgtcggcagaaagaaggatgtcgccgtcctgaaaacctacggatttggctgtttcgttgaaatccataccgagaggagcttcctgcacctttatatattggtcgccccacgcaaatagaatcatcgagtagatgaacagggccaacaggaagttgaacagtacgccacccaccatgattagcagacgttgccacgccggtttggaacggaactcccacggttgttcgggttgtttcatctgctcggtatccatcgactcgtcaatcataccggctatcttgacataaccgcccaatggcagccaacctactgcatattctgtgtcacttttcttgggcttgaatttaaacagggtgaaccaggggtcaaaaaataagcagaatttttctacacgcaccttaaacaaacgggcaaaaagaaaatgcccgccttcatgaatgataacgagcaaagataagctcataatcaattgcagggcacgaatcaaaaatgtttccatatagtctatttacaatttaaagccttcactggattctctgccaaagagaagatataaaggctattttcaatttatattaatactaatcaatttctctattttctttatttctctacgaaatgaattatatcagacttgctgctatctttcttgcttccgcatcggtagccacataatcatcgtaggtcgggttggcaatgaaggtaacccgttccattgttttttctatcacgtcgctcatgccgaggaagctgatgccgtctttcaggaaagaggctaccactacttcattggcggcattaacgatgcaaggcatgttccctccgcgatacatcgcttcgtaggcgagtgccagattgcggaaacgtttcgtgtcgggttgctcaaacgtcaggttcgtgcatttggagaaatcgagcctgtcgaaagaagaactgatacggtcgggataggagaatgcatactggatgggcaggcgcatatcgggcatgcccaactgtgcttttacagctccgtcttcaaactgcaccatcgagtgaatgactgattgcggatgcacaaccacctcaatctgactaggttgaacaccgaacagccatttggcttcgatcacttcaaaacctttattcatcatagaagcagaatcaatcgtgatttttgctcccatttcccaattgggatgttttaaggcctgtgtcttagtcacggacttcaattgttccaaagtgtaagtgcggaacggacctccggaggcagtcaatatcactttctcaatcggattgcccacttctcccgctaaacactgaaaaacggcggagtgttcagagtctaccggcagaatcggagtgcgatattgttgtgccagctggttaatcagttcacctgctactaccaatgtttctttatttgccaacgcaatcgctttcttggcgcggatcgcgttgattgtcggcttcagtccggcataaccgaccatggctgtcaataccatatcaataggacccgcttccacaatctgacagatagcgtcggtccctgcatacaccttgataggcaggtcgctcaatgcttctttcagttcggaatacttttcttcgttggctatcactaccacttccggctggaacttccgtgcctgggcaatcagtagttccacacgattgttggctgtcagtgcgtatgcttcgtacaggtcgggatgctcttcgatgacttgcaaagcctgcgtcccgatagaacctgtggagcctagaatagctatttgttttttctttttattagtctctatattcattttatctatttcttcctattttgttgacaaacatatcatcgctgattatcacttatatctcatcactcgccatatcttatcattcatcattgataacctaaaaaacaatgtatttttccggattcaccgggtgacctttataccaaagttcgaagtgcaggtgcggccctgtactaagtgttccgctatttcctaccagggcgatggcttcgcctcctttcacccgttcaccttcctttttcaggagagagccgcagtgtttgtagatcgaaattaaatcctggttgtgttgcacgccaatcagataaccggtttcagcggtgtatgtactaaggatgacggttccgtccatggttgccagtacgctttcgttgggattggcggcaatgtcagtgccgtaatgtttcttttcggcattgaagtggtcggacaccatgcctcgtgtgggacggtataatattaatccggtcacgtccggttgggaagtgatggaggtcagattgtatttttcattctcctcatattggcggcggaattcttcttcccgcttggttcgttccatcaacgtgtcttcacgggcagcagtcagcgaatcaagcgtttgcacgctgtcgataggcactttcccgctgaaaatgtcctgaatgttcatgatgtagagattctgcttgttgagcacttgttgcaaagagtctacacgcagcgcattatctacaatctgtgtacggacttcactgttcatatatcccggaagataattgcgcaacggggtgaaagtaatgatgcaggaagcaatcaggaaaagcactgccagcacgcaaagtaaaacggatagtccattgagcttggatacacgaagtccgacaatttcttcaagtgtattttcattaacgatcgttagtttatacttgaacttgaaatttttccagaaagctttacttcgtcttctctttggcatctttggtaattaaagattaaaaattaaactattaaaaggggctgcggccggactaatctttgttttgccacggatgacacggcttcccagtgaattttgattaatgaaaaccgtggaatctgtgtcattcgtgcctgatttatccgggagctgtgtcatccgcgtccaactcctccagattgagtaacccttcgggaagttccacggtgatgagtttctgtttctgatctattcctacgataaattcctcttgggcgggaacgagtagttcctcttcttctctttcaaccacaaaaagggtgtttaccgtagtgttatctacatctatcacttctcccagaggtccgtgatgaatgtcttccatttggaaaccgataaagaagttccaggacaattcgccgtcttccgcttcttccgcatgctttacggggaagtaaacttcgatgttggtgaacattctggcacgttcggcggtgtctattccttccagttttaccaaagcggtggagtcggaacggaaacggtactcttcaatgaagaagggcacgaaaataccgtcgagcaggcatatcagataatcgcagtccacacggtcgaaaatgtcgtccgtaaacgtaaactgcaattcgccgtgaataccatgcggtttattgaataatcctatcttatatacttcttctttctttatcatattcgggtgattctggctccgatagcgttcagacgtccttcgatgttctgataaccacggtctatctgttcgatgttactaatggtactggttccttcggcgctcatggcggcaatcagaagggcgataccggcacgtatatccggtgaagtcaggcgggcaccgcgcaacttgaagccatgattgtgtccgatgactacggcacggtgagggtcgcagaggatgatctgtgcacccatatcgattagcttgtccacaaagaacaggcggctttcgaacatcttctgatggatcagtacgctgcctttggcttgtgtggctacaacgagcatcacactaagcaagtcgggagtcagtcccggccaggtggcgtcggctatcgtcatgatggagccgtcgatgaatgattctatctggtaggtttcctgtgcgggaacataaatgtcatctcctttctgttcgagcttgatgcccaggcggcggaagctctcggggatgattccaaggttctcgtaagaaacgttcttgatggtgatttcgctttttgtcatggctgccataccgataaaactgccgacttcaatcatatcgggcaatacggtgtgttgcgcgccatgcaattcttccacaccttcaatagtaagcaggttggaggcaattccgctgattttcgctcccatccggttgagcaaccggcagagttgttgcacgtaaggttcgcaggcagcgttgtagatggtagtagtgcctttggcaagcacggcagccattacgatattggctgttccggtgacggatgcttcgtccagcagcatatagcttccttgaagtctgtcggctgttatttcataaatgccccgtccttcatcataacggaagtccgctcctaaattctgaatacctacaaagtgagtatccaaacggcggcgaccgattttatctcctcccggcttggatatcaacgctttgccgaaacgtgccaccatagggccaatcagcatgacagagcctcgcagactggagcatttctttaaaaactcatcgctttccagatacgccaagtctacattctctgctttaaaactataagaatcaatgcctttctttgcaaccgtcactcccatctcgcgcaagagctgaatcaagttgttgacatcaagaatgtcaggtatattgttcaccgttacttcctctgcggttagcaatgtggcacagattatctgcaaaacttcgtttttagctccttgcgggtgaatctctccgcaaagccgatgtcctccttcgattacaaatgaagccattaattaaagtattaagtattaagtgtgattaaagtattaattatcaagtattaagtattaaccgtacggtatcgaacgttaagtaaataagtaaaagaaatccaaccagtgccaacaaatggctacgattaatacttaatactttatacttaatacttatttcctattttcttagtatcttctcttgttgttctgacgattattggtatagttcgtcttcggacgatagttctggttcaggcgttctgccatcagccggacgatatcgtcagtcatttggagttccccgttggagagttcgtacaggtcttcggcgatctttttgtcgtccactgtatctttgttccatgccaggtagtcctttttcatgtggttgcagatgagggcaatcaggtttctcttttcgtttccttcggggaattcgattgctttctttatcagcacttccagtgtgcgtccgtagtggcgataacgcatacgggcagtggagtaggggatcggatccgggcgggtcaccaggttgtccttacggatgatttcatacgggtagtcaatatccagctcaaaaccggacatgatagccaggtgatcccagagcttgtgcttgaagtcgggcacatcacgcagatgggggaacatatttcccataatgttgatgatggtgttagcacaacgctgacgttctgcacgatcctgaatggtcaacgcataatctaccatgttctggatgctacgcccgtattcgggaagcggcattcttttctgttgagtattgtattgcatttatttaattgaaagtttaaaattaaaaattaaagaagttttttcggcatggaagcaacgaattctttcaagtagaaaggttcgaagtaagccacgtctttataatcttcgtcggctattgctttttctgccagcgggaacatcattttagccaacgggtgaatattgtcgataaaatgtgcgttcggatgcgtaatctgttcgcggcatttgtcggccccgtttccaaagaaataaaccggctgctcgttcagaaactccaagtaagagttttcgtctacaatatcggcagctactgcacgtttcacctgaagtctgcggtcataaacggctgcgtatacttccatgcggcgggcgtcgatcatcggacaaagcaaagcgtcttcgggcaagtcgtgatacaacaacaccggaacagtcaatacttccagcgtcggaataccgatcaatgggacgttacgtccgtaacaaactcctttcgccatagaaaccccgattcgaagtccggtgtaagaacccggcccgcagctcactgcgactgcatccaaagggatggcatgactgtctatgaaagacaacgcttcatctacaaaaactcctaaagacacggcgtgtgaagggcctttcaaatcttctttcacaaaaatcgtctgtccgtcttgactggccgctaccgagcaaacagaggtagaggtttcaatattcagtatacacgacataaaaatcagcttattaaattgtcgcaaatttacatgattatttccaattcttaaaatattcgtgtacttttgcacaaaactttaaggttatgatacagtctatgacaggatacggcaaagctacggccgaacttcctgataaaaaaataaatgtagaaatcaagtcgctcaacagcaaggcaatggatttatccactcgcatcgctccggcgtatcgtgaaaaagagattgaaatccgtaatgagatttctaaagtgctggaacgtggaaaggtcgatttcagcctgtggatcgagaagaaagaggcggcagaaaatgcgactcctatcaatcaagtattggtggaaggttactacaaacagattttggcaatctcgcagaatcttggtatccctgttcctgccgactggtttcagacattgctccgtatgccggatgtgatgactaaaacggaaatccaggaactgaccgaagaggaatggaaaatggtgcatgccactgtgctcgatgctatcagtcatctagtagatttccgcaaacaggaaggtgctgcactggaaaaaaagttccgtgaaaagatcgccaatatctcaagcctgctcgaaaagattgctccttacgaaaaagaacgtgtggaaaaagtgaaagaacgcatcacggatgctctcgaaaagacattaagtgtggattacgacaagaaccgcttggagcaggaattgatctattacattgagaaactggatgtcaatgaagaaaaacaacgccttagcaaccatctgaaatatttcatcagtacaatggaaagcggtaacggacaaggtaagaaacttggttttatcgcccaggaaatgggtcgggaaatcaatacgttaggtagcaagtccaatcatgccgaaatgcagaaaatcgttgttcagatgaaagatgagttggagcagattaaggagcaggtgttgaacgtgatgtaatttactcacaataaattcatttacgataattcatttacgattagacgatttacgatgtgcgattgaagttagtattgcgaaataatagtgtacacatttgggtatttataaattcaaaaagtaatatcaaccgtacatcgtaaatcgtctaatcgtaaataacttaatgtcaaataaactttaataatgaccggtaaactaattattttctctgccccgtcaggttcgggcaaatctactattatcaattatctgctgacgcagaatttgaatcttgcgttttctatttctgctaccagccgtcctccgcgtgggacggagcagcacggagtggaatatttctttcttacgccggaggaattccgttgtcgcattgagaacaacgaatttttggagtatgaggaagtatataaggaccgttattacggaacgttgaaggcacaagtggaaaagcaactggaagcaggtcagaatgttgtgtttgacgttgatgtggtaggtggatgtaatatcaagaagttttatggtgaccgtgcgttgtcagtgttcattcaaccgccttcggtggaagaattacgttgccggttagaagggcgcggaacggatgccccggaaatcattgaaagccgtattgctaaggcggaatatgaattgggctttgctccgcaattcgattgtgtgattgtcaatgacgatttggaagcagcgaaggcagaagcgttgaaagtaatcaaagagtttttagccgaagaataagacttgagaatgtacaagaagaattgtaacacccgaaaatggatgtatctgtgtgccgtcaccggtgtgatgaatcttcttgcttttattgtatgcctttattttcaacaatggttcataagcggcattgcgctacttctcacaatcagacaagctattgttttaccgaagtggagaaagaaaataaagcaagaaagaatagcggaaaatgaatcaagttaaaacaagaaaaaccggaatcttcagcgggtcattcaatccgattcatatcgggcatctcgctttagccaattacctttgtgagtatgaagggttggatgaaatatggtttatggtaagtccgcagaatcctttgaaaacgaaggtagagttatggagcgacgagcttcgtcttcaattagtggagttatccatcagtgattatcctcgttttcgagcttcagactttgaatttcatttgccccgtccttcgtatagcgtatatacactggaaaaacttcgtgaaacgtatcctaaccgggaattttatttcattatcggttccgataattgggaacgttttggacgctggtatcagtccgaacgcatcattaaagagaatcaactcctcatttatcctcgtcccggctttccggtaaaagaagaggaattgccggaaaccgtgcgtctcgttcattcccctgtttttgaaatcagttccacttttattcgggaagccttgagtgcagggaaagatattcgttacttcctgcatccgagagcttgggaggctattaagaaagataatatacgcctttgaatatattataatatgtgtccggcagaatataacggataatttgtcagccactcttgttcccgataatctgacatggaaaaacggatgccatgtagttctggattcttttcaacaaaagaacgcagacttttcgactgtaaattttcttcagctttcacttcgaccggaataatacagatttctttttgcaaaaggaaatccaattctcctttggaagtatctgaagaccagtaatagatattcaagcctttcactgatttcagttgttgtaacacatattgttcggtaattgctcctttataatcggtaaataaaacattgccttccaataatgcttgtggggggagtccgctcattgctcccattaatccggtgtctagcataaacagtttgaatgcggaaaaatcttcgtaggccgataaaggtattccacctttctttacccggtttactttataaataagaccggcatctatcagccattctatggccagttcaaaatccttggctcttgctccttcttttataactccataaatgaatttgcgattttctttagccagttgtgcaggaaccgaacgccacaccatacgaatcctagggacttcggcaataggagcgtgtttggaaaaatcacggtcataagaatccagtatgttttgttgcaactggcggacttcggtatagtctttatgctcaataaatgcattgactacttcgggcattcctcctacgaaatagtactgtttaaggaagtcggtgaatttagaacggaaggtagaaatgaggttccaatcttgctttgcaagcaagctgacaaaagactcttgtccgatagcttctaaaaactcggaaaaagaaagtggatataggtctataaaatcgacttttcccaccgggaaagagtcattttgatgcatagcgatgcccagtaaagaaccagctgcaataacatgatactgtggcgctttctccaggaaatatttcatggctgtcaagccgcgtggggcttcctgaagttcgtcaaaaagaattaaggtatctgtatctactacttttccggttactaactggatagccatcaaaatacgttcgatatcaaaatctttttgaaaaacctctttcatcacttcattgtcttcgaagttgatgtaggcaaactgtttgtaagcagtagccgcaaactctttcataagccatgtctttcctacctgacgggctccgcgaataatcaaaggctttcgtgtagacttttctttccaatcgtacaattgttgcattgcatttcttctcatacttctttcttttattgtcagctacttataggtacaaatgtaagcactaaaaaggataataacaaaaagtcgtaccctaaaagtgtggtatttaacaaaaagttataccctaaaagtgtggtatgttacagaaagtcgtatcagaaaagtgtgtgatgttgctatttttgtttgttattgtaccaagtcacgataccttactccgtcaatcgatgaagagtaatgacgatgatttctgccggagcaccgacacggatcggtaactttgaagttcctattccgtttgttataatcaaaggaatttttgctgtattatatgccagtccggtgataaaacgattgccgtagtgtgagttcagtgccggggcgactccgaatacacggacttgtccgccgtgtgtatgtcctgcgagagcgaggtctgtattggctactgaaacatcttctatgtaatccggcgtatgaactagtaagatgacaaaatctttgggagagagtgccaaagtgggtgatactccgttgcgccccagatcgaaaggattgcgcactccggcgataataatctgctggccgtctttacgcagcgtgtctacttcgtgttctaacggacgcattccgtaatgtttcattgtgttcacaatatcgtcgtggcaacgttcgtaatcattattacccatcactccataggttcccattggtgtctttacacgtgcaagtgcggaaaacaaaggttttacatattcgcaaccttcctgataatcaccacccatcaaaagaacatctgctttttgggcaatcaataagcggacaaggtcgttcaatcctttctctttcagcaggcttttgtaatgtaaatcggaaatgaaagcgatgcggaaaccttcaaaagcttcaggtacatcgcggtgggtgaagtcgtattttactacacggtccactcctgtataaacagatgacacatctacgctggaagaggttatttgggttccacggagcatccggtcggattcgtacgcgtcggtatcagtctcctttttctttgtatgttgctttttgtttttagaaacagccagtgctttgagtttcgagtggtcgggagcgaacagtccggcaatggcgttagtcgtatccggataaatggaatcagtatgtaagacagggtgcggcaagctagtcaccatattctttttcgacttgcaggaaacaagcaaaagcaatgccaacaggataacagggtagattgttttcttcgtcagtggataaatcgttttcttcatcaatgggatatttatttttttcatcaatggggtatttattcttttcatcaatagggtatttattttctccatcacaggagcatttattttcttcatcttctcttagtttgaagttttctagggtgcaaagatacgaaaaatcatgtatctttgtccgtcaaaactctttataatatattaaagtatggaagaagtaaagcgtaactcgctacaagcatggatattagctgcacgtcccaaaactcttacaggagctattacccctgttctgataggtacagctctcgctgcgatggacggacattttcactggttgccggcactgatctgctgtctgttcgcaagtctgatgcaaattgccgctaatttcatcaatgaccttttcgacttcctcaaagggacagatcgggaagatcgcctgggacccgaacgtgcttgtgcacagggatggatttctccgcaagcgatgaaaaccgggattattattacggttgctcttgcctgtcttatcggttgcacattacttttctttgccggatgggaactgattgtcgtaggagtgttttgtgtattattcgcctttctttataccaccgggccttatcctctttcttacaacggctggggagatgtactggtgattgttttctttggatttgtgcctgttggcggaacatattacgtgcaagcgctaacatggacgccggatgtcactatcgcctctctgatttgtggactattgattgatacgctactggtagtcaataactaccgtgaccgggaagcggatgcgcgcagtggaaaaagaacggtaatcgttcgtttcggtgagaagttcggccgctatttttatttgatgctgggtgttacagcttcttttctctgtctgtgtttccttcgtgaaggtcattttttagccgctcttcttccgcaactctatttgattcctcatttcctcacctggaaacggatggtgaaaatatatagtggtaaaaaattaaacagcatattaggcgagacttcgcgtaatatgctgtttatgggtgttcttattgcaataggaatgttggtaagttgagaatcatttcccatacatcttttcgtagtaaccctgataatctccgctggtaacttcttccacccaagcttggttggccaagtaccattcgattgtctttacgataccgacttcgaattttgtttcgggataccatcctaaagcatttgtaatctttgtaggatcgatggcgtaacgttggtcatgtcccagacggtctttaacgaacgtaatcagatcttcattgatccagtcgatcgaaatatttccgttttcgtctttcaccttctttttgagaacctggcgatattcgggcttctctgccatcagacggtggatagttgaaatagtcagttttacgatttcgaggtttgtcttctcgttatgtccgccaacgttgtacacttctccgtctttaccttcacgtacaacgagatcaatcgctttgcagtgatcttctacataaagccagtcgcgtacattactgccgtcaccgtagacggggagatgttttccttcgaggatattcttgataatcaacggaatcaatttctccgggaaatggtacggaccatagttgtttgagcagcgggtaattgttaccggcattttataagtatcatggtaagccatcactaccatgtctgcgctagtcttagaagcactgtacgggctgtgaggacaaagcggggttgtttctgtgaaatacccttcggctcctagtgaaccatacacttcgtcggtggatacctgatgatagcgtacaccttttctccaggtagggtatccttgttcatcttttcccattacccatgcgcggcgtgcacaatccaataagttctgtgttccgagaatgttggtaatcagaaacagttgcggattttcaatgctgcggtcaacgtgactttcggcagcgaaattcaccacataatcaaaacgatactcagcaaaaagaccgtctaccacatcacggctacaaatgtctcctttgataaagacgcagcgttcgttgtcgatgtctttggcaatcgttcctaagttacctgcatacgtcaaagcatccaatatcacgactttgatgtcgttatgtttggccaagatgtatttgatgtaatttgccccgataaatcctgcggcaccggtcactagataagttttcatattttattctattatgttgattttaggattgttttgccaattcgataagatactttccgtactcggtcttttcgagttgttgacctaacagaagcaattgctccgtcggaatccatccctgacgccaggcgatttcttcaatacagctgacgtagaaaccttgccggttctgaatagtagccacgaagttggatgcttccagcagactgtcgcagttacccgtatccagccatgcaaatccgcggccgaagagttccactttcaatgtgccttcttccaggtacaggcgattcaggtctgtaatctcatattctccacgtgctgaaggacgaagagctgctgctttttccgtcacactggcatcatagaaatagagtccgggaacggcataattacttttcggcatttccggtttttcttccagtgaaataactttcccttgttcgttaaattccactacaccataagcgcgcgggtcttttacatagtagccgaagatgcaggcgcctttttctatattggcagcccggcggagcatggcagaaaagccttgtccgtaaaacatattatccccaagaatcagacagcccggttcaccgttcaggaaatcggctcccaatacgaaagcctgtgccagtccgttaggttgttcctgtattttataggagaaagacatacccagctcctcacccgttcccagcaaatcccggaacataggcaagtcacgtggagtcgaaataatcaacacttcgcgtattcctgccaacatcagtgtcgacaatggatagtaaatcatcggcttgtcatacacaggcatgatttgtttggaaatcgctttggaaagcggataaagtcgggtggcactaccaccggccagaataattcctttcatgttcgtctgagttattcattaacagtgtgcaaaggtcggaaagaattccgacgtggcaaaattttaaaataatttttcagtcaggcggggacatttattttatttgtccgccagttcgataacttccaagtcctgaaacgccccttgattgataacaaaacgcaccaaagtccgcaccttatggaaaccagacatacctgcagctcccggattgatatgtaacatatccagcgttttatcatacttcacctttaatatatgcgaatgtccgctgataaaaagcttgggcggtcgcgtcatcagactaccgatgatggaaggatcatactttcccggataaccgccgatatgttttatcagtacttccgcaccatccaccgtgaaacgatttatttgaggatacagttttctgatttcctgtccgtcaatgtttccgtacaccgcccggaatggacggaatgcggctaacttttccgctacttccagtgaaccgatgtctccggcgtgccagatttcgtcgcacg

SEQ ID NO: 8173 - DNA, 6319 bp, Unknown
  gut microbiota DNA sequence
aggtgaaactgttaagaatatagataatctgacttttattatgcaaacggtagtctttaggtaccactcccatccgctttgtaaactccttatagaaatgtgatctattcataaacccactttgatacatgatttctttaatgaaatttttgggtggggataaaatatctcgtagaaaattcctggcgactcccgatcatagttatttcccgatttgtatagaggcgatgaagcttggcatccatgtgtatgtggaaaagccgtttgtcagaacttcctatgaatgtgaactgctgatgcaggcggaacagaagtacggtgttatcacgcagatgagttaccaaggacattttttctgtttattattgaccttaaactctcaaaacttgcaaaatcgtttcaatcgtttcacagaatctttcatgtcttgatttttgttctaaaagtatgattcggtttgttttctaacttctatatttgtcatcagaaacgaacgacaatgaaacatggtatctatatattgactattcttatggctttattaagccttccagaaagtgggtatgcttcgattccatttttcgctgttgcgaatgatacaatccggcgggcagtgatatattttgatgcgaatgaagcgaaagtggatcttagttataaagataataatcaggcaattacaattttagattctttgcttctcggaaatttgaatacgaaatatataacagcgctgaatgtgaaaacttttgtttctcctgatggtgatgaatcttataatagaagtttggctgctcggagaaatgattcgataaaggaattcttacaacggtataattcggatgttagtgttgataagattcattttttttcagagggagaggattggtcggagtttcgtaagttggtggcatccgactccaacttgccagatcgggaagaagtgctgatattgattgattatcataagaatgatgtcaataaacggaaacaactgttgcgaaaattgaatcggggaattgcttaccgatacattgttcgcaatatctttccggagctgcgaagatcggttattacgattgtcggagaaacttcgaaattaggtaaagaggcttttgaaccggtatcttctgtctccgggttgtttgtttcaaagcaggaagaggcgcttccgaaagatcaacctgataagcctgtgggagaaagtgaagaaaaacaggcctgtgaggtcgatatatcggaggcagaagggccggtgaaaagccaaactgtacttgcagtgaagaataatctgttatatgatttggcattggcgccaaatatagaagtggaaattccgataggcaagaggtggtctttgaatactgaatataaatgtccgtggtggctgaatagcaaacatgatttctgctatcagctcctttcgggagggatggaaggacgttgttggctgggaaaccatcagaaacgcgaccgattgaccggacattttatcggactttatgctgaaggcgggatatatgacttccagctgcgtggagacggctatcaaggtaagtattacggagctgcgggagtgacttatggatatgcacggcaattggcacggcatttttcccttgaattcagtcttggcatagggtatttgacaacagaatataaaaaatatactccttatgagggagatattatatggacaaatagtgggcgttataactttattggtcctaccaaggcgaaagtttctttggtatggttgataacaacaaagaaataggagggcgtaatgcgaaatacaagatatgggtttcttgtgcttttgtcctcgctgctgatgctaactggatgtagccgtcgcgatatattggatgattatcccgtaagtggggtagatataaagctggattgggatggagtgacagatcaactgccggagggagttcgggtgattttttatccgaagaacggagatggcaggaaagtagataaatacctttcggtacgaggtggagaaatgaaagttcctccggggaggtattcggtagtagtctacaactataacacggaatctatacgaatcaggggcgaagagtcttatgaaacgatagaagcctatacgggaaactgtaatggtttagggattgaaggaacggaaaagatggtttggtcaccggattcattgtatgtgttgaatatagatgagctggaaatagagaagagtgaagaagtgcttcgcttagactggaagttggaatctgtggtgaagaaatattcttttgcagtagaggctaaaggtttggagtatgttgcaacagtggtaggaagcattgatggattatccgattgttactgtataggcaaaggtcgtggagtatgtagctcacaacctatctactttgaggtaaggaagggagacaataaggtaacggcatctttcaccgctttcaaacaagtaaaggaaatgacaatgccgacgcgaatgtcaacatcagagagagaaacttctagtgagaaagatgctataatattaatattgaaatttatcaaaacagataatacagttcaggaagcaacaattgatgttactgaaataataggtacacttgaaaatgctggaacaggggaagatggaaaaccaaccccaccaccggagattgagttaccgcctgatgataagattgaggttgataagccggaaacaccaccgaatcctgatggaggtggaggaatgggcggcaatgttgatggatggggacccgaagataatgttgagttacccgtgaattgaaatagaagctataaacaaaatataacaatattataaacttaaaaaaatacagttatgaagaagattttattggcagttacagctgctttggcaattacgggttgctcacagaatgaagaatttgagaatgctggacagaatgcagtcataaactttgagagcatagtcagtaatgctacaagagccacggagatgaagctcgatgaattaaaaactcaaggttttcatgtttatgcatataatacaggtgatgctgttgttggaactggaactttaaataagtcgataatggagaatgaacctgtttcatggaattcgggtgacaataaatggacatctaataatgcatattactggccttctcagggaaaaatccaattttttgcatattcttcttctcggtcattaacactaacagctactgatacagatcagtatcctacattggttaattatcaaattgctgatacggcacctaatcaggaagatttgcttgtggctaaagttacggataagacaaaagcagatttgagtgttaatttcacgttctcacatgtacttacacagattcaatttgctataaaatcaaagcttgatgataagttaacatatactgtatctaaaatagaaataaatggagtgaatgataaaggaacatataaatatgctgataatgtttggacttctttggagggatctgcaacatatatttatcctttggatgatattactactacaaataatgcagttcagggaacaacgagtaaaaatattggtactgaatctttaatgttattgcctcaaacattgacaacaaggaaaatgttagtaagctataatgttactgataagaatggtgatgaagtgtatacaacaggagctactcctaaagaagttgatttgaaggatgctatatggggagtaggtaaaagtatacgttatacattgtctctaacaaatgatgctgcaactattgggtgggatgttactgatgtagataaatgggctgatgaggataatcaggaaaaagatcctgtggctcctgcagtgtaataactagttgcataggaatgtagaatgcttgaacatatcttaatttaagaatcttgaagcctagtttttcaaatcagaaaaactaggcttcaagatgttcaagtgagtatctcttatctaacctctttttcacttttctctttttttttatggcaatatgaaagatttcatatatttttgctggcagcataaacaaaaacaaacacagccagcgtatgccatctatttgtcaaggaacttgggattgccaaatatgtccaaaagcggtgagtaatgccattactcatgtgatttatcagcgtggttttcataaaccggctcaaaagtgtgaagaaaatcttatcctttttttgatgaagggagaaatactggtcaatagtaaggaatatgcagggaccatgcttaagggaggtgaatttatccttcaggccattggttctatgtttgagatgcttgttatgactgaatgtgagtgcatttattatcgttttattcagccggaactgttttgtgatttccgttttaatcatatcatgaaggaagtatctcctccacttatttatactccattaaaaataatacctgaattgcaatatttccttaatgggtctatcacttatctgaaaggggataaagtctgtcgggatttgctatctctgaaacgaaaagaattagcgtttgtgttgggatactattattctgattatgatctttcgagcttggtgcatccactttccaagtacgtaaacagtttccaatacttcgttattcaaaactataagaaagtgaagacagtagaagaactcgctcaattaggtggatatactcttagtacattccgtcgtatcttcaataacgtctttcatgaacctgtttatgaatggatgctggcgagacgtaaagagggcattctggacgatttgaacaactctaaatgtagcatctcggagatatgctataaatatggttttgaatctttaccccatttttctaatttctgcaagaaatcttttggtgcctctccacgtaatttacgtaggcaagacatttcataaatgcaactatgtaagataattgcggttcaccggtttcacccaattctctaaatgccgatgaataaggtaacagcgggtgaaagcaagggagaaattcaggtgaaactgaaccttcccgatttcacctattgagtttattcataccgactgttggacatatagatccaagatgctggatatatagctccaagatgctggatatatagatgcaacaactcaagtattaacacatgagaactaaggtgttaagacctggcggccaaagtgttatatccgcacagttcactcattaacacctgaaagcggatttgctataagcatatccggattagctataatgataattgttttagctcaagggatattttaataagacaggtgaaagcggtaacgaatgattttaccttatttcaatcctcgctttcacccgtaattctctcattcataacagttttggctataaggtgaaatcggtgaaacttatgaattaaaagttcatgttactgatccgtattaataataattgtggtctactcatacataaagaaatcccctgtcggactagccggcaggggattctgtcattaatcaaattaagctctcgctattgaaatctagcaatttctagtcttttaattttgcgatgatgaagtcgcggttcaagcgagcgatgttgctgatagaaatattcttcggacattcagcttcacaagcacgagtgtttgtacagttaccgaatcccagttcatccatctttgacaacatagcttttgcacgacgcaaagcttctggtttaccttgcggcagcaagttcaactggctgactttggcagaaacgaacaacatagcagaaccattcttacatgcagctacacaagcaccgcaaccgatacaagaagcagcatccatagcttcgtcagcgataggtttcgcgatcaggatagcgttagcatcctgcggagcacctgtgcgtacgcttacataaccaccagcttgcataatcttgtcgtatgcagtacggtctaccatcaagtctttgatgacagggaaaccagccgagcgccaaggttcaacagtgatggtgtcaccgtcgttgaaacgacgcatatagatctggcaagtagtagcacctgttgcaggaccgtgcgggtgtccgttgatgtaaagagaacacataccgcagataccttcgcggcagtcatgatcgaatactaccggttcttttctttcgctgatgagctgttcgttcagaatatccagcatttcgaggaaggaagtatcaccggggatatctttcatttggtaggtttcaaaagcacctttagctttcggaccagcttggcgccataccttcagtgtaaatgatatatttttatccattttcttctaattcttttaaatgtttaacttcaccgattagctc

SEQ ID NO: 8174 - DNA, 24103 bp, Unknown
  gut microbiota DNA sequence
cctaaaatctttattaggtgtagcttatgccctaacttttataaaaggcttacgcaaaaatatcactccgtaaaatataaccgatcacatctcccttatgtacattagcaccttgctgcgcacatacttccaccactcgtccggtaaatccggtcagaatcttttcatattctccccacggggtagaaagataacaaaaaacttcgtcatgctgatatttacgtccgatgaatggagcaatggatggtccctctacggaaacttcccaaagtacctgcccgttatcaggagcaatgaccgggtccgccttggcacgcttcaatttcttaatttcctcttccgaatatccgttctttgccattgccgcatctttagcatgttgtaactcttcctcaaaacgctttttggcaaccccggacttataatcacgatactggcgatcgtgcatggccagttcgaaaagctcctcgtcatcctctccatattcccagccattttcatccatttcctttcgatattcatccaaagcatccggataattcaactgcgggtcggtatcgacaaattcatatcctttagatttcgccaaccctacaatctccggtgcgagcttacccggaagacgtccacttttacccagaatcatatcccaagtgtggttatctatcattgtccagcgatcttccccttttacctgctgcataagattcattaatgcaacattcttcacatactggctgaaaggagtcaccaaaggaggataacccagcttaggccatacatattccacttcatcaaaaagcatcacaagcaaatcatccaggctaagttccggctcattcttgctccttaatatcatattgataccggaatgcactcctttcaagtctgccatcatggaacccatcataccacccggcaaaccacatttcagtagaagtgaagacatatatttattggtaggatccataaaataacccagaaaatcatcaatgaattcttgcgtcatggcacgagctttcatatatgctttcatatttatgtcgggaacctggaaacctaaatctttcaacatagcctgcacagagattacgtccggatgcactttgccccaagacatcggttccatagctacatcaatgatgtccgcaccattttcacaaacttcaagaatagaagccatagacaatcctggtccgctatgaccatgatattgaatcaatatatccggatgtttctccttgatagtcctgaccaattctcctaacatacccggacgaccgatacccgccatatccttcaagcatatttcaggtgcaccggcctcaatcagttgatcggcaattcgggcataatactcaacagtgtgtacgggagaataggtgatacaaagagttgcctgcggaatcatacctgcttccaaagcatatttaatagaaggaatgatattcctcgtctcgttcagtccacaaaagatgcgtgtgatgtccactccttgcgcatgcttgactttatacatcaatttacgtacgtctgccggaaccggatacatgcgcaacgcattcaatccgcgatcgagcatatgcgtttgaatacccgcttctttaaaaggtgcggtaaaagcacggacagccttattaggattttcgccgtacaacagattcacttgctcaaaagcaccgccattcgtttcaactctggcaaaacagcccatctcaataatcaaaggagcgatacggacaagctgatcaacccgaggttgatatttaccggaagattgccacatgtcccgataaacaagactgaatttaatttcctttttcatcatagccaataataagtgatttttttcttcggttaacttcacatatacaaatataaaggtttaaactgacatatagtcaaacaagcaccttaaaaaatagatataaagagatgtttaatatcataatgcaagaaaaccacctctaaatagatccatttactataaataacaaatcaaattgttttatgttcgcatttattcttttaagaatactaacaagtctgttagtaacaacattgttagtaacaaacttgttagtatttcaaagaatcactatatttgcccaataagaataataaagaatagttatggaaaagccgtttgtttttggtgtagccacttccggagataactttacagatcgcgaaaaagagactcaacgtttactcctaaactttgcacatggtgtaaatacagtgcttatttctcctagaagatggggaaaaacatcactagttaagaaagtagcccagctatcacaagaaaacaagagaaaagtggtctacatagacattttttcctgtcgcaccgaaaatgagttttatcgtctctttgccacttctatcttaaaacaaacttcttccaaatgggaggaatggatagagaatactaaacaattcctctcacacatcaatcccaaaatctctatcggagcagatccgatgaacgatttctctatatcattcgagtacaacatgcaaaataatacggagaatgacatcttacagttacccgaaaaaattgcaatagagaaaggaatacagatagtcatttgcattgatgagttccaacaaatttcggatttcgaagattccaaaacgtttcagaaaaagctacgtagcgtatggcaattacaacaacatgtctcatattgtcttttcggaagtaaaaagcatttaatgaacgaactctttgaaaagaagaatttaccattctataaatttggagatgctatctatctcgcaaaaatagaaacaaaatactggattgaatatatatgcaaacgatttgaaaatacaggaaaacacatttctcccgaacttgcagaagaaatctgccgccttgtagacaaccattcgtcttatgtacagcaactttcctggctactttggatacgtaccattaatacagcaaccacagaacaactttcttatgcattggaagacctactcgaccaaaacaatattctattccaaagtgaaacagaaaacctttctgcctatcaaatgaattttctaaaagcaattgttgatggaatacacactaaattcagcagcaaagaagtcatttcaaaatacaatttaggaacatcggccaatattgtccgcttaaaaaatgcattactacaaaaggagctcatagagacaaatggaaaagagatagttcttgcagatccagtatttggagtatggtttaaaaaagaaatgctttactgacatatatacaataaaagatgcacagattgccgatcataaatcgattctctgtgcatcatcactactactctaaagacacttttaagacaaaactaactaaattatggaagaatatataataccgcgcagaaaacgtatcccatacggcatgatgaactttgcagtaatccgccgcgacgactgttattatgtggacaaaacccggtttatccccatgatagaagaggcagacaagtttttcttctttatccgcccgcgccgtttcggcaaaagtcttacagtaaatatgttgcaacattattatgatatacttgccaaggataagttcgatgccctgtttggcgacctttacatcggaaaacaccctaccccctgaccggaacaggtatttggtgctgtatctcaacttctccagaatagtcggtgaactgcacaactaccgaaagaggctggatgcgcattgtggcaccacctttgagaacttctgcaaaatatatgccgactatctgccacaaaatacggtggacgaattgatagaaataataaaaccctggtatgacaactactgctttacggaagaatgttatggcgaaaccaccatgtacaactcaaatatggtgctctacttcgtcaagaattatattcaacgaggcaaagcacccagggatcaccaaccccgacaactttgtgaacctgctctattatttcggcatgcttactatcagtggtatgtatgaaggaaagactaaacttaccatccccaatcaggtagtccgcgaacaaatctacacctatctgctgagtacttatgacgaagccgatctcagtttcagcagttacgagaagaacgaactgaccagcgcccttgcctaccacagtaactggaaagcctatttcggttatattgccgactgcctgaaacgttacacttcccaacgcgacaaacagaaaggtgaactttttgtccacggctttacgcttgccatgacggcacagaaccgcttctaccgtcccatttccgaacaggatatacaggcaggatatgtcgatattttcctctgtccgctactggatatctattctggcatgaagcacagctacattgtagaactgaaatacgccaaatataaagaccccgaaagccgtgtggaagaactgcgtctggaagggattacacaagctaaccgctatgcagaaaccgagacggtgaagaatgcggtcggtgccacacaacttcataagattgtggtggtgtataagggaatggatatgccggtatgtgaagaaatttaaagcaaactcagcaataaagctatacagaatctcgaacatcactgggaatggaagcatattgtgcccgttaacagtgaaaatccgtaaaagaattcaaaagagaaacaaatacaacaaaattatttggaaagggcaagaagaaggcttatatttgtcatgtgatttttttcatagtattagatttaaggttaacaaaggttggagcaaggcgttgctcctttttttatgtcttattccctgccgccaacagcttcccgaacaaattcagaatccccactacactctctttatcagatacaggtatccgaatactagtccgacctgtctccttatcttcctctacaatagaatcaaccaatctctgagtagcttctggcgaactaagcgtacgtgccagtccgctaaggaaagaaaatccctgctgaagcaattgctccggattattatctgccgcagatacagaagacttcttttccgtactcacctctgttactccttcttcaggtgtttcttcctcaagcaatgccaatgaatccgtgtccgtcgtttgcaaaacagccgtttcctccacaactttctcttcattatcattcaaatcaatactgcagcccgccatacgattatgcgctccgtccacttcttcagacggttcggccaccaccttgagactatccatcatcttgtcgaacttgctgttttccaagaagatggtatcttcaccattatcaaggataccctcaaaaagagaagttttgaagttgagggtagacaacatcctctcttcaatagtctggctggcaacaagattgataacctggatattctttttctgaccgatacgataaatacgggcaatacgctgctcgagaacggccggattccaaggcaaatcgagattgataagtatagacgcaacttgcagattcagccctgtacttccggcatcagttgacagaaagacgcggctttccggcagttcggtaaagttatccgtcagatttttacgggcttcggaaggaatccccccatgaagatactcataccggacacctaaaacgtccagttctttcgctatcagacgagtcatcctctcccattggctgaaaataaccaccttctcatctccactctcaaagacattcctgagaatattcagcgtttcctccaccttcgtatcataacgggttttctggtcaagaatataagtgctgtcgcaaagcatacgcatctggctaagcatcaacaatagccgcttccggtctttctcactcaggaaacgggttttcgtccatttgaatactagttgcgacacgatagactgatattcatcatgcatattcctctgttgctcagtcatcggcacaaacagaactttatccatccgcccgggcaactggagagctacatcttttttccggcggcgaatcagtacgttcttcatctgctcgccaatggcattcagattcttgtaagaaaccaccttacccgtatccgaccggacaacagtctggtcaagaaactgataataaggtcccaaacaaaactggtcgacaaactgcatgatggaataaagttcctccaacttattctccaatggagtaccggataaaataaccgaataatccgactcaatatgacgggctgctttggatatttgagtattccagttcttcagacgctgcacttcatccatgataaggaaatcagtatgaagagacttcaagattttaatatcattgcacacactgttgtaagacactatcttataaaattcttccgctccatatagcactttcctggtcaggtgatttccttctaccacaatagccttggcatcggtaaaacgctctatttcctttttccattgatatttcaatgatgtagggcatataatcagagcggaagatataaactgatgcttcctcatcagttcagccgttccaatagcctggatagttttgcccagtcccatttcatccgcgatgatagattttccggcacgaaaagcaaaacggattccttctttctgataagggtaaagttttgttttcagcaatgtgtccaatgctgtgtccgaagcatagtccggtagcaattgcgaccgccgccgcaaatcacgctgttcaagtataaatcccagtgcgtcgggataccaacggaatgtgttattcaggcgggtagcagccctcaagaattcagttatcgagtcaatggcggcagggcgcatcactccgtcgggagtaaaataaggacttgccagtttgcggaactcctcctcattgtccgtaccgattcgcaagcaaactttacgctctccctgataagacaggtatacggaagaatacggtggcgtgacacggcaaactttacgtcttttctctctaatccatagtttgactccttccaaatgtttgcaagtacccaattggcttgccttaaaatccatacacgaacaataattccaaggactctgatgtcctctatataccacattatattcattgccggatgtaggatttatcaccgtataataaccgggatattcttttttgtctctctcaaatattacaaacttctctttcattgccgcctgcctccgcaaagcaatctgccagtcttgcaaagtcatattgtccggtcgataatgataagaaactttattcactgtgcttttcgtctttttatctgcttttgtcttttttgccatgctcattgtaccttcgaaattttgccaaaaatacgaaaaggtttctgtttctccacaatataaagtatacaaattatcaggaaattactataataactggtacattccccctaccaacacacgaactacacctttcatttcaagctcgaaaagaatcgtattcattttctgcacgggaatatccgcttcaactactaatgtattaatctgtaaatcgcctcgtttctcaagaatttcaataaccttttgctcctcttcagacaaatcaagaaaaagactacgctgcacatttgccacttttgccgaatgagcactaacctcccagcccatagccttcacaaaatcttcggctgataataacaaagaagctctgttttctctgattaacaggttgcatccttttgaatattcatcattcacgcgaccggggaaagcgaaacagtcgcgatgataaccttcggcaagttcggctgtaatcagtgaaccgcctttctctgctgattcaatgacaattgtagcatcacacacaccggcgacaatacggttacggctgacaaagttatgccggtcgggattggtgccggacagaaattcggtcagtaatccccctttttcaagcatgtcaacagctgttttccggtggacatgaggataaatacgatccagcccatgagctaaaacacctactgtaggtaattcattggccaaagcttcacgatgcgcatgaatatcgattccataagcaagaccgctgactacaagcacttcaggacaaagtgctttcagatcccgcagaaaagaggcgcagatttgtgtcccataatcagtagcattacgggttcctaccatattcaggatatgaagggaatttagatcggcatttcctttaaagaaaagaacgacaggggcatcttcacattcccgcaaacgggaaggataagcctcatcatgaaaagacagacaagagatccgattcttccggataaattcatattcttgttcggcgcggagcacagcttgcggacaatccaatgcctctatcacccgttgacttacttctggaatacgttccggtatttctttgcgcagacggaagacatcaacggcattacccattccatctatcaaatgttttgctcctatgtgcccgataccgggcaccattgtcagagcaatactataaatttgttcttcttccgagctgttcatttcaggtagggcgcaaagacattatcgaacaattcgctgtcacttaaacgtccgtttaccacacataccgtctcaacagtggatttcactactactttattatcattcttacggaagatatcctgataaaacacatatttgataccttcctttttcatatatagtttcgagacaaactcatctccgcttttcaatggagtcttgaatgccatactaatacgtgccactaccggatcgactccttgctcatgaagtgcagcaaaactgacacccaccgaagtcagaaactcgtggcgggtatgttccagatagtgctgataattggcattattgacaataccttgaaggtcacattcgtaatcgcgaaccttcatttccaattcatagatatagttcatttaaattgagaattaaaagttgagaaataacagttagcctcttttttgctcaatgtcgagtcctttgaacttcctcaattcttcggtcgataccagtttatacagcttgtcactgggacgtatcttatccgatttcatggagaaatgctgtcccttcttcactgtttgcacagattccaagtcaacacgagcttcttccaaagtcataaatagggcaccggtagtcggccctgtaatgagaagcttatcgcctacacttacttcagccgcttctaccaggaattcggaaactccgatattagagaagtatttgatacctttacctacataaatcttacgttccgtagctgccgaaccataattcctggtccattcgcccaaacgctgtcccaagtaatatccatcccagaagccacggttgaatacggttttcaggcgttcatcccaagccgcaatcttttcatcggtgaatgttccatccaaataagccttgatagcttctttgtaacattcaaccaccgtacgtacatattcaggtccacgggcacggccttcaatcttgaatacacgtacaccggcatccaacattttattcataaaatggatggtcttcaagtctttgggagacatgatatattcgttatcaatatccagttccacatccgtttccttatcacgaaccgtgtaagaacgacgacatacctgcatacaagcaccgcgattggccgaatgattcatctcatgtaaagagagatagcatttacccgatactgccatacaaagcgcgccgtggcagaacatttcgatacgaagttgttcaccgctcggaccacagatatgttcttcctgtatctgacgataaatctcggccacctgttccagattcaactcacgggccaatactaccacatctgcaaattgcgcgtagaatttcaaagactccgcattggagatattcaactgggtggaaagatgtacctcctgccctatctgacgggcataattcatcactgccacatcagctgcaattaccgcagaaattcccgcttccttggccgcatcgacaatggtatgcatcagagggatatctttatcatagataatcgtattgaccgtcaggtagctcttcatcccgtgctcgtcacacgtacgggctatttcccgcaaatcatcaatcgtaaatgtattagccgaacgggcacgcatattcaggttttctataccgaaatagatagaatcggcacctgcctgaatggccgcagcaagagattcgcgcgaacccacaggagccattatttcaaaatctttcaaactaagactcatagaatatatacttatttgtatcagttaagcaaatgaatgcgtacaaaggtaggcttttttccgtatttttgcagcgaaaacaagaagttacttcaatcataaacagtaaatagcagattcatatatgaaaatagcccatatagatttaggaaaacaccccatcttacttgccccgatggaggatgtaaccgatccggctttccgcctgatgtgcaagaaattcggagcagatatggtgtacaccgagtttgtatcaagtgacgcactgatacgtgctgtcagcaagactgcacagaaactaagtatcagcgacgcagaacgtcctgtcgccatccagatatacgggaaagatacagagacaatggtggaagctgccaagattgtagagcaggcacaacctgacattctggatataaacttcggatgtccggtgaaaagagtcgccggaaaaggtgcaggagcaggtatgctacaaaatatccccaagatgctggagatcacccgtgctgtcgtagatgcggtgaaaatacccgtaacagtgaagactcgtttgggatgggatgcaaacaataaagtaattgtagaattagcggaacaattgcaagattgtggcatagccgcattgactatacatggccgtacccgcgcacaaatgtataccggagaggcggattggacactgatagacgaagtgaagaataatccgagaatgcatattcccattatcggtaatggagacgtgaccagtcctcaacgctgtaaggagtgttttgaccgttatggagtagatgctgtaatgatcggtcgcgccagcttcggtcgtccatggatattcaaggaagtaaaacactatttagagacaggtgaagaattacctccacttagttttgaatggtgtatggaagtacttcgtcaggaagtggtagacagcgttaatctgctcgatgagcgtagaggtattttgcatgtacgccgtcatctggccgcaagccctctattcaagggaatccctaacttccgcaacacacgtattgcgatgttacgggcagaaacaaaagaagagcttttccggatatttgatgaaatcacttcccaacgcaaagaaaatccggaaatttaaatcagcacctattatatctattcttcaggaacttgtacttgttcctgaagaataacatgatctaattaaaacgtcaaggtctttggtttctatttaaacatcggctgcgcaaaccactttttgaacatccaggttacgactacatacaataggaatgcagagaagaaaccaacaatggcatcaatcacataatgcgcctgaatatatacggtagccccacagagcaacatatagaaaggtataagacaggcaaacaacttcttgctgccacgccaagccataatcatcagaatagtagaaatgcctacatgcgaactggggaatgccgccgtagggcgttcacccacttgctgcgagccttccaccaaactataaaaaaatccgtgctgatagcccggtccgggaagcaactcctgattataattgaaataatcaccaatagcagggaaaatacctttagatacattatcaataccaatggcaggaaaatagaattgagggcctgcaacaggaacgaatatataaatcagatagtaaataaagaaagaagtgacaagcacaaaagacatcttctcgaaccactcaaatttataaatgaaatagaatagagccacaatcagcatcatcggataataaaagaaatatcccatattgaatgcctcgctgactataagatgtggaaacgtatggcagaaccaaatagcaggctgaccattgaaaataaactgttcggcagttgcaaatacatgatctaaattcggaaagaaacgattgaactcgaaagtatccggataccagtaagacagcagactcatctgaataacaatacgcacaaacgccgaaaatttacagggagcaagacgataaagatacatcaataaaaaagtcattgccgcgatcatcgccctatccagcaacatgtgccatggatgatccatccgctgaaacaggaacagaatcaatatggaagtcaacagattataaatcaatgtaatcttttccacagcaaacaaccctttccgggtttctatgcgcttaaataagtctaaagccatccttcatttttataccaggcaatggtttcccgaactcccttttccaaatcatattcgggcacataccccagttcatccattaccggggttatatcgcattgccagttgcgttgtttcattatcttatatttatccgaattcagggtactgctcctcccggaacgtgtagcaatgaattcagcgaacaaagatataacttttagcacaattaatggacatttcaagtgaagaacaaacggattacccaattctttttgtatcagatccgaaaaggcacgacttttataaactttcccgtctgtcaagaaatacgccttacgaactacttttttctctattcccaggaaaatagcctgcacaatgtctttcacatacacaaaagtcaaatcctgacgacggaaaccgaccgagaaatcaacgtgtttctggatagactttgccatcagatagtaatcagcttcacgaggtccatagactcctgtaggacgataaatgacataagggaaaccgggcatactctgaatatacaactccgctttcagcttgctcagtccataagcagtattgggtaccggagggtcgtccgcttttatcggagtatagtccttctcacgtacaggtccgaacacactcaatgtactgatatagataaactgtttcggaaccatattcagctccttcaacgtatcgataaaatatttggtctgaagataattcacatagtcaaaagagtgcttgtcggggcactttgtaacaccggcgcaatgaatgatataatcaaatttgttgtaagtgcctttatgcccggagagttgggcacgaagtttattagggtgcgcaaaatccagttccagaaagtggattttccggtttttcaaataccgcttgctactcgtagaacgaatcccggcccacacaccaaactttcgcttcaacgcttcctccacgatgaaactgccgataaaaccactcgcgcctgtaattaaaatactctccattattacttttcaggtcctacatgaatattaattgaaaaaatatgatgccacaaagatacgataaatataaaataaaagccattttgcttttctcaattattatttgtttatttgcaacgcgatttatttactattcaacacttttaaagcacgtggaagataaggccgattttgattttctttttaaagagtactatcctcaactttattattatgcatttcacctgattaataatatggaggctagcaaggatatcgtaagcgacgccttcgaatttatttgggccaattatgcaaaaatagataaagccacggctaaatcttatctatatatttacgttcgcaacaaaagcattgacttcctgcgacatcagaatatacatgaacagtatgtacaaatctattccgaactgacccaaagttatgttgaaacggaatatctggagcaggatgaaagaatgatgcatatcagcaaggcaatggaaaaactgactccacataccaggcatattttagaagaatgttatattcaacgcaagaaatatcaggaagtggcagaagagttaaatatcagtgtcagtgcagtcaggaagcatattgtgaaagcattacaggtgatacgtgaagaatgtgcaaaaaaatcataaatcaggtatctttattttatgattaaacgtaatataaacaagtatgatacagtcaaacagtgatgaataaagatattgacaatataaacaatacagatgaatctgtaaagaaggcgctcgacatcatggagagttcttcagatataaacgacgaacagctgcaggagatgcttaaagataaagaaatcctgcaagcttgtcgcgacatcatggatagtagtcttttcctacaacaaaaaggaggaatagaacttcctaatgtagaaatggaattggagcgattcaagaaaaaacaacattcaacacgaatgcgttccaatctctggaagataactatcggaatagccgccatgattaccgttctattcgggagttactatttaattaatagcctgacaacccctgcactcgaaccaatcactgtattcactgctgatactactccccaacatattgttttgcaaaaagatgacggagaaaaaattgtgttagacgaaccgcagtcaaacaatcaagtcctgcctaaaaccgccatcgcaaagtctgaaaagaaagagctggattataggcaagtcatctcaacaactacacagacacacgtacttaccgtgccacgaggtgaaagtttcaaagtggtattatgtgacggcacagaagtctggctgaatgccaatagtaattttgtttaccctacagcctttattggcaacgagcgtatcgttactttagaaggcgaagcttatttcaaggtagccaaagacgccaagcgcccctttattgtaaaaaccaagacagtccaaacccgcgttctcggtacggaattcaatatacgtagctatactcccgaagatactcatgtagtacttattaacgggaaagtagaagtaagtaacacaaaaggaggatcatatacccgactatatccgggagaagatgcacacctgcaatctgatggaaatttcgttctaacagaagtagacttagactcttacgtttattggaaagacggctatttctattttgacaatattacattgaaagatattatgcaaaacttaggacgctggtacaatgtaaacatagaattcagaaacaaagaagcaatgacgtataaaatgcacttcatatccgatcgcactaaagatttagagcatacaatctcattgcttaatagaatgaaaaaagtcactgtcaccttgcaaggcaatacgcttaccatagactaggtttttattgcataagtataacaaatctatgcaataaacaacaaaatatcacttttattaaaaaataaatcgcaaaaggggtatccattttcttttctcatacgcattagttatataaacatgtccaaatagtgttattaaaaacaaacgtatgagaaataattggaacttatttattgtgtgttttctatgcgtattgtgcttccagccttaccaagttaatgctcaaacgcaatcacaaaagaaaatcacgattgagattagcaacgaacgattgccatccgtacttaaacgtctggaaaaactctccggctacaaaatcctatttacgtatgacgatgtcaagaaattcaccgtttccggctctgtcaaagataagagtatagagcagactctcgatattatcttagccaataagccactagaataccatattgaagatcaatttatcacaattacttccaaaggtccttccaaacaagcgaaagtattcaatgtaaaaggagtggtaatttccggtgatgacggacagcctctcatcggtgcaactgttgtcatcaagggaagcaagtccggtgtattaacagacatagacggaaagttttcgatagaaaatgtatccaataaatccctgttacaattttcttatataggaatgaagccacaagatctgactcctaccccaactatgaatgttacattaatgcctgatgtacaaactttatcagaagtagtagtaacaggtatgcaaaaaatggataaacgcctgtttacaggagcaaccaaacaattgtccgcagatgaagtgaaactagatggtttgcctgatatcagccgtggacttgaaggacgcgccgcaggcgtatctgtacaaaatgtttccggcacgtttggtactgccccgaaaatccgggtacgcggtgccacatctattttcggtagttcaaagccattatgggtagtagatggagtcatcatggaggatgctattgacgtaggtccggatgacttatcttcaggagatgcagagacgctaatcagttcagccattgccgggttgaattcagatgatatcgagagctttcaaatattgaaagacggatcagcaacctctatctatggcgcacgagccatggcaggggttattgtagtaacaaccaagaagggaaaagccggcgttagcaaaatgagctataccggtgaatttacaacccgtatgattcccagttataaagaattcaacattatgaattcgcaggaacaaatgggaatctacaaagagatggagcagaaaggatggcttaataacagcgatacttaccgtgccaaagatagtggtgtatatggacgtatgtatcaattaatcaatcaatataacccggctacaggacaattcggacttgccaacacgccggaagcacgtaatgcttacctgcgcgaagcggaaatgagaaataccgactggttcaataccttattttccaacaacgttacacaaaaccattcggtcagtatcacttccggaactgaaaagtcttcattctatgcttcattaagtgcgatgtcagatccgggatggtataaacaaagcgaagtaaaacgttatactgctaatttaaatacaacatataatatatataagaatttatctataaacctgatctccagtgcttcctaccgtaaacagaaagcccccgggacactaagttcagaggttaatgcagcaagtggagaagttacccgtcagtttgacatcaatccctattcgtatgcactaaatacatcacgtgcactagatccaacagttgactatacagccaactatgcaccgttcaatatcctccatgaattggataacaattatatggatttgaatgtagctgatgttaagtttcaaggagaaataaaatggaaagcacttccggagttagagctaagtgcattaggagcagtcagatatcaggcttcttcacaagaacacaatatcaaagatcactcgaatcaggcaaccgcttatcgcacaggaatggacgacgctaccattcgtgacgaaaacaacttattgtataccaatccggataatccgtatgctttgcctatcagtatactaccggaaggaggtatctaccagcgtaaggactatcgtatgttgggggtagacttccgtgccacagcatcctggaatcatttatttgcagaaaagcatataaccaatcttttcgccggtatggaagtaaatgatttgaaacgtatgcaaaattattttcaaggatggggaatgcaatatacaatgggtgaaataccatcgtatgtatatgaattcttcaagaagggcattgaatccggtgaaagctattatggattaaaccatacaacaacaagaagtgtagcaggctttgccaacgcaacttattcttatgatggacgttatacagtaaacggaacattccgctatgaaggcaccaatcgcatgggaaaaagccgttcttcccgctggcttcctacatggaatatgtcaggagcatggaatgtacatgaagaaaatttcttcaagacattcagctctgtactgtcacacttaacattcaaagcatcctactctttaacagccgatagaggaccggaatatgtgaccaactcacatgccataattactagttattcaccatttcgtcctttcaccagcggacaggaaacaggactttatgtatctgatcctgaaaacagtgaattaacctacgaaaaaaagcatgagttgaacatcggtgccgacatgggattcttagacaaccggatcaatttttcgatcgactggtataaacgcaacaactatgacctgattggtattaccccgacacaaggagtaggcggttctatctacaaatatgccaatatagcttccatgaaatcacatggtatcgagttcaccatttcaagtaagaatatccagtcgaaagacttttcatggcatacagacttcatcttttccaaagcaaaaaatgaagttacggaactgaatgcccgttccagcgtaatggatttagtttcaggttacggttttgcccgtcagggttacccggtacgtggtttgttttccattccatttgtcggtctaaattcaaatggtatcccgatgtataatatcaatggaaaaataaccagtaccgatattgattttcaaacacgtgacaacatagactacctaaaatatgaaggtcctactgatcctaccataacaggaagttttggtaatattttcacttataaagcattcaaactgaatgtattcatcacctattcatttggtaatgtagtacgtttgaatccatgtttcagctatcaatacagtgacttatcttctatgccacgcgaattcaagaatcgctggacagtgccaggtgatgagaaacgcacgaatatccccgctattatctcgaaacgccaatatgaagataataaagatttaatgtatgcatataatgcctacaattattctacagaacgaattgccaagggagactttatccgtatgaaggaaatatccttgtcctatgacttcccccaatcatggattgcaccagcaaagatatctaatttatctttgaaacttcaggctaccaatttattcctgatttatgcagataaaaaactcaacggacaggacccggaattcttcaataccggtggagtagcttcccctgtacctcgtcagtttacattgactcttagattaggattttaaccattcagataattataaaaatgatgaaatacagaaacgtcttatatacaacactcatttcagctctatgcttgggaacaacttcctgtagtgactttttagatgaaatgccggataaccgaaccgaattgactactgaagaaagtattactaaagttctggtatctgcatatcctatgactaccaactgccacataggagaattttacagtgacaatatcgatgaaaatagcagagcatacagctaccttttccgattaaacgaacatttgtaccgttggcaacaaacgactgaagaaaatcaggactctcctcatgctttatggaatgactgttataactcgattgcatcagccaaccaagccttggcggctattgagcagatgggaaatcctcaatcattatcagcccaaaaaggcgaagctttgatatgccgtgcatacaatcattttgtattagctaccacattctgcaaagcgtatggtacaaatggagacaaagacttgggtataccttacataaaagaaccggaaacatctgtaaatccacaatactcacgcggaacagttgctgaagtatacgaaaatattgcagccgatttagaagaaggactgcctttaattgatgacaatatttactcacgggtaaaatatcattttaataagaaggccgcttatgcatttgcagcccgcttttatctatattatacacaaccggatttttccaactgtcagaaagttatcaattatgccaatatagtactcggtaataatgcgtcccaatatttacgtgactgggctgcattaggagctttatctcccaacaagaatatacagccgaacgcttatgtagatgcagataaccgtgccaatctaatggtaatatcagcagcttcatattggccattggtttccgatccgggttatgccaactgcgaaagatattgcatgaacaatattactgcttcggaaagttgtaaatccgaaggtccatggggagatcagtcaagttatcatcagatcccattttcacccggtggctctataaagaacggattccgccgcttagttatctatcagcaattcacgtcgggcaacagttgggtcggctatatgctgtatcctgcttttaccaccgatgaagcattgctttgccgggctgaagcctacacgttactaaaacgttatgacgaagctgccgccgatatagatgcctggcagaaagcctttacaaaaaacactcaaactttgaccaaggagacaatcaatgatttttatgcccgactaaaatattacacaccggaagctccgacagtaaaaaaggaattgcatccggattttgtagtagaaaaaggaatgcaggagaatctgatacattgtattctacatgcaagacgcctgctaaccttagaagagggtcttagatggcaagatataaaacgctatggcattgtaatctaccgccgctattatgaaggttataccttggtgaatatcaccgacaagatggacacaaatgaccccagacgtgcaattcagctaccggccagtgtcattacagcaggtatgcaaccaaatccaagaaatgactaaataactttaggaggaaaaaaatatgaagaaatacatcatatatagtttaatcatgacattgacctgtggactgggtgcttgcaacaatgacgaagacgtagacaaagcaaacagcatcttctccacagaagaagtagatcgtagcccattcgacaagtggatattaggcaattatacccatccatacaacattgcattaaaatatcgcatggaagataacgagagcgacatgacacacgtattagcacctgccgaatacaaaaagtctgtggtactggctaaaattatcaaacatgtgtggctggaagcatacgatgaagcaacaggcaatccgaacttcttacgccaatatattcctaagacaatccactttatcggttcccccgcctatgaagacaatggaactatggtattaggaacagctgaaggcggcatgaaaattacattatacaatgtaaatgacatcaatcccgaccaaatagatattaacctgttaaacgactactacttccagacaatgcaccatgagttcgcacatattctgcatcaaactaaaaactacgatccggcctttgaccgtattacggaaaatgcctacatcggtagcgactggtatatggtgggagccgaccgcaatgcatggcaacaaggatttgtcactccttatgcaatgagtgaatcacgtgaagattttgtggagaacatcgcagtgtatgtcacaaataccaaagactactggaataacatgctgcaaaatgccggtgaaaacggccgtgcactcataaagcagaaattcgaaatagtctatagttatatggaacaaacctggggaatcaatctggacgaattacgcgagattgttctacgacgccaggatgacatagcaaacggctatgtagacttaagtattattgaataaaatatgaaaattatgaagaaatatctatccatatacacacttctggcattggcctgcattgttttgcaatcttgtcttttctccgaagaagaaatattcgacgaatcatctgccaatagagccacagccgatgtaatcaaatgccaggagattcttaaagatgtgccgaacggctggaaactggaatattacataggaagcaactattctgcaggtgcaatcactttactaataaaatttgacgggaagcaagtagaaatggcttcggaaacaggtgcagaaagctacaaaccgggaactataataacctccctgtatcaagtaaaatcggaacaaagcacaatgctcactttcgattcatacaacccactgatccacatgttttcaggtcctttaggcctgaacatgaacgtgggaggagattatgagtttattatcatgagcgcaactcccgacaaggttattctacaaggaaaaaaatataaaaatataatggaaatgacgcctatgcccaaagacataccatggcgtatccagcttgaggatatcattaacatcgagaaagatgcttttctgaatacataccgcatggagaaaggcggacaagtactgaattactttatacgcaacaatggcacaatggctacattctccgcttacagcgccgattatagtagtgcaagaagtttaccctatatctacacagaaaaaggattaaagttacaatccccgtacaatgtcaacggacttgaagtccaaaacttcaaatgggatagaaagtccagactatttgtttgtaccgacgcaggagcaactgacatcgtacttaaagaatattatcccgaaaactatctacaatatgaagactatatcggtacctacactgcaacgattgacgattatgacgaagggccaacttcgcaatctgtaaccatctctcctaaagtcagaggagaaagttatacactgaaaagtattggcggattcaacttcaccctccagtatgacaaagccagcggaaaactagttttagattcacaaagtataagttcgacttcttcatcgtcttattactttgcgtgcgcggcaggtgtggaaggctatgcccacacagaattaagtctgccatcacgcctacgcaacggattgataaatgtgacgacaaacagcaaccctttcactttttactttgcggataaagcaagccaggaaattacatcattgataatctgggcttattcatctgatgaatattcaacctccggactaatgggttactggagctggtacaactcaatcttaatggtaaaagaaaacgaaagtaattaatacgattatgagaaagctttttaatatattcttatttgtactttgcatcgtagcaatagcgggatgcaatgatacggaaagcagcgaatccaagttagaaatcaaagctgtaaatactaatttccaagctaccggcggaaaaggatacatacaacttcagtcaacaggaaatataacagcagatgttgacgtcgattggtgtgtgctgaaagaagtaaatcctaatgaagtggtattcgaagtaaaagaaaataccgggtactccggtagaaatgctttattgacaatcagtaacggagtagagacagaagcattcaacatcaatcaatccggagctgttttcatcttcggcaaagacgaatggatgctccgtaccgacaataaagcagctactctgccaataaaactacaaagttctttcgattatacaatagacatacccgcagaagctcaagaatggttgtcatttgaacagaatgcgaagggaataaatttcaaggtaaaagaaaatacctccggaagaatgagaggagctattgtcaatgtggcagcaaaagacagatcggcttcttatcaggtaatacaatatgatgttgacgagcttaccggaacatggcaaggtatgttttcagacgggcaaatgaattacggtttgaaagatgtcaccattgagaaacaggaagacggaacatacctgctttcaaacattctaaccggattgccttacaaactgaaagcaaaagccatagacaattgcctggcttttggggccggtcaaaacctaggagtcttcgaggacaatttatatctctcattcgaaattcttagctctgacctatattatgtaaaagatccttctgtaacaatctcattaggccccgtaatgttaacagacggaacattcgttttcgctttttccggaataaaagaaagtgatcctttcggttttgttttccgggtatatgaagatgcaaaactacagaaagttatagacaatctgtccatttttattaattgtattctatttaaagaagacataatccaataacatatgaaaaagatactattaactagctttatcgtggcattaggattacttggtgcaagctgtaaagatgacaacagcaccgcaagcggaggaggagaaatacttccggaccaacaggtaagctgtgagatatttatgccaactgatggcgcaaccgttattatgtcagacaaactgattatcagaggagaagggactacaaactatggtaaaatcatttctgcagaactgaaagt

SEQ ID NO: 8175 - DNA, 14841 bp, Unknown
  gut microbiota DNA sequence
cgtcactatttctatcggatagcgtcactatcttgtagaggaaaatccgccaacaacaattgctacataagtatgtcatcataattagtttatataatatatttaggcacggattacgcggattataatataagattattttgcaagaatacgtaatcctaaaaatcaataaataaacgagcctccatagtctttgaaaagactacagaggctcgttttatatcctatggataacttactgcaaagctatccaactccagattccacttatttatgcatttccacgatttgagtcggcgccatctctacattccgtcgatctacttggcgaacgacactggcagccagggataagaaagcacgtccggttacggaatcttcatccaacgcaacaggtgtaccattatctcccccttcgcaaatgctttgtacgataggtatctgtcccaacaaaggaacattcatctcttcagccagtttctttgcgccttcttttccgaagatatagtatttattttcgggaagttcggcaggagtaaaccaagccatattttcaaccaaaccaaggataggtacatttaccttatcattggtaaacatattgattcccttacgggcatctgccaaagccactgcctgcggagtgctgacaacaatcgcccctgtcatggccagcgtttgaacaactgtcaaatgaatatcactggttccgggaggaaggtctatcagaaaataatccaactctccccaagctgcatcagcaatcaactgtttcaacgcattactagccattccaccacgccacaaagttgcctgatccggatcgacaaagaaaccgatagataataatttcactccatatttttctaccggaataatcatgtcacgaccgtcgatacgttcagcataagggcgtgcatcttccacctgaaacatcttcggcatagaaggaccaaaaatatcagcatcaagcaaacctactttataacctaatttagccaaagcaacagccagattcgcagacaccgtagacttgcctactccacctttaccggaagatatgccgactatattcttcacttgcggaaggagcttgccaacttccggacgggcagcttgtttactttccgctgtgatcgttacctgcacatcaggagagacatacgtatggatagctgtttccgcagccttcaacattgatttcataaacggatcagtcggtttctcaaagatcaatgagaagctgacagtcatgccatcaatacggagattatcggcaaccatctccgcttccaccagattctttcccgtaccgggataacgcaccgttgccaatgcatctaatatcaatttaggatagagagtcattttatttactatttgacgatttactatttacaatttaaaatcaccattcgattaagtgtcagttcactttaagggcgattgttactgcacaaaactatttacttgtacttaatccgctacgtttgctacgattgtagctacgataaggatcgagctctatttctacatccggttcttgcaattgaccttcctgcggaagccggaatttgatatacttaatagctaaaccacgatcgagccattgttgttcataataagtcttgataccgagaatatcatctaccaaatcggaatgatataaatcttcggtcataaactcaacgggaagacggtttgcttcaatcatgtattttgtataggtaaacatgaagttgctgtccgttttcaggtggataataccattcggctgcaagaatttacggtaccgttccataaaataggtagaagtcaatcgcttggttgctttcttcatttgcgggtcagagaaggtaagccatatttcacttacttcgccttcggcaaaaaaacgttcaatgatttcaatattggtacgcagaaaagcgacattcttcattccggcctgtaatgattccgttgctcccgtccacatacgggcaccttttatatcaactgctataaagttcttttcgggaaacattttacccaagccgacggtgtactcaccacgtccgcagcctagttcgagcacaatcggatgatcgtttttaaaaaactcctcatgccatttccccttcatgtcaaaaggcacgttatctactgccgaataaggatattcgaacacgtgtggataactcgccatatcggcaaacttttctaatttattctttcccatatcaatcctgattaggtcgcaaaggtactgattttgacgcaaccgacaaaaagaaatggagcacagatttctctatgctccattcttctataatattgaatgattcgtgttattaaatctcaacattcacctcaacgtttacttctacatttccaccttgttgtgctttcaaatcttcatagaaagcagcatgagaagcctgcatataaggttgcaagaagaaaaatccgataccgaaagtaaagaggcaaaggatagcccaaccgatgaaactcaaatcaagcatgaacaacttcatcttattgccatccatcataaccatgctcttttcgatagctgcattgtttttcatttcgggttcttccttcagaatatacggtgtcatcgcatacgaatagtgtttaatgatgcccggaataattagtagcaacgaccacaagaaagtataaataaacactaaaactacggttcccatgattcggctgtagtctttgaatccttcaaacaagattcccaagtcaatgtcttttgctccttttatcacgctaaacatgagaatcgtgaatccgtatgccaccggcaatcctacaagcaatgttcctaccaaaggtaaataacttgttgcactgacaatagccgaataaatcaaggcagctacagccgccatcacccaatttccttgaagtgcctcacgcgcctgagcacgcagttctgagtttagttttaacatagtgaataatattaattgataaatgtgttatttcataatatatcgttattctacaatcgtcacccagccatgtgtatccggctcgtcgccatactgaattccacgcagcttattgtacaattttgtacagataggtcccggcttaccgtctttagagataacgtatgattttccgttttccaaatcatcgatacgctgaatcgggctgattactgcggcagtaccacaagcacctgcttcttcaaatgtttccagttcttcttccggtatcggacggcgttccaccttgatacccatgtcttctgccaactgcatcaaacttttattggtaatagaaggcagaatagaagttgatttcggagtgatataagtattatctttaataccgaagaaattggcagcaccacattcatcaatatatttcttttctttcgcatcaagatagaactcgcaggaataccccagatcgtgtgctttcttgttagcacgaagactggctgcatagttgccacctactttataaatacctgttccatgaggagcggcacgatcgaactcacgaatgataacgtacggattggtagagaaaccacctttgaaatatggacctaccggagttacgaacacaacaaacatatactcttcagcaggatgtacacctacttgggcacttgttccgatcaacagcggacgaatgtaaagagaagcaccggtttcataaggagggataaaacgttcattcagttttacgactttcaaaattgcttctttaaaccgttctgtcggaagttctgccatcaaaattccctggcaagtagattgcagacgggctgcgttttcttccaaacggaaaatacgtactttaccatcctttccacggaatgctttcagcccttcaaaggcttcctgaccatagtgtaaacaggttgccgccatgtgcaaattaaggtgttcgtcactactaacctctaattctccccatgcaccattacggaagttgattctcacattgtaatctgtcttcatgtatccgaatgacagattcgcccagtctatttctttcatattgttatgtattagtttattttctattgcattgaaacgcaaaaataacttttattcttcagatagcctcttttcttgcaataatttttcgacttcccggtcggcttttgtcagtttatccttgcaaaaagcaataatctcattggcttcttttattttctcactcaaaatgtcgatatccagttcgttattatctatctggcgaacgatcttttcgagacgttccattgcttgggaatatgtttctttttttgctgccacgatgattgatatttaatggttaatgatgaatgttcttacaaataaacagtcgacggatagttacttttccaccacagattgcacttctcctttcagcaaccgggttgtcaagcgatctcccggtttcagcgaagatgcatccgtcaccgctttcccgtctttgattgtaatactgtatccccggctcaagagtttatccggagaggcgtctgctatccgctgttgcaaaagttccaaccggtgagactgacgggccaacaatgctttcgccacttgtgataaatccttctttgctgccagcaaagaaaaacgagcatccgcaagtttgcggtgaacaagattgggaatacggatttggagcgcctccaaccttcgttgttcctgctcaagaagcatataagctccctgttgaagacgtacagataattcttccagatgctctgctacttccgttacctgatgaatcagaagctcggcagcagccgtaggagtctttacccgggtatgagctacagagtcaaggactgtatcatcgcgttcatgaccaataccggtaatgataggtaatggaaattgcgcacatgcagctgctagtagataagtatcaaaaccggataaatcggaagtagccccaccgccacgaataatgaccactacgtcaaattcattgatgcgggcattgatacggtctaaagccgccaatacagactcttcaacttgattgccttgcattaaagccggaaaaagttctgtataaaaatagaatccgcccggattgtgctgtaactgatggcagaaatctccatatccggctgcggtagccgaagaaatgacggcaacacgttggggaagaaccggcatttcaagttctttattcaacgtcaagactccctcctcttccaactgcaataatatttcccgacgacggcgagccatatctcccaacgtgtaagcaggatcaatatcaagcaccgtcaaactgtaaccgtataactcatgaaactgaacagttactttcaccagcactttaataccggaggtaaatagttgtccggtgctttcctcaaaatagggtttcagcaagcggtagatattattccaaatcatcccccgtgctttggctacgagattattactacgaggatctttctgcacaaattccagataacaatgccccgtcgtattggaacggacatcgctcaactctgcctgtatccaatattcatcgggcaggcattgctccagactacggcggacaagtgaattcagttctaaaagggaaagagaatccataaaaaagaacagttaacgttgagttgattgatatgctttccacaaatcgggaataccatatccatatatattatccgggaaatcagctctgtcacctgactgacgcaccaaatcaataatctgctttgccgtcagcttcggacaagcctgccacaaacaagctaccataccgcacataatcggagaagcaaaagaggttccattggcgcgacgaagatttccatccgttcccatcacatccgaatttaaaccgacagccactacgtccggcttcacacgcccgtcagccgtatttcctacagaagaaaacggcgccagttctcctctttttgttacagctcctacagttatgatattctccgcatctcccggaggagtaatcttcttccacgaacccgcgcccgaatttccggcactgcacacaacgaccattcctttatcggcagccttcgcagcttcacgggacatcaatgcataatgcccattcaagtcacggtatctataattcttcgtaggatcatcaaatgagtagtaaccaagcgatgtattcactaaatccactcctacactatcggcaaactcgatggctgccgcccaataatcctgctctaccaaattttccgaatattcgtcttcactacgcagcaaccaataagaagcttcaggagcagtgccaatcatcacatgcggctggttcatagccatacaggacaatacagacattccatgactgctttctgcataaatatctgcctccggattcacaaagtcacgcacaccgagaatacggatatttttcatggcatcaatcttatccacattatggaagccggcatcaatcacggcaatggtcattccctgtcccttaaagcctgcatcatgcaggagatcgacgcggctcatagccgcttgcgtgattgcaggaccgtaaaggctatcggtgcgcaacggtttatttatcagtgagtctctttgaaatgctctttgcgtgatacctttccacactctttctgtagaacgtacaaaaggcagttgagctatttcgctgattaaggtactgtcattacaagaaacagtaacgaaattatcccatttcccggtcacaagtacatgaacaccagtctttcgtatggcatctacatacgtcctgcaaaccggtaaatcggtagaatcaatgggcaatccctgtttctttctccgttctatagatttcttagacaaatacttttccggtttttgcaaggaatagtccgtagccgctttgtctttcagactaatccggtattttaaggtatctcccggagtaaattgggcagatacccccagatacagatttagagcgagaatcaatactataaacttcttcataagttatctttctattttaatcaatcataattcttcattttctataatcaccagcccgattcctctttgggaagcgataaaagctcctcccagcacccgtcttccatcataaaacacagcagattgtccgggagcaatggctgaagccgtttcgaggaaacggaccaacaaacgtccgtcttccagtcttttcacccgacagggaatcggacgactgcgataacgaatccgtaccgtcaaattctcacacccgaacagttcccgttcatccacaatcttatccttctccgccaacatgtattcagtttccaattggtcggcatctccaagcatcactgtatttttctgcggattgattttcaacacataagcaggctttcctaaagcaatctccagtccttttcgttgaccaatcgtataataaggtgcccctttatgtttccccagttttactccttcagagttgacaaaccatcccggtccgatttcactatccagttcgggacactgctcacgaagaaaatcacgataatctcctttaataaagcagacttccatactttctccttctttcgactttgcctcataccctttctccgcaagatactcacggacctttaccttcgtataatctcccaacgggaaaatgcaacgtttcagcacatcctgccccaatctccagagaaaatacgactgatctttcttatcatcgtctccggctactatataaatgtttccgtttttctcttccaatcgcgaataatgtccggtagctacccatgcacaattcaacttatccgcccactccgtcaaaacacggaacttaaacaacggattgcacatcacacacggattcggtgtacgcccctgcttatattcgtctatgaagttttttacgatggtctctttaaaaggaatacgctcatctgccacataatgttcaatccccattcgttcagctaactccctggcgtcctgcggttcatccccccacacacgcatggtaactcctacaatctcatatccttgttcttgcagcatcaagcaagtagcggtgctgtctatgccaccgctcatacctaccaatactctcttgtttcgttcttccattcgaattttgaaaatttacatggttacaaatgtacgagatttcaaagagaaaagttgcttttctgaaagaaaatccttatatttgaaatataccaaaagcgagaacaattatggctaaccctagattaccgggcatttccgaaaacgaagaagccttattgtatgccaaattgaatgagtacaaccgaggcagagcctcttttaaagaggcaggagtctacttggtggtgttgccccgaccggggaaaccaaactattccctttggctgtactctcccctgcccgaaaagcaatctattctttatatacatgacctgtcaccggacattaacgaatccctccgaatggccagtacaatgttttactattcaaggcgttgccttattctcatggattacaatgagaaaagaatgcagagtaacggtgacgaccttatctttttcggaaaataccggggacattttcttcatgaaattttgaagatagatcctgcctatttaagttgggtagcttacaagttcaccccaaaaatacctaaacaggaacgcttcgtccaaatagcacaggcttatcattccatacatttggatatcatgatcagaaagtcgagagagaaacgttcatcaagccgctatttgggagaattaggggaaaaactgactgacttaaaattaaaagtcacacgcgtacgactggaagacgatccatacaaaacaagagtgaacggcactaccccacagttttttgtcaagcagatactgactttaaccgatgccagtggaaacctggttattataagtattccatcaaaaaatcccagtgcggtttcatgcactctatcagggatagaacatgaataccgactgggagatattatctacattgcatcggcgaaagtatcacgccaatatgaaagctatggttcaaagtacacgcgccttagccatgtgaagttcgcaagcctcaacgtttagtccaatcgtccttgacaaaacttgccggataggaaattttatccaccactccgtctttctgacgaatccaggacgtaaatgtacgagccccctcatctaatacgatgatacgggccccgttaggcaaatgattatattccgtatttccaccggtgaagcgtccataagccagaagaatacctttccacatcactgcataatcattatcatgatcgtgtcctacaaacatacccatcacatcacccgcttctttcattgccgcaaacattcccgtattcaatttaggtgcacaagcttcctccatacgagttccgcgaagaatcgcattttcggtacgggcagcttcattgtattcaggaagaggaatatggaaaaaggcaagagccggcaaaggctgtccaccattttgcgctttataagctgcactctgctggcgataccagtttatctgatcgaatgtaagccatgcatatcccttcacatctttcaaaggagaataggaatgagaatccatgcaataaagcaaagctgcatccttctttacattagaagacgatttcacggttaatacatagtccggcgataagactgttccccggtctggcaataaattgccgggaactttacggataatatcatataactgttcccgtgccattccctgttcattgtcatgattaccaaaagtgaccacgaaaggcagtttgcgtttaactaccggttccaatacctgcaacattccggaatctgccggagcagaataaacaacatcgccggtaaaaatcaccaaatccgggcgttcatcatcaagcacctgatttatgcgttccaaagcgatatcagaagcccggttgccgtatttaaaatgcacatcggtaaattgcacaattttgaatttaccatctttactaaatttcagttcactcttttgagccatacaaaaagtcgttaccaacaaaaaggtaagtgttaagtaaatttttaagagccgaatcatatttatttgttttaggggttaagaaatcttctctatcaatacggtagcataggctgatataccttcttcacgacccgtaaaaccgagtttctcggtagtagtcgccttaatggaaatatcatccgcatcaattcccatgacagttgccatcgtctcttgcatcaaaggaatatgtgcctttaacttcgggcgttcggcacaaatggttgcatcgatattacccactttatatcctttggtagcaatcaattccactgttttcttcagcagaattttgctatctatgtttttaaattttccagccgtatcgggaaagtgatagccgatatcacgcatattcgccgcccctaacaaagcatcgcaaaccgcatgcaacaatacatcagcatccgaatgtcccaacaatccttttgtatgttccaaaagaataccacccagccacaattcacgcccttcgaccagctgatgtacgtcgaagccaaagcctactcttatcttcatattttgtataacaaatgagtactaatgaataaaaaagatcaacggatatagaaatccagcagtttttcctcttccagataaccttgcaaacgctgtccgatactaacaggacctacaccgacaggagtccccgtaaagagtagatcaccgattttcaacgttacaaactgactgacataagcgataatatcatctatcttgaaaagcatatctgctgtacagccacgctgtacttctttaccgtcgatcaacagattgaagttcagattttgaatatctttataatgctctaccggaacaaaagtcccaatagcagccgatgaatcaaaacctttacaaagctcccaggggttcccctgctcacggaactttcgttgaaggtcacgggctgtaaagtcgataccgactgtcacagcatcataatagcggttagcgaaacgggaagcgatatttttccccaatcggttgatacggactaccaattccgtttcataatgtatctcgttggaaaagtcggggatgaaaaacggtttgccatctttcagaatagcagaatcaggcttcataaaaatcaccggctccgtatttacttgtgtatgtcccagttctttgttatgctgggcgtagttcatgcctactgcaataatcttcattatttctcgttaaaattcaatcggttaaacataacagccaaatgagcatataaagacgtattctgcaccacaatattctcgggtacacgaattcggaaaggagtaaagttccatacggcttttatacctccgtctaccatcttatctgtaatttcctgagcaatattaataggcacggtcaacacaccgatatttacatcgtattctttcatctttgcctcaaaatcatcagagtgaaaaataggaataccattcaggtcttttcccaccaattccggattcacatcaaaagctgccacaatctccagcccgaaatgatgcaaacctgaatcccgaagcaaagcagctcccaagctacctacaccaaacaagaaggctttgtgcatattggtaaatccaagaaaactctccaacacttcaatcagcgcatcaatgttataccctactctcgtgcgcccggagatattgacgtaggataaatccttggcgatttgagaagcatcaatatttatttccttagagatttgtgtagaagagacgtactgctctcctttttctttcattagttttatattggacagataccagggaagtctgcgcaaggtaggctccggcactttatccgcctcttttcgtatagatgtgctcatacttcttactaaatttggtattttgcaaaagtacaatcttttttgagactgacaaccctataacagaaaaccttaatagagattaaacaaaacaatgaaaagaggttcaaattttgctcttttccataagtttaatacttttgaaaaggattaaaaatgacgagtatgaaaaataatgattggaaagatagattaaacgtagtgtattccacgaatccggacttcggctatgaaatggataacgatgaagagcaagttactctcgacaaaaacaaacaaaacctgcgagtttccattgacaaaaagaaccggggcggtaaagtggtcacattaattaccggatttataggtacggaaaacgacttgaaagagctgggtaagctactgaaaagcaaatgcggagtaggcggatcggctaaagacggagagattatggtacaaggagatttcaaaaccaaaatcatagagctgctcattaaagaaggatactctaaaacaaaaggtataggaggttaaactaaatagcattttgtaactagaaattttgaagatatgagaaaagtaacattattctttgcagcagcgttattctcactgttgtcatttgcacaagacaacaatgctgatatcgtcaaggtaggcgatagtatgcctgctttcacccttcattcaacagtgaacggttctgtaaactccgaggacttgaaagggaaagttgtattaatcaatattttcgctacttggtgtggtccttgccaaagcgaactggctgaagttcaaaaaacactctggcctaaatataaggacaacaaagatttctgcatgttagtaatcgggcgcgaacataccgacgatcaattaacggaatacaacaagcgtaaagggtttacatttcctctctacccggacccgaaacgggaagtcacaggtaagtttgccagtcaatacattcccagaagttacttaatcaacaaagacgggaaagtgatatccgccactgtcggttataaaaaagaggaaatggacaagctgatgaaggaaatagacaaagcattgaaataatcctccccaagaatgtgcctcatgttatacatggcagtttcttgaggaaaggaatgataagatcaaatcaaaagaaaaggcaactaactcgttatgaattagttgcctttcttgtatcttcaaatagagagtcttaatgaatacctctattaagttaacgtgttccgtttttaaggacacatcatagaatttgaatctgattgattattcagctttcaaagtgaaacgcttgaaatcaacaatcttcagttcagggtcagcagcagccaacacttctcttacagttttcttaccgtccatgatatcttcctggttcaataagcaaacttctttcaaaaacttgcccagacgacctttcgcgatgttctgaatcatttgttcaggcaggtgtgcagccttctctgcagaaacagtagcaatgatttcttttgctttagctacatcttcagctgtaatccatcctttagccatgttgctatccatgtgttcttcgctgtccacatgagccgggttgatgttagctttcttcagagcagcctctacagctttctgtacctgttctgcttttgtcttctcaatagcaacttcaatttctttctgttttacttcttcagaaacgccatcttcatcaatagcaatcgggttcatggcagcaatctgcatagctatttgcttagccaactgctcgttcacttccttgttgaaagcaacaatcgtgcaaagaccatttctgttcatgtgattgtaaacagcagtgcatacaccttctacagtcatgtaaccatccagttccattttctcacctgtgataccgctacggtcagtcactgcatcctgtacagtaccgttacccatcggcaatgcttttacttcgtccaaagtagcgcatttattagccacagcaagatcaagaatatcctgagtcagtttcacgaaatcagcattctgagccacaaagtcagtttcacacttcaaagcaacgataacagcacggtcaccggtagttttagccaaaacgcaaccttcagaagcttcacgttccgaacgcttagcagcaacagcttgtcctttcttacggataatttccattgccttgtcgaaatcgccttcagcttcagtcaacgcgtttttgcaatccatcataccagctccggtcattttgcgcagcttggtaatatcagccatacttacagccataataatttcctttatttaaatgaataataattttcgaaacaaaaaatgtgccaatctgccaatcaagatacaagcgtataaatatactcttgcacattagcaaattggcacattttatatattaagcctcttcgtcttccttgatgaaagcagcagctttagctgcgttgatagcttcttcgtcagacttgtcgagtctagctttcactgatttcttcttgcctttgttagcaggagcttcaccagcagcttccatatcgatcttttcagcttttctttcttccaaaccttcgatcattgcagcgcagcaagcatccaagataacttctactgatttagtagcgtcatcgttagcaggaattacgaaatctacgtttgaaggatcagagttagtatcaacgataccaaatacagggatacccagacggttagcttcgcgaactgcgatgttttctttcattacgtcgataacgaacaatgcagacggcagacgagtcaggtcagcgatagatcccaaagtcttgtccaattttgcacgttgacgagaaatctgaagaacttctctcttagaaaggttagagtaagtaccatcgttagtcaatttatcgatagtagccattttcttcacagccttacggatagtcgggaaattagtcaacataccacccggccagcgttcgattacataaggcatattaacagattgagctttctcagctacaacttgtttagcttgttttttagtagcaacaaaaagaa

SEQ ID NO: 8176 - DNA, 12208 bp, Unknown
  gut microbiota DNA sequence
ttgaaaaacgagttcggtgtgcttaaagtgaaaagcctcaaaggaggactggatttcacccaactgacaaacgaagaaattgacctgcaactgactaagtacttccgtactcatccatttatgcgaagacatgacttccaatatctttgcggaatggcaagaagtacagccatgcgacatatccggcgcctgcgcgacgagggtaaactgaaaaatatgggtggaaccatgcagccgatttatgtgccgggaagtggatattatggtaataataaagaagttagtgtaaaaacggaataagattggtcaactcaaatcaggacgagacagagtgagagtaaaaagttaccctcacctactctcacctttaccctcacgcctgtaaccccgatgaataaatggattgagcacaaagggtgagggtgtgagggtaaaacgtcaccaacatttatttgagagcattcttaatgcgagcaactattatacaagagcacctccataccgttccatattttaccggggaatcttaaccatttcaaccggctgctcctgtatcttatccaacggttgtgattgatattttacctttgagaaatcaatagcttttaagtcaatgcaacgtatcgaattgttataagctgttttataataaaccttccggttcgtgaggtcgatagctgaggtccattgcgtagcactgggaatatccggaatatcaccctgtgaatgttctataccaataggaatatcaaaattattaagcaagtggaaacattgctgcacggtatcaaagcctgtggcacgttgcggagctgtcccccggtaaaaggccgcacgcacaaaccgcgaaggaggcgtggcatcacccggaatgccgagaaaaccggagttgccaccagtcggctgcaacgtaataccgctcattttttgcacggaagcatcacccggatgaagattgacgtaattgttcaaatttgtaagttgccattcaaaaccgggggcattcgtcaatactcctacttcattctcataaaaatgcggcacaccacctacaatttccaatacaacctgacgtcccgacggttcaccgatacgccaatgtactaccgctgtcttttccagtcctacaacacgtacagaagaaagggctgccttcacctcgtcaatagtggaaaactgcgacaacaaccactccgtcacttgaaggtctgccagtgtccgctggttctgtgcagcatcatacgtctcatatcccccataatgaggaaagaaaaatagtccagccgaaagtccggcctcattgattccttcggcaataaattctttttgtacaacagccagaccaaccactccatattttgccgtaaacgttagtccattgacacccgtaggagtgaatgacgtgagctgttgaccacgtggaataatcacatactcgctttgcaatacaccgcgcgcccattcaatcgtacgggcctgcacataactaccgtcacgggatgtcagcgagattcccgtacaagctacagcctgaaaagtgctgccacatacggcagcaatccctagcaataagttctttgtcatcttcatcattatttatatatttattcgctaaaaactcaatactgtataaagacaacaaaatataggttattttagttgcagacacctctctcaagaaaactattgttttttgttcgtcccgtactttgcggaacaatatacgtagtttgcttcaatatgcaatctcttttttttggttaagcaccgggaacatacggatgagtgaaccagaagcacgacccttccccctcacgggattcgactccaatctttccgcccatcctattgaccaggctttgacagatggataatcccaatccggcaccttgtacaaatgagtccagttttacaaaacgattaaatatttcatgtttttgttcatcaggaattcctttgcccgtatccgttacacaaaaacgtacctgattttcatcttccaatgtataggaaagtgtaattgagcccttagtggtaaacttcaaggcattagtcaggaaattagatagtacttgcacgattcggtttttatcagcatcaatcacaatctgcggtgaattttcatcaaaccgcagttcgaccgcagtgtcacgttttttgtgtgagaaggtagcaatcacttcccggcaaagttgtggtacatccacccgtcccataacaagatctatcataccggcttcgattttggagatgtccagaatgtcggaaataaggttgagcaacagctcattgttctcctgcactaaagacatatatacatgacgcagctccgcctcatcggtttcggcaagcagactggaaaaaccgacgatggcgttaagaggagtacgtatctcgtggctcatattggcaaggaatgctgatttgagcctatccgattcttccgctttttctttggcctgaatcagttccagttccacctgtttgcgggtggtgatatcggtagccagttccatgattgcccaacgtccgtcgagccattttattgccatgctctggatggtataccaacgtttggtgaccggattgtagtcttcccaaaaatgaacgcctgtaaacttacggttggcatcgagcaacttcggcttcgggcagtgtttacacccattttccagacctgcattcaacattctccaacattccgcattttccggaacttctcctgcttcttccctgaaaggcttattggcaaaaatcactttcaacgtatcgtaatcactcacaaaaatattggcattgatattgtccaataccttttgcatggttcgctgcgactgttgcagcgatgtttcaacttgccagcgtttagtagcagtagatacaatttgcgatatctggctcatcagttccacatctttttcatcccattgtttgttccagcaaaagttgaacgaaagaaagccgaaatgtactcccaattgtgacaggggaaaaacagcaatggcttttacgccttgcacttcgagcatttgagtaataaagggatcaagcgaataaatatcggacgtacaaatgatatggttttcttccagcatgtcgaaccagggttttcccgcttcaatggtcatactccgcaagtaatcgatagcgggttctataccgtcgttgcaccattcgttggtgcagccatacgtaactccgtcgaggtggttttcccatgtcgccaaacggtcgacaccagtataacggccaatttcggccagtgccatattcatagcagtaggtatatccggttccaattacaaaatttgcagtaccttgataaataatgcctgccgtcggttggttgcttcgagattctcctgaatagcgatcaagtctttagatttctcttcaaccatctgttcgaggctggtacggtactgttccagttccataccgccctcttgaggttcagaatcagtggatttcatgtttaatagataacagtaaatagaattttagtttagtttcgaatccggacgagatgcgtcccacattctgcaaatatatacatttattttagaaaccaaactttttcccatcaaaacgacttcttataaatgcctaataatcgcagaattacgaaagcatatattacataatcgacctcgtcaattccaaacttcctcaatattataccggatggaatcttttcaacaatatatgacttacactgaaaaagtccttattacacttttccatctattaaaactaaatcctattcgtctgattatatcagtttcaaccctacgattgaaataatcagagtcgtcataaaaaacaaacgacccaaagttgccggttcatgaaagaacaggataccgatcaagacggttcccaccgctcctatccccgtccaaacaggatatgcagtgccgataggcaatgtttgcgcagcctttgccagtaggaacatgcttaagattacagagattacaaatcccgctccccacaaataaaaatcggtgcctgtcgctcctttaatcttgcctagacaaaaggtaaaaccaacctcaaacagtccggcaataatcaatataatccaattcatatcattctattttaatattagactgcaaaattaacaagatgcccggagctttcactttacatttgataagaaacgacggtgtaagagtatcatcaattcttcttttcctaatataactttttgtatttttgcagaataatgattcaatgcgatatggatatacacgagattataaacaggatatatcggatgccggaggcttcagcggataaggtggtcaaacatctgtcaaaaatcacatatcccaaaggttatcatatattggaggctggcaagactgaaacgaatatctttttcatcgagaaagggattgccagagcttacattcccgtagacggaaaagaggtaacgttctggattgggaaagaagggtcaaccattgtctcattgaaaagctatgtaaataatcaacaggggtatgagtcaatggaactgatggaaaactcggtgttgtatctattaaagcgcaaagacttacacgaattattcaaggaagatatccatattgccaactgggggcgcaagtttgccgaatcagagttcctgcaaacagaggaaagacttatttctctcttattcaccaccgcgtccgaacggtatatgaagctgatacaaaataatccggagctattacagagaataccattggagtgtcttgcttcttatctgggaataactccggtaagtttaagccggataagggcgaaattgaaacgggtactttaagatagaaacatgtttttcaaaagcaaacagaaaatgatatatttgtgttttgaatgaatcaaaagagagaagtcatgaatatcgaagagtatagagaatattgcctgtcagtcaaaggagcaacagaatgtatgccgtttgatgaacatactttggttttcaaggttatggataaaatgttcacctttgctacattacgtcctaaaaacggaagattctgggcggatatgaaatgtaatcctgataaatcagaagagctcatagaacaatacgaagacattttttggggacctttttcggataagaaacattggataaccgtttacttggaaggagatgttcccgataaactcataaaagagttgattagccactcggtagaggaagttataaagaagttacccaagaaaaaacaagaggaatacaggaatatgatttaggattcgaaaagtagacatatccggcactactattattgctaaaagtagagccggataaaatcactatacaccccaaaacgcacacatggataaaatcatcgtatattaaaaaacatatgtcccagaaacacttgcattcttcattccggcaatcatgaatctggagaaaaaataaatgactaattttattaactaatgcttttttagaagcatttttttaggttattttgcggaacaaatatcacgaactcgtcaaattatggattggattggccttgatttaacattccctatcaccgaccctacatggatatttctccttgtactcctaattatattgtttgctccgatattattgaataaactgcgcatccctcatattatcggtatgatcctggcaggactggctattggcgaacatggatttaatatcctggcacgagacagcagctttcagttattcgggaaagtcggactctattacatcatgttcctggctggtctggaaatgaatatgggagatttcaaagaaacgcgaaacaaagcattggtactgggattactggcttttatcgttcctatcgggattggattcgtggcaaatgtatcttatctgaaatatggtgtaatcacctctgtattattagccagcatgtatgcctcccatacgctcgtggcctaccctatcgtcacccgcttcggcatatcacgccgtcgtagcgtaagtattgccgtaggaggaacggccgtaacggatacactcacactgctggtactggctgttataggcggattgttcaaaggagaaaccggaggattgttttggatttggctggtggtaaaagtaatctttctaggggcactaattatttatttctttccgcgcatcggtcgttggttctttcaccggtacaatgacaacgtgatgcaatttattttcgtacttgcgatggtctttctaggagcagggttgatggagcttgttggtatggaaggtatcttgggagctttcctcgcaggattggtacttaaccggctcatcccacacgtctctccattgatggatcatttagagttcgttggtaatgcactttttattccttatttccttatcggagtgggaatgttaatcaacttacgtgttattttcggagagggggatgccttaaaagttgccgccgtgatgataaccatggcgctgacaggcaaatggattgcttgctggctcactcaaaagatatataagatgtctgttcttgaacgaaatctgatgtatggtttgagtaatgcacaggcggcagccacattggcggctgtgttagttggatacaacattattctgcccaccggcgaacggttattgaatgatgatgtactaaacggaacagtcttgcttatcctggttacttgcgtagtgagttcactgattaccgaacgggcagccagaaaaatggcgatggatgattcacaacctgaaaatgaatcgtcgaaagaaacagagaagattttaatatctatagccaacccggacactatcgaggacatggtgaatctttctctagtcatacgtgaccccaaattgaaagataatctcctggcattaaatgtcatcaacgacgataataactctgataatctacgaattcgaagcaaacattatctggaaaaagccgaaatgatagcaacggaagcaaatgtaccactcaaaaaggtcacccggtatgatttgaatatagcttccggtattatccattcagtcaaggagaatgagattacgagtattatcaccggcctgcaccgcaagaaaaacatcacagattcatactttggaatacttgccgaacacttattgaacggattaaactgtgaaataattatctctaaatttctgataccggtccatacaatcaaacggattgtcgttgccgtccctcctaaagccgaatatgaatccggttttcctcattggatggagcacttttgtcgcatggggagcactcttggatgccgcgtacacttctttgccaatgaaaagactaccatccgcctacaagcgtggataaagaaaaggcataaacagacgcttaccgatttctctctcttagaagactggaatgacctgctggtattgacaggacaggtaagttacgatcatttattggttattatcagtgcacgaccaggaactctttcgtatgacagttcttttgagaagttaccgagacagctcgtgaaatatttctccaacaatagctttatcgtgctgtatcccaatcagtcgggagagccattggatacgtctttcttctctaagctatatactgataccgaaacccgacattacgaaaaggtcggtaaatggttttacaggtggtttaagaaagagggataaaattagaattgaaaagttccgtttaatttataaatatcgacacatttatctatatttgtaccattagcaattttgctataaacacctaaaggaaaagaatggtatgtcaaacgtcgatttttccaaaataacagaaggaatctatcatgtgatagaaactgaagagaaaatactaaccgggctacaaaatgatacgatcacgttgaaacgtaataaacaaaatcgtaccatcaaacagattctcggacatttgattgattcggcatcaaacaatcaccaacgcatggtcagattgcaatacagtaaagatttgcttttctttcccgattaccgtcaggataatgatctgtggatagcattacaagattaccaaaatgaagattggaataacctgattcaactatggaagttttttaacctgcatatcattcaggttataaaatctgtagaccagacaaaactggatagctactggtgtgattttgaaggaacaaaggttacgctacaagacatgatagaaggttatctaagtcatttacacctgcatattcatgaaatccatgaattaatgaatgcctaaaaaggatagcggttgcagttcttttatgttctataaatattaagatgtacccacatggcaacttacactcatttcgcaaaacaacccgatgtactgaaacatctgatactctgtgaagttcttagaaatgaagccccacaagtatatgtagaaaccaattccgcatgtgccatctactccatgacacaaaccccggagcagcaatatggtatctatcatttcctggagaaagcagatgatgacaaatctctaaaagattccatttattaccaactggaaagtacagaaatggcaaaaggaaattatctgggttctcctgccctggcaatgaatgtattaggaaagcaagcaaaaaggttcgtattcttcgatttagaaaagagtgcgctggagaatgtagacatttatgccaaacaaatcgaattaagtacatccgtagaaatacatcataccgactccctgaaaggcacaatagaactgttgccttcacttcccgcatcctctttcatccatatcgatccttacgaaatagacaagaaaggagattcaggagtaacctatctcgatatcctgatacaggctactcaattaggaatgaagtgtttattatggtatggattcatgaccgaagatgataaagaatctttggacaactatattgtatccagtctagaaaaggcaggtatcaaggattacataggtgtagagcttaccatgaattcaataaaaaaagatagtatattgtgtaatcccggcattctgggaagcggtattctggctacaaatgtatcacaaacttccaaagatatcattcttgattacagtaacaaactggttgatatatacaaagatgctaaatacaaagattatgatggaagtttatatattcagcatctttgatatccacttattaatttaattacctagaacattactctacaaacagagcgtcagaaagccggagcttttaaaatcagtttccggccttttggctataaattaacttatttctttggctgattgtccacaagccatctattagccgtacatttttcgtatcgtcatcttccacgttccatgcataacttcctgaaggcaggccacgtctgtccaatatttcattgggctgattattggaaaagaaaagttccagttgcgtagagtcaggactaaacacaataaaggcagaagcattgctatcgtccaccgattccgtgcggattcctttatcaaacaagcggatacagtctttttgcacttcacaccatacatatccggcagaaccgatacagccatgttcatcccgatcacctcccacaatcggagattgcggatgctgaactaatttagaagccggcattcccggtgtatattttccggtatagaacacttccagcgtatcattcagaagcaaaccgttgacttcatctttatttgcatccatcgtactgaacgaaagggtatcattcttatcagtaacaatcgttaccatattcatggttgcatcactaacgattccttttgaacttgccacttttgacgagcaacctgccatgaggcagagcgtacctactgctaataatattgttttcattttctttaattggggctttgtttttaaattaatgcaaagataaaggttatactgccaatatttcgcttttacaaaataaattaatttccgggcagattgttcaccagctacacacaaaatgcctatattggacaacgatctattagaaaatcagcctacctttgtgatatggataatcaaaagtaaatacagaataccatgaaagaaactttgcagattcccactcccgaaacactggaagccttgataggtaaggaactttatgatatatggacttcactttgccagcttatcgagcaaaagtacaatatggaacaactatggaaccatggaggaaaaaaatggatatacgaatataaatatcgcaaaggcggaaaaacgctgtgtgccctatacgccaaagaacaaacgattggcttcttggtcattttaggtaaagatgagcgtgccaaatttgaatctctgcgagaagtattctccaatgagactcaaaagatatacgatgagacgactactttccacgatgggaagtggcttatgttcgaattgaaagacacttgcttatttaatgatatggagcgactgctatccatcaaacgaaaacccaaccgatgattgaatcagatataaataaaaggtattgtcaaagttgcgggatgcctctccgctttgatatagagaaatatctgggtactaactccgacggttcccgaagtgatgaatattgctactactgcctgaaagacggaaaatatatcgtcgacattccgatgtcggaaatgattaatatctggataaaatacaccgataagtacaatgaatatgcagataccgcttattcgccgaaggaacttagacgaatactcaacgaacggctccccaaactgaaccgatggaaacagaagttggaaaccagtaatatccatcaccaaaagattcaggatatagtcgtttacatcaacaatcatttattcgatagtttagatgcagatatacttagtacgataagcggactttccaaatatcacttcagaagagtgtttcaaaccgttgccggagaaaatattggaagctacatacaacgtttgcgcctcgaacatatagcacatctgttagtatccaccgactttacattaaatcagatttcggagcaaacaaactatcagactaaattcagtctggcaaaagccttcaaaaaacattttggagtgtcaacctctcaatatagggagaagtataagccgatgtatgacgaacagcatgcggttatcactcctgaaatccggtcgattctgccgatgaaagtattttgtatcgaggtgggtgaaaagtataaggatgaactccgatacaaattaatatgggacaggctcaccaactatgctagacagcgcaatgaagaaaagtcgaatgataagtttgtcagccttagtatggacgacccggccatcaccccaatagataaatgtcgcttctatctcggggtcataatcgataacaaagaaaatgatttccagccgggagtgatagaagttcccggtggtcgttatgctatattcaggcatatcggtgactactctttattgcataaattctaccggactatttatgaagagtggttcccggaaagtaaatatcgtcctcaaagcacctttagctttgaaatgtatatgaaccgccctgcctccacccttagaacagaactaattaccgacatctatattccggtcatcaagaaataattaattatcaaccctctaaaaacaatgtattatgggaaaaatttcagaaatcatgctattgaagcaaccggaacaatccgctttggctgttgaagtacaaacagatatgaacggaatgtcggaagctatcgggaagaattttgtaaaaatagactctttatttaaggaacagggtgaagtcactaccgacatcccctacgttgaatatcccaactttgaaagtctgacggaacaaaatatcagaatgattattggtctaaagtcaaccagagagttacaaggtgaaggggatatacggtctataacgataccagaaaaaaaaatagtttcctgcctacatagaggaacttacaaggaactggctgccctgtacaacgagatgatggaatggataaaaaacaacggttacaaaccttcgggaacatccatcgaatattattacagcaatcctaacgtacccgaagaagaacaagtgacgagaatagaaatgccactattatgaatgttttcttcatctagttatttctttcttcctatcaataactatcgaagatacattccagttttcgtttaacttaagtcaaactaacgcttgacttaagttattctttcgcttgacttaagtcaaacgaaaactcatt

SEQ ID NO: 8177 - DNA, 9676 bp, Unknown
  gut microbiota DNA sequence
tcgactccctaaaatgaggttatacataaaaaagaaagtgtggagtcgtctgtttatctatcgggaggttctggtaaacctaaggaacaaataaacaataccccacacttgtatagatatgcgcataggtaacacatacgaaaatacaagtgatgagtgttattgttatccctgttccttttgaaatttaccagatttcccgaataaggataaaagcaaaacactttcatctaataaaatgtaatgtcatataattgcttatgatgacagtgcaaatatagatatattttgcaatataacactctggggcattgttttttttaggtttaagtatagtcttcgttaacaatcaatctcttattctatcaaatctatctcatcatccatttcttcattctcatcatcatgtgaataagattcgggtatatagtcaaataaaaacagtttttcattctgtatttcatcttcaatctcttctgcaaaatcaatgtttacgtcaatatcatcacaacaggcgtagttgtcgcgatattgttgattacgtttcatttcttgctgaaaaaaactgctaccaaataatgctttaaatagattcatagttttaatgttaaacgttatattataaatgtctttttattgcttcctcataaattttccgtattcgttcccgaagatgtaacggttcaattactgtaagtgaactactacgtgagagcaatgccattacaaaatcattagtaatacgaaggcgtaatctgattcgaaattccatctcattgtccgtaatgatttcttgtgaatgatgcaaaggaatcgatttcaagaaactgccatctaatgcactatagcttagttcaatattttctactggaatatctgtctgattccagatgccgtagctgtctttaaataagttgtttgcatcaatattcatattccttttgaaggtttcctcataaaggatttggagattgcggatacagtctatattgaaagtttttaatatgttgttgtcataggcgaggagataccatctttgctggtcttctttcagataataaggtaagactttctttttgcgtactttgtctccttcacgtacataaatataactgaattctaccgggtgaaagaatttaatggcttttatcaatgccggaagacattcactgtcgtttggtcgatgatgttcggcaagaacataggtgtgtaggttggaagttttgtccaaagcattcaataggtcgaagtttagcagaagccgttcgtactgctcctttttcaaatcgtcttcctcattgatataataaccgttttgtttcttatcaaaacagatgcggataccaaatagatcttctatatctttgaagtctcgctgcaaagttcttatgtctacaggtgttccatctcgttcttccatgcgatgtgtcacgtagttctccaattctttacgtggcacatactgttgaggtccttttaatttattgataatgaccagcattcgttgcattccttcccgtttcttgcccatatttggtattaattttaattatcaagagcaaagataatgtcacgtgacgacaaaacatgtcgttctaagaaaatttctaagaaaacaaagggattttgatacgtatgcccttgtttttttatacttttggtgaaattttcaaaaggtacgattaaatgctacatattgagaacatttgtattgcttttgggacagaggttcttgtttccggttttaatatgaaattggaaaggggagaaactgcctgtattgtaggacaatctggctgtggaaagacttcgttactgaatgcgataatgggttttgttccgttgaaagaagggataatcaggataggaggaatggtactggataaatcgactattgatacagtcaggcggcagattgcatggattccccaggaattggcattgcctttcgaatgggtgaaagagatggtagctctcccgttcggactgaaagtgaaccgttctgtccctttttcggaagaaaggctttttgcctgttttgatgaattgggactggaacatgaattatataccaagagagtgaatgaagtgtcgggcggtcagcgtcaacgcatcatgcttgctgtagccgctatgctcaataaacctctgattattatagacgaacctacttctgctttggatgccgattcgaccggtagggtcttgtctttcttccggcgacaggcggaaaggggaacagcagtgctggccgtatcgcatgataaggactttgcttcgggttgtcattatttaatagaattgtaacgattggagagaactctaatacgaatcggatagaattgttaagaatacactgtgggaacgattgatatatcatattataatctttttataggcttgcttctgcttgccatcccgttcttttatctttggaagtttaaaacgggactactgaaacctgccctgattggtacagtacggatgattatccaactgttctttatcggcatgtatctgaaatatctctttttatggaacaatccctggattaacttcctttgggtgataattatgatattcgtagccggacagacagcactggtgcgtacccagttgaaacatcgtatcttattaatccctattacggtaggatttctttgtagtgttgtactggtaggcttgtactttatcggtattgttcttcaattggacaatatatttagcgcccaatactttattccgatattcggtatcctgatgggtaatatgctttcgagcaatgtgatagctttgaatacgtattatagcggattgaaacgtgagcaacagttgtaccgttatttactggggaacggagcaacaaggcaggaagcgcaggctccatttatccgacaggccattattaaatccttcagtccgctgattgcgaacatttccgtgatgggattggttgctcttcccggcacaatgatcggacaaattctgggaggaagcagtccgaatgttgccatcaagtatcagatgatgattatggtgattacttttacggcatctatgctgtcgctgatgattactatttcattggcttcacgccgatcttttgacgcatatgggaaattattagaggtaaccaaagaaccccgaaaatgacaattaccgatcagatattccgtaaagtggctgaaacttctattccgcatttttttataacagtggagttttcggcatccggcactgaaatgccggaacatatcgaatcgttcctgcgggaaaagtacaaagtaattcttcgtggagccagcgggcgtaaatttatctataaagaaggagagtggcggcttatttttactttctttcctaccgacagggtggtagacgaacggtatgcgctgaaaaacaaagtacagatgaaaagcgaaagatagacgctaagacaacggggtatctttgcttttagctccggttgtgagcacattgattacttgcctttcaacattccccataagcagcgaagctgcacgaattgttctccgggttgcacatacccgccttcaaacatcttttccgacactttaaatttggaaagatgatggcgtatgtacgtctctacagccggggattgttttttgacgaatgacatcaaatcgacctttccatcttcacgaatgagcacatgggctttgatggtacgaaagccgtactctttgcagtgtttggtttctgctttatcaatccagaagatagcagtagctttgaccgtatctgccgtgcaatcttcggcattgtcaatttctgtagactcggctacagccgtttccgtattatcactctttttgagttggcaggaggtcgtcacaactatcagcaacagtagagtcagaattgttttcatcgtatttattatttagtggaagtaaaaatacagattttcaataaataacggaagttttacgcagaattttataattagtttttattccggcactgatttttatccatatttgtccgatgaaaacaggcaaaaggcaaaaagaatatacactctctttgccttttgcctattgataaaactgaaaaatgaaatcaattgtttaatctgaaactgatgtagatatagttagggtttagcggaaatctttcagttcttcctgtaatttctggcgtgtgaagaagatacggctctttacagtgcccaacggaagattcagtttttctgcaatttcgcggtatttgaatccggaaacgtgcatggcgaacggaactctgtattctttcggaagagcattgactacgcggtgcatctctttcaggtcgtatgtcttttccgtactttcaaaccctgcatcttgcggtaaattaagatggtagagattgtccgtatggtcaataaatgtctggtcacgaactaccttacgatagttattgataaagatattgcgcatgatggtatacatccatcctttgaaatttgtatcaggtgtatatttttcttcgttatctaatgcttttaatgaggtttcctgcagcaaatcgttcgcttcttcgcggtctgttgtcagtttgtatgcgaaacgtagtagttcttcctgaacgcctaccaagtcttttctgaagcttaaacttttcatatgtgttgtttttaaaatgtgagtattcgttgttaaaattttgatgttgcaagtttaaggtattttgtcgatcccgctgggggagaatccgacggaatttaggggaatttctatcatcggatagtttttaggtcttatttgatagttttcgggtggtatttgatatctttttacggtggtctcaagaaaacggataacgataaattctctaaaaaacgaccgtttagtatgattattccttttttatttattatatttgcaaccaaattttctacaaataatgaaaattaagcaaatagtaagcgcccttgaacgattcgcgcctctgccattgcaagacggctttgataatgccggcctgcaaatcggattgacagaagcggaagcaacaggggctttgttgtgtcttgacgttactgaagccgtgttggatgaagcgatcgcgttgggttacaatctcattatatctcatcatccgctgatttttaaaggatataaatccattacgggcaaggattatgtggaacgctgtatattgaaagcaataaagaatgatattgtgatctattcggcgcataccaatctggataatgtacaaggtggagtcaattataagatagccgaaaaaatcggattgaagaatttgaaagtgcttgagccgaaagagaataacttggttaagttggtgacgtttgtcccttacgcacaagctgacgcggtacgcgaagcactgtttgctgccggatgcggaaatataggcgactatgattcatgcagttacaatctgaaaggagagggaactttccgtgcaaaagagggaacgcatcctttctgtggaacaatcggagaactgcaccacgaagaggaggtgaggattgaaacgattcttccttcctttaaaaaggcggaaaccatcaaggctttattggctgcccatccttatgaggaaccggcattcgacatttatccgttattgaacgactggtcgcaggcgggatcgggaattgtcggtgaattggatgaatcggagacagaactcgaatttttgaaacgcatcaagaagacattcgaagtgggatgtttgcgtcacaacaagttgaagggaagagagatacagaaagtggcattgtgcggcggtgcaggtgcatttttgcttccacaggcaatccggtcgggagcggatgtttttattaccggcgaaattaaatatcatgattatttcggccatgaagaagatattctgatggcagagattggtcattacgaaagcgaacaatatacaaaagaaattttttattccataatccgggatttatttcctaattttgcactccaattgagtaaaataaatacgaatcccataaaatatttataagtaaaatggctagagaagcaaaaaaagatccgaatgagttgacggtagaacagaaactgaagacactgttccaactgcaaacgatgttgtctaagattgatgaaatcaagacattgagaggtgaacttccgttggaagtgcaagaccttgaagatgaaattgccggtttgagtacccgtatcgacaagatcaaagctgaagtggatgaactgaaatctgctattgccggcaagagagtagaaatcgaaacagcaaaggcttcagtagaaaaatataagtcacaacaagacaatgttcgcaacaaccgtgaatatgacttcttgacaaaggaaatcgaattccagacattggagatcgaactttgcgaaaagagaatcaaagaatattctgctgataaagaagaaaaagaggctgaagtgaccaagaacgatcagattcttaacgaaagaatgaaagacctggagcagaaaaagagcgaactggatgaaattatctctgaaaccaaacaggaagaagagaaattgagagacaaagctaaagacttggaaactaagattgaaccacgtctgttgcagtctttcaaacgtatccgcaagaactctcgtaacggattgggtattgtgtatgtgcaacgtgacgcatgtggtggttgctttaacaagattccgccccagagacaactggatatccgttctcgtaagaaagtaatcgtttgcgaatactgcggacgtattatgattgacccggaattggctggtgtgcaaatcgaacacaaggtggaagaagctccggcaactactaccaaaagagctatcagaagaaaaactgctgaataaagaaagcagtgaagtagtaagtaaagttactattttgatatataaagtaagccctgcagcaatgcggggctttttttgttttagtaagtgcccgtataaagggaaatcgaatacttcaaaataatattgcgtcgcgtgggagttttactccaattttactccggtaaacaaacttaccctttagttgttatcttttcatttcataaaaacctgaactgatatgagtatacgagtgtggggcacatcgctccttatgtttctttcaactgtaactgcggttggacagactgcaaaccgttatttgaaagctccgctccctaacgattgggaagagagcggggaagtgtttcaacagatacttccggtggatgaccattggtggaagtcattccaagacgccaaactggactctttgatagctctggcagtagatcgtaattattccgttgcaatggcaatcaaccgtatagccgctgcccgtgccaatctttggatagaacgtagtaatttctttccttccatcggactgaatgcagggtggacccgtcaggaaacaagtggaaataccagttcgctgcctcaaacaacggatcattattatgatgcttcgttaagtatgagttgggagctggatatctttggcagtatccgcaagcgggtaaaagcacagaaagagaattttgccgccagtaaggaagagtacacaggtgttatggtttcgttggctgcggaagtagcctcggcctatatcaatctaagggaattgcaacaagaacttgaggtggtgaagaaaaacagtgcttcgcaggaggaagttttgaaaatcacggaagtacgctataataccggacttgttgccaagctcgatgtggcacaggctaagtctgtgttgtataatacgaaagcctccattcctcaactggaagcgggtatcaatcagtatataacgacattggccgttttattgggaatgtatccgcaggatattcgtccggttctcgaatccggcggaacactgcccgattacatggaaccgatcggagtggggctacctgtcgatttgttattgagacggcctgatgtacgaggtgcggaattgagcgtgaatgcacaagcggcattgctgggagcctcaaaagcggattggttgccgaaagttttcttgaaaggatcatttggatatgccgcccgtgatttgaaggatctcaccaaaagtaaaagtatgacttatgaaatcgctccgtcattgagctggactattttcaacggaggacagttggtgaacgcaacccgactggcaaaagcgcaactggatgaagcgatcaatcagtttaaccagacggttttgactgccgtacaggagactgacaacgctatgaatggctaccggaattcaatcaaacagattgtcgccctgcgggaagtgcgtaatcaagggattgagacattgaaactttcactggaattgtacaagcagggactctcgcctttccaaaacgtactcgatgcgcaacgttctctgttatcttacgagaatcagctggtacaggcacaagggagttcacttttgcaactgatagccctctacaaggctttgggaggcggttggagagaataaaaaatcaatcaaaaaatatataacctaacagatatgaaaaaactgatgtatatctttcttgcactgcctatattgacaggttgtaaggagaagaaaagtacaggagcgatgggaggtatgccaactccggaaattagcgtgaccaaacccatagtggaggatattactttgacgaaagattacccgggctatctgacaactgaaaaaacggtgaatcttgtggcacgagtgaacggaaccttgcagtctacctcgtatgtccccggcggacgggtgaaacaaggacaattgttgtttatcattgaacctaccttatataaagacaaggtggagcaggcagaagcagagctgaaaaccgcccaggctcaactggaatatgcccgtaataattatagtcgtatgaaagaggctgtaaagagtgatgctgtcagtcagatacaggtacttcaggcggaatcgtctgtggcagaaggggttgcagctgtcagcaatgcggaagctgctttgagcaccgcccgtacaaacttgggatattgttatgttcgtgcgccgtttgatggcactatcagtaaggcgacggtagatgtaggaagttatgtaggcggctcgttgcagccggttacattggctactatttataaggataatcagatgtatgcttacttcaatgtagctgataatcaatggttgacgatggctatggataaccaacaattacctgccaatcttccgcagaaaataatggttcaactgggaaaggagggaactgaaacttatccggctgccctcgactatctttcacccaatgtagatttgaatacaggaacgctgacggttcgtgccaattttgataatccgaaagggatattgaagagtgggttgtatgtaagcattactttaccttatggagaagctaaaaatgcggtgttggtgaaggaaggttctatcgggaccgatcagttgggtaaatatttatatgttgtaaatgattcgaatatagttcattaccggcatattgaaatagggcagttggtcgacggcactttacggcaggtagtgggaggactttctccgcaagaacagtatgtcacagaggctttgatgaaagtcagagacggaatgaagataaagcttcttcctgattcttttcccaagagaggaaagtaaagtcctttgctaactgattgaccaacaaatgaaatcaataaaggcgatg

SEQ ID NO: 8178 - DNA, 16330 bp, Unknown
  gut microbiota DNA sequence
tagcgtagggcaacgccctacgtaaaaacggcaatctgaatttgcgccctgaaagggcataattgtatacagttccgccctttcagggcttgtggccgatgtgcttttttcgtagggcgttgccctacgttatataattaagccctttcaggacaccccaataaatatataattgtaaggctttcagcctaaccgctaaattcccatttattattcttcactgtcaaaatcgaaatcaaagtcgaaatcatccatgaactccggagttgtaaattcttccagttcccggcggtctttcttggtcggtcgtccggttccacgtgcacgatctacgaatccgctgattttactcatttcaagcagttcgtattgatcgggagtagttacgttttccatcatttccgatacaagtttggctcccacacgtttttcaatagtttgtaataccttgaatgaataagtgataggcggtttcttcacctgaataacgtctcccggttttatcatacgggcagctttggctaaagaaccgttgatggtaatgcgtccttttttgcaggcttctgctgcaatcgtacgtgtcttgaagatgcggacagcccacatccatttatctattcttgcttcggccattttagttagttatttagtgataaataattctttggttagtattagttgacgttgtcatttattgctaaccattcattgtcatctttattttttttggggggctagtccattattttttattgaactggttcatcgtgatgtcaataccggcgaggcagaaactttttataatttcccctgccatctccagtctttcatccattgttttccaatcttcgtcagtgaagtgtccgagtacataatcaacctgtccgccacgtggaaaatcatttccgataccaaatcgcaggcgggcatagttttgagtgcccagaatagcggcgatatgcttcaatccattatgtcctgcgtcactcccttttcctttcaggcgtaaagttccaaagggaagagccagatcatctactacgatcagtacattttccaatggaatattttctttctgcatccaatagcgaacggccagtccgcttaggttcataaaagtcgatggcttaagcaaaatcaactggcgtcctttgatagaaaagctggtagtgaatccatatcgtccatccataaaaggaggagcgttattgattctagccaatgcttctactgtcatgaatccgatattatgtcgcgtttcatgatattcgggaccaatgtttcccagtccgacaactaagtattttatcatcgtatttccgtaaaacagttcattaatatagaaagagaaacgcagattaatacaaattaatgcagactgaacatctgctttaatctgcattaatctgcgtttgaagtatatctctttacagggataatctcaattacttaccagcggctgctgctgcacctcttgctgcacgagtcaacttaacagcacatacaacggcttcttttgcgctaatcagttcaagaccttcgaagctcaattcgccaactttaacagtcttacccaatcccaggtgagaaacgttaacggtcaacttttcaggaattacattgtacaaagctttcactttgatcttacgcatctgcagtgcaagtttaccaccggctttcacaccttctgcaagaccttccaactgtacaggaacttccattacgataggtttagcttcgtcaatttgatagaagtcaacgtgtaggatagtatcttttaccgggtggaactgaatatctttcaggatagcgtttacttttttgccatcgataatcaggtctacaacgtagatgtgcggagtataaaccaagttacgaagtccttcgttagtcactgtgaagtgaactacttcattacctccgtaaagtacacaaggtacaccaccgttcttacgaatttctttcaaagctcttgcttgttctgaagagcgttctgcaattgttcttgcagttccttttacttcaattgatttcatttctttaaaaatttgtgttactctaaattaagttagtttgcttaattcaccatcacacgatgtggattatcacacgatgttgcaaaaaagcggtgcaaaagtacatcttttttttgaaatatcaaagagttactttcttaaaagtcaatatcaatcttaatttcgctctccaatttgttctcctgggcttcttcgattgctttccgttcattttcttcatcagcttcgatgttcaggcgggcgatatattcgtttgcgtcgttgcactcaatgaaattgactgcttcttcgagtcctgccataaacttctgaaagtcttccctatataggaagattttgtgtttctcgaaactaacttgagaatcatcgccttctcccgttatcacttttttgctctctgtaatagccaggaacatttcatctttacgattcttttttacgtcgaggtaatagatgcgtttacctgccttaatggacttggagaatacgatctccttatcattcatgtctgcgctcattttcttttttaaatcttccatatctttcggtccgtttataatcggcttcaaaattggatattttttttaaactgtcaaaagaaaaagcgcagagaatcaaatactgcattaaaaaatgtgatttattagtggaaactcattaaaaatatctacttttgcagttcgataacaacagtattaatttgaattatgatcaacagagttcttattcgtcttaagattatacagatagtatatgcctattatcagaatggcagcaaaaatctagactcagcggagaaagagttattctttagtctttcaaaggcgtatgacctttacaactatttgttaatgctgatgatagcattgacagagtatgcacaaaaacgtattgatgcggcaaaagctaaattggcacctacgaaagaggagttgtatcccaacaggaagttcgtagataacaagtttattgctcaattggaagtcaataaacaattgtccgagtttatagccaatcagaaaagaacctggacaaacgaccaggattttatcaaagagctttatgagaaaattgtagaaaccgatatctataaagattatatggcttctgatgacaactcatacgaagctgatcgtgaactgtggagaaaaatctataagacatacatctttaataatgattctcttgaccaagtattggaagatcagagtctgtattggaatgatgataaagaaattgtagacacgttcgtcttgaaaacaatcaaacgctttgatgaaaagaagggtgccaaccaggaactgcttccggaatttaaggatgacgaagatcaggagtttgcacgtcgtctgtttcgtcgcaccattttgaattctgactattatcgtcatttggtgagtgagaatacaaaaaactgggatttggaccgcatcgcgtttatggatgtaatcattatgcagactgcattagcagaaattcttagtttcccgaacattccggtcagtgtttcgttaaatgaatatgtagagattgcgaagttgtatagcacagctaaaagcggtagctttatcaacggtacgctggatggaatagttaatcaattaaaaaaagaaggtaagttgactaaaaactgatacctttgtccatatagtagaaactaaaacagattatttatgaacgtattgactgtattattgcaagctcctgccggtgctgccggaggtggaagtatgatgtggatcatgctgatagctatgtttgttatcatgtatttctttatgatccgtcctcaaaataagaagcagaaagaaatagctaatttccgtaaatctcttcaggtaaatcagaatgtgattactgcaggtggtatccacggaacaatcaaggaaattactgacgactatatagtacttgagattgcttctaatgtaaagattaaaatagacaagaattctatattcgctgatgcttcagcggctagcaatcagtctaaataaatagttggtaaataaatgcctatgtttgatcgtaggaatataaaatatacatatttaaaactatctaagaaaattaaggattttctgctcagtgataagagcagagagttcttaatttttttatttttcttcctgatagccggtggattctggttgcttcagacgctcaataatgattatgaagcggagttctctatcccggtgcgaatgaaagatcttcctaacaatgtagtgttgacttcggaacctccttccgaacttcgtgtcagagtgaaagataaaggaacagtgcttctcaattatatgttggggaaaagtttctttccggtcaatctaggttttcttgattataaaggaaaagataatcatgtgaaaatttatgcttccgactttgagaaaaaaatattaagccaactgaatgtatcctccaaaatcctatcgatcaagccggatacattagaatatatctattccgaaggaaagtccaagctggttcctgttcgttttcaggggaaagtgacagccggacttcaatattatgtatctgacaccatttgtaagccggactctgtattggtttatgctccggaaggaattttggatactataacaactgcatatactcaaaatataactttggagaatatatctgatacaacccggcgacgaattccgctgacttctgaaagaggagtgaagtttgttccggcttcggtagaaatgactttcccggtggatatttatacggagaaaacggtcgaagtgccattacatggagttaattttccggcagataaggtgttacgtacttttccttccaaagttcagattacttttcaagtgggcttaaaacggttccgcagtataaaagcaagcgattttatcatcaatatctcttatgaagaattgctgaagcttggctctgataaatatacggttaaattgaagtcgtttccaagtggaataaatcaaatacgtattgttcccgagcaagtggacttcctgatagaacaaattacttctaatggcgattaagattggcataaccggtggcattggtagtggaaaaagtgttgtttccaggctactcgaaataatgggaatacctgtctatatatcagatatagaagcaaagcgaattacacagacagatccggtgattcgccgggggctttgtgatctggttggtcaagatgtgtttcagggtggagagttgaatcgttctttgttggcttcttatatgttcggtcatcaggatcatgtgcggaaagtgaatgagattattcatccgcaagtgaaagaagatttccgacaatgggctgcccggttgaaaagtgaactgctggtgggtatggagtctgcaatactggtggaggctggttttaaggatgaagttgattttctggttatggtatatgcgccgctggaagtgagagtggaacgtgctgtaaagcgggactgttcgtcaagagaactggtgatgaagcgtatcgaagctcaaatgagtgatgaagtaaagagaagccatgccgatttcgtgatagtgaatgatgatgaaacaccgttaattccacaggttttggagcttatttctttgctatctaaaaataatcattacctttgctccgcaaaaaaataattaataaataaaaggatatatactatgttgaagactatcttgtctatctcaggtaaaccgggattatacaaacttatttcgcaaggaaaaaatatgttgattgttgaatcagtcaatgctgaaaagaaacgtttccctgcttatggtaatgaaaaaattatctctttggcagatatagcaatgtacacggacgatgcagaagttcctttgtatgatgtgttggagtcaataaaagagaaagaaaaatcagcgcaggcttctattgatccgaaaaaagcgactcccgaacaattgcgtgaatatttggctgaagtattacctaattttgatcgtgaacgtgtatatgtagccgatattaagaaattggttgcttggtataacatcttaatttctaatggaattacagaattcaaaccggaaggagagattaaggaagaagaagttgcagagtaatctgtatagtttatttaataggaataaagaacatgataatcatttaaggtggttatcatgttttttttatataaacacttgtaggtttaggaaaaaattagtattatttgggtaatcttttgcaataataaatatcttctacttatattgtaaataatgatgctttttatgtatctttgtcgctgttcaccattcttgggaatatagctcgtggatgctgaataacgttttttaatgttgggtatggagacaataacaaataaagaagtaaacgtccgtttggacaatgaaaaagggacattatgcctgacaggtttgttggcaggtacaatggtattcctttacgattcacagggagaactaagaggcaaacataaatttgctttgccttcattgactatggaaataccccaaccgggcacttatgttttggtgatgagtcatccgaattgccaaccggaagttcggcgaattacatatttaggaatataaaaaaggggctgcctaacatgtttctttttaacgatttcacccctatcagagttcaaacaaactctgataggagtgattttcaattttagagacttgttagacagccctattctatttgaatgatgacttttaatttctgaataccaatccgtttccgtcagcatcaacgataattgctttgcttcggtcgacttcctgtgatagtaacttcttggatagatcattcagcagatagcgttgaatagccctcttcaccggacgagctccaaattcaggatcataacccacttgcgataagaagttcaatgctccttctgtcaattgcagttccactccgttttcggcaagcattttctgtactcctttaatttgtaaaagtacgatttgcttgatttctttttcgttcaatggtaagaacataatcgtttcatcaatacggttcaggaattccggacgaattgtctttttcaacatattcataacttccttcttcgtttcttcgattacttcttccttattggaaccatgcaacttctccatctgactttgtatataagaactgcccatatttgaagtcatgatgataatggtatttttgaagttgaccacccttcctttattgtcagtcagtcgtccgtcatccaatacctgtaacagaatattgaagacatccggatgagccttttctatttcgtcaaacaaaacaacagagtaaggtttccgtcgtatagcttctgtcaactgaccgccctcatcgtatccaacatatcccggaggcgctccgaccagacgggagacactatgcttttcctgatactcactcatatcgatacgagtcatcatcgtttcgtcatcaaacaggaactctgccaatgcctttgctaattcggtcttacctacgccggtggttcccaggaagataaatgacccgatcggacgtttcggatcttgtaatccggcacggctacggcgcacagcatctgccaccgcttcaatcgcttcgtcctgaccaattacacgttgatgaagttcttcttccaagtgcaacagtttatctttttcactttgcagcatcttgctgacaggaataccagtccagcgggaaacaacatcagcaatatcttcagcgtctacctcctctttaatcatggctttatcgccttgcatatcacgcagttgtttttgagtatcttctatttctttatccaaagcctgaagtttgccataacggatttcggctactttaccataatcgccttcacgttcggctttttctgcttcaaatttaagattctctatctcaaccttgttctgctggattttatccatcagcgttttctcactttgccatttagctttaaaggacttttcctgttctttaagctcggcaagttccttaccgataatttccagtttcggtttatcgttttcacgtttgatagcctcgcgctcaatttccagctgcttgattttacgggaaatctcatccagttcttcaggaacggaatctacttccatacgcagtttggctgcggcttcgtccatcaggtcaatggctttatccggcaggaaacggtcggtgatgtaacggctactcaattcgacggctgcaatgattgcgtcgtctttgatacgtacgtgatgatggttctcgtaacgttctttcaatccacgaaggatggaaatggtactcaagttatccggttcgtccacttgcacgatttggaaacgacgctccaatgctttatccttttcgaagtatttttgatattcgtcgagggttgttgctccgatggaacgtagttctccacgagctaaggcgggctttagaatgttggcggcatccatggcaccttcaccttttccggcacctaccagcgtgtgaatctcatcaatgaacagaataatatcaccttctgatttcttcacttcattgacaaccgatttcaatcgttcttcaaattcacctttgtactttgcgccggcaaccagtgctcccatatccagtgaataaacttgtttgttcttcaggttttcgggcacgtctccgcgaagaatacgatgtgccaaaccttctacaatagccgttttaccggtacccggttcaccaatcagaatcgggttgttctttgtacggcggctcaatatctgtaatactcggcggatttcttcatcacgtccgattacgggatccagttttccgctacgggcagcttcgttcaggttgatagcatacttttccaatgattgataagtatcttcactggattgtgatgtaaccttttctccttttctcaattcgctgatagcgttgcgcaattctttttccgtcataccggcatctttcaagatcgtggagacggtactcttaacagtcagcaatgccagtatgataggctctaatgaaacaaactcgtcgcccatttctttagaatactgtgttgctttctgcaaaacttcgttggattcacgacttagatacggttctccgccggatactttcggcagggagtcgatttgcttgtcgaccacgagagctacttgctgtccattcataccaagtttctggaagatgaaattagtgacgttttcgcctactttcattactccctgcatgatgtggacaggttcaatggcttgttgtccccggctttgtaccaggtttacggcctcctgtaccgcttcttgagatttaatggtaaaattgttaaagttcatatctttgttctcctttcttatttcacgtttttaataacacctaaaggggctcaaaagatttgccaagtataaaaatatgacaaaatagcatgagtattaaggagttaaaggacaaaatgaccttttttatctagatatgactgacgaatttaccatatattccacagaataggatgggcttcagaataaaatgggttttcaatgaagtctactattctgtggagaaacaattgttagaagattcttatcgggaagtctctaagctctctttctactttttttgcattaaatttgtgtgcgttgaaattctttcccaaccattcccgatattcttttgcagcttttgagtgtggttgttttaatgcctccaacatctcttggtaaccatatattcctccgcaatcttcgggtggacatgcatttgctccgtctatgagaaagacgccttgtgtttcgtcctttttatatgcttgttgtgattccagggtaatccgatgcatccagctatctccgaaatcatattcatatttaatatgtgagccttttcgggtaaggatctctcctaaagagagagagtaggagttgactgttttaacgggatcaaacaaaaaatcgtcatcggattcttcggttgtatatattgttttccctttttgaaacagatgcatgtgatagccttcccaacccattgcggtatttatgacatccgcaaaactttccagacggatgtcggaagggacttccactatacgatatatttccgggtcggaatcaatcaaagaaatttttatattgagttttttagaggtttgttctccaatgtagaaagagttgtcgtattcatcatcgtcaaactcgtcatcgtattcttcatcaaattcgttatcatcaaattcattattctcattgaaggcaaagaactcattcaataagttcattagttcttccatactgtccacctccaatcccttcagttctgcgtgtggcatttctttttttatctctttgattccttttctcgttaatgtattgggtattttgaatcgtttatagattttttccaatataggcaacgtttctatggcacggatattcatcaacgtatttgtgatatagtcaattatcgcgatattattatcttccccacgctcaaactgatcgtaataagaattcaataattggcagaaccagttaataatttccaatcttcgttcagggttggttatggcaatttgtgcgacagcactacaaatatcttcttttccgaaaggagcgattccgtcttcattcatgaaactaagtagcaaaggcaattggttctgcccgagttggtaaatgatggcaatggtggcttcatcctgtacgaggtgacaataggaagcgaggaaagtcggactttgccgcattatttccaagatgatatttaaagaagattccattcggtaatgttccattgcccagtagatataccataacttaaaaggcctgtcttcttcttttgcgttttcgagaggtccttgataatggataaatagatgcaggataaagttgcgcaaatctttttctaattcggcagcgggtactgtcgtgcaatcttttttaaactcgtcaaatgggtagtctttgcatgtctgcatatcccaaagcctttgcaggtaagctgcaatgggggttgcttccgagctatagtccggatgctgatagtgatagaaagcttcttccatttgttggtagattttttctaatccgttattgcttaatatatctatcacttcttgttgttcttcgggtgtaaacaagtttaatacttcggtcataatcgtatcgagatcaatcgaagtttggttctttttcttattcattatcgtgtcatttaataaatttgtcaattttctccaaaggtacacctctttattgagtaatagcctgataatttctcttttttttaaatattctttccggagaagataagaaagtttatctttgccctatagtagagagtaaatctgttttctaattgatgactaatgatatgaatgataaaccacaaataaaattatcagagacagtggtgctgattgatgccgctttcctgaattttgtaattacggatatgaagagatacttcgaagagactttgcaacgttctttacaagagatcgatctttcgatgttgactacctatctgactttggatgctgggattgcggaaggaaaaaatgaagtgcagtttctttttgtttatgataaagagtcaggtaatcttgcgcattgccagccttctgacttggagaaagagttgaatggagttgcttttcaaagcccttatggagaatattcgtttgccagtgttccgtcggaagggatggtgtcgagagaggacttgtttttagacttattatccattgtagccgattcggccgatgtgaaaaaaatgattctggtatctttcaatgaagaatatggaaagaaagtgactgatgctttgaatgaagtacagggcaaggagattgtccaattccgaatgaacgaaccggatactccggtagcttataaatgggatatgttggcttttcctgtcatgcaggcattgggaatcagagccgatgaattatagccttagctacccatttcagtcattaatcgctaatcactaataagttaatcactattttccatgtccgattttcgtttaaaagtatttcagagcgtggcgaagaatttaagtttcacgaaggcttcgcaagagctgtttgtcagtcagcctgctatcactaagcacattcaggaactggaagcttattatcagactcgtttgttcgatcgtcagggcagtaagatctcgttgactaagtccggagaactattattgaaacatagcgaaaagattttggacgattataaacagttggaatatgagatgcatttgttgcataatgaatatatcggcgaactgaaactgggtgccagtactacgattgcgcaatatgtacttcctcctttgttggcggattttatagccaagtttccacaaatcaatctttctttgattaatggaaattcccggggagtggaagctgctttacaagaacatcggattgatttgggattggttgaaggtatcttccgtttgcctaatctgaagtatactccatttttgcaagacgaactggttgccgtggttcatacccatagtaaattggctgtttcggatgagatcgctccggaagatttgccaaatatccccttagttttgcgggagagaggttcaggaacgttggatgtgtttgaacgttccctgttacgccataatttgaaactttcttctttgaatgtattgatgtatctcggtagtacggagagcatcaagctttttttggaacatacagattgtatgggaattgtttctatccgttctgtttataaggaactggttgccggtaattttcgtgtggttgagataaaaggaatgcccatgcagcgcgagtttaattttgtgcaactgcaagggcaggagggaggtttatctcaagctttcatgcgatttgccgggcatcacagtaagagtttgtaatcaaacctcttccatacggactaattcccagccgcagaattgtatgacaatgcagtgaagttgagttccctgacatagttggcgaactttcggaccggcagcataaccatgaatttgttcaacggcttcctgccattgtgcggtgccttgggtgtcgtatttttctttcggcagatattttaattccaagatatagctatgcgctacttctgcgtaacgttgcagatcgggcatcagaaacatatcgcaaaagccgtgattcagttctacttcaggcattgtgaggtagtaggcgttcacgctaaggtaagcggtgaagaatccctgaatgttacgttcgccctcaatgctgctgcgtacggaagtattctccttataagcttgggctatgaattccaatgccggtcgccattgtccgtcaaaagccatatcattgaataaaatctctatatctatcaggttgatataatggtgattctgatattcttccaggatatattcataatattgtttacggacattcgtgttgggaattcccaggatagtcagatttccacgtgttccgatgatagttagcataccataataaaataataggctggggaatatttccggattcgtaatttgatcggcagaaaaagactggtataggttagtcatgattttcccttcttcggcaattcgtttgataacacctttgcggttaccgtcaagacggtcaagttgaatcagttttttcatcttattgtagtccgtacgggtattaggatcaatcatttgttcaggagattctcctaactgaattcgattacgtaggtaatagagtaccatgtcgcaattaaacattttaggatctgactttagactttggcgagcaaaacaataattatcataccatggcttcatctcctgaatcatttcttcaatgtctccttgtaactgccctgcttcctgataatatcggagcatagtacgtacgtcttcttcagaaaatcccagcatttgattaaacagtggattagtgctgatgttccaacctatgttatatccgcttgacaagtcgtccaaagttacggggctgaccccaatcatgaatatacggtcgaacattcctttataattcttgaaggcatccctgtagaatccgctggcatgggtgatggcgtggtatatctcatttcctttctcgttgagtacgacatttgtgaaattgtcatactcatctataataaggtataggggatacccttgacggcgtgcttcatcgtctagtatatgcagtttatcaatccctttttccgctgtgctgaagcgctcaataaactcatccgtgtagtattcacgataacggttcagaaagccatccagttgcactgcgctatacgaatcaaatctttgcggcagttcatcaatgttgccgccaatcttggaaaagtcaagataaagcatctgatatttgccttgaagcggagttgtattctgcccgatccagagattcccgaaaagttgctggaatttatctttctgtgaaaggtcataatatgaacgaagcatgcttagtagcaggctcttgccaaagcgtctcggacggatgaatatcagatagttggcttgatcttccaacatggggatatacattgttttatccacataatagcggttttgcgtgattacatcctcaaaattggacataccataaggaattccttttattgttcccataactttttcagattgtttcttcttgttttccaaacaattaattaccaaagatagtttttttgaaatggatattccattcttttgcgcttattttttatctaattataaacgcagtttttaacgtcagggattattcttctactagaaaagaaaaaacgtttttatttctcatattctcatgattttacattaatcatcatataatcagtgaattatagtatgagaaatgtttttaataaatcgcatttctcatcatttccgggtgaaataagccttaaaaacagttatttctcatacttttttaagtcatttctcatactattattgcccttcttcgactattttcttctttgtatataccctatgtgttcctcttccggtgatttctattcccgaatcgggttgatgtccccattgtcgcagttcagtggttgctgctgtttgtagcaatccggttagtttccgatattcccaaacggtcaggaaaggatgttcgtccagatactttagggctaatgccagtcgttgttccggtgtgaatttattcgaggatttttgctttttccaaggagctctttccaaccggcatctatcgctgatatttcttaccatttccctgtctacccggaaattaacacctcctataaaaatactttgtgcgttgcggtgttttccaccttcttccgcatcttcccgttccttgtctctgcctaaggtgagcgatggagtgaatgtacctatcccgtctatctttaccgaacgtccctctgccatcaggtgtgccatttcaatagccgtctgaagcagtacgccttctatgtctccggcactgaagccgctgacatcgcccacccgtcgtgccaactcttttatgcttgcattgtctatccgtgcaaacttcggatatgtaattcttttgcccgtcttttgtatgtcgggcatctcctccataatgtatcgtgccatactatctgttgtttaaagtattaatagataagttcttttctattggaagtaaacttcctttcctctaatagaaaagttcctttgggttaaatgtaaactgtaaacggaagttttgtttttataaatgcaacttgcgtttataaaaatgaaagttctgtttttataatcaaaactttcatttatagtttgctattatgcaaaggtaagttttctatttgggaaaaagaagtttatccttaataaaaaagaagttttctattaatagtttaggagagaagtaacaagaggcaatgttttagaagaatggaatggggaagaatacatgtgtttatgaaaaaagaatgacatgcagtaggatatttgattttatttttatagttttgcattgtctctcacgccgatgcctcaattcgtgaggttagggtggagtgggagaaatattatataaggaaagacgtttacttgacgttttgtcttggcacatcaaaatctcgcaaattttgagtcccctagctaaagacgaagcaacagtaggtgtctgcgaggtatgattatattttcaatatatcttttaaacgaaaagatatgttgggttgttatacatatcggcgtgggcttctgcgttgctcgttctagctaggtgggcaatgcgagagccttgatgtgtgggacgagtaacaggtacagattcccgcgctttttctttatgtgatggttaacttttctaattatg

SEQ ID NO: 8179 - DNA, 35203 bp, Unknown
  gut microbiota DNA sequence
agaaggaatatttatgagtgaaagatcacgattgttgattatgcaggctaatctatttcgcatattatctgtagttctattatttgtcgtattgttatgtgtgtcaagctgtagtaagatagagataaaatggcaatcggttaaatcaccagatgaaataaataaaacactattaaaagtttatatagaaaattctggaagcatggatggatatatgtgcgatggcgcagagttgaaagatgctatatatggatatgtcagcaaattgaatagtttttccgatactacagagctaaattatataaattctcaaataattccctacaagaaaggattgaaatcttttataagggatttgaatcctttatcttttcatcatgcaggtggtaataccggaaattctgatatagcagatatgtttgagaaaatattagcaaataccggtgataacgttgtatccatatttgtctcagattgtattcttgatgttccaggaggcagtgcttctagcttttttgtaaatagacagatcgatatacagaatgcgtttataaaacagctgaatagatacgaaaatttgggagtcgaaatttttcaactagaatcaacgtttaatggttggtattattataatcaaggaagagagtatttgaaagatgctaaacgtccttattatatgtgggtaatagggaataaacataatctggttcaattgaataaaaatgttccattttcagaaatacaacatgggataaaaaactattttgcatactctacaactagtaaagttccttttgaaataactaataaagcggggattagtagtgagaatctttgtatatgcaatcccgaatcagatggtaaatatcggattttattaaaggctaacatgggttctacattgcaagatgaccagattctttgtgatattgaaaattacgagaatttgaacgcttttgtcaacgtggagaaaattgacagaattttagcaaaaaggtcattgtatacccatttgctaacgcttattgtagataagagagaattaaagtctgctggtgagaagctttctttgaattcattaaaacatccagattggttggagtctgttaatgatgattcgggtaaagatgtgactaaaaatatggataaaacgacaggaattaaatatatagtacagggagtggctgatgcatataaaactaatagtgaattagctgagatgagatttgtaattagtaaaaaataaaaagagattcttatgggacaattttttggaagtatctattgctggtttgaagatttttttggattagaactagcaaattacatgtggggattagcttcacctgagcaaacaaccaatctttttataggaattggtttatggatgttaggaatttcattttctatggctgccattttttattacgtcgtaaatcatccacaactaaatcattggtggggttggtttatctttcttttattaaatgcagtctttaatggtattatgggttgtcaatgggttttgattgattattatgcaggtaagatgtataatgtagacccattgactaatcagcaagttcctttgaatatttatgaatcaaattgtatttgttttggaatctcaaatatgatattgtctgtattggctttctttataatttcatgtatcattaaatggtggagtactagtgtttccgcagcaccatttgtaaaataaatatttgtatgtcaaaactatatatttttggaatagggggaacgggatcaagagtacttcgttcttttacaatgatgttggctgccggagtcaagattggagttaacgaaattgtgcctataataatagatccagatgtctcgaatgcagacttaacccgtacggtccaactgatgaacacttatcgtgcgatacattcggagttacattttgatgaagaaaatgaaagccagttttttcggaaagaactgactcaagtattaggtaattatactttgaggataaatgatactgacgataagacttttcagcagttcatagacttgccctcaatggataaagtaaacaaggcaatgatgaaaatcttgttttcagacaagaacttgaactcgtcaatggatatcggttttaaaggaaatcccaatattggcagtgttgtacttaatcagattgttaggtcagaagattttgaagactttgccaattcatttgaagctgatgataagatttttatcataagctcaattttcgggggaaccggtgctagtggctttccgttattattaaaaacattaagaactggtgattctttttcaaatcatgatttgattaataatgcagagattggcgctattactattttgccatattttaaattgaaaagtgatgaagaaagcgagattgattcatcaacatttatttcaaagacgaaatctgcattagcttattatgaaaataatattagtaagaacggttcaattaatgccctatattatcttgcagatgacataacgaatacttatgataatcatgaaggcggtacagcacaagaaaatgatgctcatcttattgaatttctagctgctactgctattgttgattttagtaataagcagcatccaaatacagtaaataaagaactgggattgaaagatgtggaagatacagtttctttcggttctttttatgatatccaaaaacgattgctgtttacccctctaacgcagtttatattgatggccaattgtttgaataataagtttgattattttagttctacggcttttaatgctaataatagcaattttcaggatttatatgatggtgcatttatgtctgaattaagggggatgtttgttaaatatctggagtggcttaaagaaatgaaggaaaataagcgctcattagatttgtttaatttgaaaacaggagacaaaccttttgatgtggtaacgggtattaaacctgctaaaatcccaagtctttattctgattataatttaataataggtcggcttaattctgcagtgaaaaaatgtaagagtaaaggtatggagaataagtttctcgagatgttctatctaggaacaaaaacactggcgaaagataaatttaaaatgtaattgttatgtcaaaaatatttagactatataaggagggaacaagtacttatacaggttggaatgagacgcctgcttttccatataactctgcaaacagagatacaattgatgatcccgacggagcttctgcaagaaatgaaataacttcaataccttcaccatttgcccgtattgatttggtgaaaactgcttttaaagaggtgtgtaaacttgataggaaaactaaaaaagttgaacttgatggaaagactatttttcataaaatgatttctgatgcattagatgttggtgaaatattctttaatatagacaaatatcagaataagattgagattatctcttgggacccctcaataatgattaacgcgttgcagtgtgatggtagcgatggacatctgtatcttgcagatgctttgcaaaaatatatgaagtcagattccaaaacttataactttgatcaattgcagaatatatatttgcttaactatattgatggacctgatgaattgaatattattggagctacttcaccggcgacattattttttagttctgcaaataagttggactatatcaatgatatttattttgcagaagatagaccgtttgattccgaatttcagccattatacaaaagggactttgaatatgtaaaggtttggtttactttacgtaaggctataccctctttttctactctatttcctgaactggaaatgtatttgaatttaaccttcaaagcgataacggatactaaacaaaagaatgagttgaataatctgactgctgcaagtgtggatttattttcgactattgatgttgtttcccaacaacaaaataattcagtagaagttctcggtcatgttttgtataaaaaatcaaataagccagcaaccgagaaaagtgaatttacaatatgcttgaatggaaaaactgacagtggaactttacctttagtgttacccatagaggctggtaataaatacagtaaacttcaatacacaacaggcaaatggggaactaccaatgtggctccttatgttgatgatgtggtagaactgaataaacgtttccttccttttgacggtgctcaaagtccttatttgactattagtgactttcttgaagatacaattatcagagttccacatacgctgaataaagagagcttttacgacggtaacattgtgattggtgaagcaaaattatcatatttattaccgctcaagatattgttctttaaatattttagcgtgttagatttgttgactccattatctaatggcaaatcaatgctcgaaatgcaaactgtagcaggtggttccgtcagagttgtgttaaggattccaattgtaggaaatgctaccgtttcgtatatagaatatagtcggtcttattataaggaaagggtggctgatatacaacgaaatgaaggaggaatgactgaatttaactttacgggacttgtaatgcctattgttaaatttaataatcaggaggatgcttattatacagtttcatgcattagtacgttttcaagaaaattcaatttagagttttttagtggtatggataaaataaactctattctcatggcttgtaggaatgaagataatttagaaacatataaagcagaaacatatacaatagaaaagcataactttgattatattcaagtaagtgatagaaatggcttttgcggtgtgttacttcctaaatataagaatcaaagaaatgttgatacttttgaatttgctattgatttggggacttctaatactcatattgaatattgtaaagaaggggaagatcctaaagtttttgattttgataaaaaagataatcaagtatgtgaaatgtttgtcccttctttggtagaaggtaaaggtgagcaagatgacttgattgaggaagagcagttaatagaaaaggattttctgccagcagaggttggtgaaggtgatttcgtatttcctacaaggacaatattatcttgttccaaaacaattgattggactggtgttattgaaccttatgggttatttaatataccgttgacttatgataaacgccgtgatttacaatataataatattaaatataatattaaatggggtaaaggggatgaatatcgtgtcattgagtcttatgtcaactgtttaatgttgatgattaggaataaagttctattgaataatggaaatctgaaacatactaagatcacgtggttttatcctattagtatggctcctaaaagattgcgtaagttacaacaaacttgggatgcctcttatgaaaaatattttggtaaaggcacgacaaactgcatgacagaatctgctgctcctatacaatacttttttagaagatatgctactgctactaatttggtaaatattgatattggaggagggactacggacattgcatttgctaaaaataaggagattcaatttgtcacttcctttaaatttgcgtcaaatactttatttgaaaatcctttctctgatttggataaggataatggcattgtagatcggtataaaaatgatatattacaattattgaaagataagaaattgacagaattagatagaatttttaggagtcctaataatttgaatcctgcaaatttagcttcgtttttattttcattgaagaataattctatggctaaggaagtagactccaaatctattgattttaattatatcttacaggaagatgaggattttaaaattgtattcatattattctatacttccattatatatcatatagccaaaattattaaggagaaaggactggcagttcctcgccatatcacttttagtggaaatggaagtaagcttataaaagttgtgtctactgatagcaaattattggcgaagtatacgaagcttatatttgaaaaagtgacaggagaaaaatatatgggtgatttggatattttaggattagataaagatgctaatcctaaagaggcgacttgtaaaggtggaatcataggcgttaaggataacgatactcgcagtaaaatcatcatatttaaaggtagtagtggatttgtagaagaatctgatacttatgatcatgtagataatagttatatacaaaatacgatcaaatctgtctgtggattttttgattttgcactaaatacaatgaacgctgactttaattttgatgaaaattttggtgtaactttaaattctttgaagatagctaaatgcatctgctataaagacctttcaactttcttagaaaaaggaattgcccaacgcagagaggaagctgagggacaggataaaatagaggaaacattcttcttttatccaataaagggagctttaaatgcactttcacaggcaatatatgaatcattacaaagtaatactgaaaatatagactgatatgaaaatttatgtaatatcgtttttattctcattttgtttatgcattatgggatgtaaagctaaccaaacatcttctaactctgacaaaacgagtagtagtcagattgcggctcttgttaatgaaatggattcattaaaggcgcaaataaaaatggcaaataaaaatattgaaacttttgatttgcaaatagaaaaacagaatactgtaattgaaaatcttaaggagaatcaaaatgaaaagcttgagatacattattggtggttgatcggtgtgattatagtttctattatagtttctaccttgatatctatgtttataattaaaagagtgcgttatatagttgaggatgatattgaaagattgcatgaagcaatgaggcgcaataataatgatgagttgaagaatggcaacaaaaaatatgcgaagattgagtctatagaagtaaatatggtacaacttcaaaatgagttggataggcttacaaatgaattaaatacagcaaagctagtacatagccaaaatgaaacaacaaaagaaacttccaaacctttgactcctcgagaaataaagcctaataaagaaggatattttggtatggtgaaagggaaaggtttctttaatgatgtatacaattctaatcaagacgaatgtcggtttaaagtttgttttaatagtactgaaacagaagctgagtttgaaccagtgaatttgaatcgtattcgttctattgatggtatagaaaaggctgttgattatatagatgacgaggtttcattgtctgatgcttcttctttttatgtaatagaaaagggtaaggtgaataagaataaggatagtgggacttgggatattaaatctcctgttaaaataaaattaaagaaataatatacatatatgagttttatagtacctataatagtaattacaattatttgcatacagatattgttttttgtgcttaatttaatacgaatgcatgaatttagagatatattcaagcatgaaccttcttggagaattgaaaagagtgaggatacaggctttgtatgtggtatagaaggagcaggtaacaatgtttttgattcaataaagttgtcaatcaataaatatttggagaataattcgggctctgttattgattttcacttattgaaagatgcagcagatcgtcattgtgactcggtggaaaatgatataaatacacaaactccaattcctttatattgcggacttatggggacaatggctggtgtgattttaggattagtgccattgatattatcaggagctttaacttatcttttaggtggtgagctttcagatggtataacaaaggaagaaatggataatttagctgcttctggtattaatgaattattggctggagtagcttgggcaatggcagctagtatttgtggtattttgttgacaactattaattcacttttatttaagagctgtaaattgaaagaggaaagaggtaagagttcttttttggcttggatgcaatctcgtttattaccggaactcccttcagacacatctgatgcattgaatagacttgttcggaatcttaatagttttaatagcacttttgcgggtaatacagctgaacttaaaagtacacttattaaggttaatagtgcctataaaattcaatcggacattatacaaacagtgcacgatatggatgttatgaaaatggctaaggcaaatgtgcaagttctagagaaattgcagcagtgcaccgataaattggaactgtttaattcatatcttgataatattcatggttatacagctgcgattaatacttttacaacattgtttcagcaagagagtaatagattgcatgtgcttgaagaaattcagcaattttttatgcgacataaagctgaaattgcaaaagatacagcagatgcagatgtggctctaaaggaagctttattagcaataaaggattcctctgcctctaatgtcggagaattaaataaacagcttattgtacaatcagaagtttttaagaagattttagctgaggaaaaggaatcatttgaaaaattgaatgaggagctaaaaggacaattccatcaatatattagtgataatatagcatcatttgcagaatttaataaggaaatgaagtctcaatttggtagccagatacagcaaattccaacgctcattaaaagcttagagccaattgcaaatattcctattcaattggataagttatttaataaaatagagcagtcaaataattcgttttcttatgagatttcgcagattatgagtaaaaaaactcagccggttgaatatgtatgtaataaagaaggagttacgagtcattctcctagaatttttccttcttggattaattggactattgtagtttctataataataatagctcttgcttgtgttactaatactgtctataatgtgattccgaaagatatttctaaaacggagatgatagataataatgtaggagaagtttcaaagatagaagaagtgaaaaatgtgaatcttgaaaagtataatggaggtagagataagtctgaaataagtaatgatacagtaaataaaaaacagccataataaaaagaaattctattatgtcacaaaagaaggaatcttttttctggacaagttattcggatttgatgactagtcttttttttataatgcttgtgttatttattttggttatagttttgttacataaacgtatggaagtaacagaacgccaattagcggaaataaaaaaagtagaacagtctactcaagatttggatagaaaatattttacttatcgacctgattataaaaaatacgtactgaatattgctgtgtcttatccagtcggtattagtgatattactcagatggatgtttccgataaagaaaaatgtttggaagatttatatcaagcaggtaaggaagtacaatcttttttggagcgtaatcatgagaataaatatattcttataattgaaggtcaagcatctaaagatagttataaacttaactatgaattaagttatcaacgtgcgttaggtttgatgaaatattggtgtaaagataggaagttgaattttggagataattgtgaagtacaaatagctggaagtggagatggagaattggaaacaaattcaatgcgagaggaaagcgaaattttaaatcagagatttctgattcatatacttcctaaaaatatattagaaaatgaagaagataaatagatgtgatatatttgtatttattactttacttatgtgtgcttgcgctcataagtcaggacatggtgaaagagtaatgataagttcaaattataagaatgagggtgttcaaaaagagaatgggagattggataactatgctaaaacaataaagcgtaaagggggaaaaatggaaggccctgagattttcaggaaatacacttctgctgtttttatggtattcacatctgatggaagaaatacttatcaaggatctggttttttcataaataatcatggcttggctgtaagtaattaccatgtgtttaaaggtactggcattggaattgaggagattaagttagcaggaagtgatgttgtatataaggtgacagatataatacaaaagagtcttgacagggattttattatttttaaagttaattgtgatgacacaaattatattccgatagcaacgaataaacccaaagttggagaaaaagtttttgcaataggtagtccacgtggactcgaaaatactttttcttcaggagaagtatcgcagtggcgggatcaaaatttgatgcaaataagtgcacttatcgatcatggtagtagcggaggagccttaattaatgaatatggagaagttatagggattacatctggaacattttatgatggttcacaagcaaatttgaattatgcttggagcattgatgtaataaaatcttatataacaatgaaagattaacatgtagcatttatggattttacattaattataattagggtaactatgattacaattttataattgaaccttgttggacataaagaagaattttattgaaactttaaaaaatgaataggatgaaaataatattggccgtccttttactgatttgtttaaccccaatgccttatggctattatatcttgatccgatatttattggccattgtttttactattatggcatatgactatggtaaaaatcaaaaaacattttgtataatttgtgtaatcttggtagggctgtttcaacctgtaataaaaatgccattaggacgtgaagtttggaatatagtagatatattagttgccgttttcttgttgcttttattggagaaaaaaaaaagaataaagataaatcattagtgtcctgttaaaatcgggacgagttaataattaatcaaataatcccggaataaggggattgaattgctctttgacatcattgaaattagtcttattgaatagttattgtacgggaattttatccgtcaatgaaatactaagagcctgtaagacctcatggattgaacgattcagttgcatatcatattggacaatagctacccaacaataggcaatgatagcaacacttatctgtatttgaactgcattctctatggtaccccaggacctttttgtcttgagatgctgttttaaccatttaaagaacagttctacgagtcatcttttttttaaagattggtaacatcaagtgcggatctgtgtttggtgttcgttaaaaaaaagtaaattcacgttcatcctcctcatcatagaaacggatgattctgaatgattcaggatacttcttttcagaggtgtacccaatcagtttcacttccgcatctgaaaggatattcttaagcattctacgcttccatttacagaacttgcacttcagattagacttcgctctgactacaaagaaagaacctgtaaggtgaatccgataaagtttcttaaacgagtcataagctctgtcgaatatataataagcatttggctcataattgattgtggacagtgtcgttgaatcatgcttggatgctgtagttaccgtataaaaggctggaatttgtgcttctatgtcataaaggacatgggccttaactccacctttcttcttgcggaacttcgcccaagggaatgtagccaaacataaaggaatcgtagtggaatcaaacgcatactttcttcctggaatatccaagatattagtaactcgtttttcacatgcttccttcatcatgtaaaaagcaaagtcttcgaagattctgtaatctcgattctgattggctgatgcaagcgtggttttggtaatgagttcacgacccaaccccaaatgataacgttttccttgatgagcttccaaaactataatcaagtcacgaagactttcacgattactgagttgaccgaacatcattgcaagtaactggtttcagcaagtgaaatgtttcacatatcgattgccatcgtacctgtctacgagtcttctgaacttatcattgttcaagaattctactaactgagcgaaaacgtatttatcttagttcatttgagatcgctttaatcgacctcaaagatatgatttcaaatcgtcgcgcttagaaaagcctgtctaatagattatatttcaatcatttcaaagaactgtttatcctcttttacgggacattagtgaagataaatcttaattttttgtatcaaaatactctattccttcatagtctctatactttatcattttgtaaacgagttaatcatgctctttaattttggatgaaataaataatggtgtgttttgttttgtatatgaaacaaaaaatctatatttgtattctgtatacaaaacaatatgtgatatggataaggaacaaataaagcagataattggtgaaaatcaagagtttgtcaaagatataacatttatggaacgtcctttcacttttgaggatgcaggtaattatgtgtttttaggtattcgtcgggccggaaaatcctatttgatgtatcagcggatacaccaacttctgaaaaaagggcatgcgatagaagaaatactatatatcaactttgaagatgaacgttttatcggcttgaaatcggaagagttggacgatataaaattggcatacgaagagacttttccctatcagcctattttctttttggatgagatacaagttgtagacgggtgggaaaagttcgttcgtcggttggtagataaaaaatatcgtgtatatgtgactggaagtaatgcgaagatgttgagtagtgagattgctacgacattaggcgggcgttttcttattcaggaggtatatccgtattcttttcgtgagtttcttctttcgcaggatataatattaaaaacaaactggctttatactccaagtttacgtaatgaagtggtgcgcacttttgatgcttatttttataatggaggatttccggaattgattgcatttaaagataaacgttcttggttgagcgggctttatcagaaaatattttttggtgatttggtggcccgttatgcacttcgtaattcagattcgatgaatttattggtgaagaaacttgcggaaagtgtcatgcaaccttcttcttacaatcgacttaaaaatatagtatcttcagcgggagagagcgtgggggtgcgaactgttattgactatgtgggatatttggaagaaacttggctgatattcagtattgaaaattatgcagctcgttttgcggaaagagagagtaaccggaaatactattttattgataatggcattttgaatctgtttatctttaatccggaaactttgttgttggagaatttggtagctgtctctttatatagaatggttggaagggagctatatttctataatcaaaatgtagaagttgatttttatatccctgatcagaaatggcttgttcaagcatcatataatatttctgatactcaaacttttactcgtgaagtaaatgggcttctgaaaacggcaaagttcttaaaggcggagaagttacaaattgtgactcgtaatgaagaacgtacggtgaaacaggatggttttacaatagaggtgattcccatttggaaatggatgataatgctagagaataagtgacatcagggtaaagtggatgagacaacaaaaagaaaattggaaaaataactaatacaatttatatatgggctgtttaatgaatttattgtggttgttgcttggtggtatctttactgctgttgaatacctcatctcaagcatattgatgatgcttaccattattggtattccgtttggtatgcaaaccttgaaactggcaggacttgctttgtggcctttcggtaaagaagtaagaagtggaaaccgctctggcggttgcctttatatattgatgaatatcctgtggatatttttgggtggcatttggatctgtctgtcccatttggttttcggggctatattatgtattactatcattggtattccttttggcttacagcactttaaattggcagctttggcattatcaccttttgggaaagacattataacagtgtaagagtagttgtagggaagcgtatgcttataattaaaagttataatgcataattagaaactattggcgggtcttgattgtttaccgtacctttgcacccggaaaacaattaaagataaaaagatatgatttcaacagctacaaaaactttgcaggcaaataataaaatgatttatgttgcactgctttctactctgactttctttctttttttagactatattccaggattggaagcatggtcggcttgggtaactcctccggttgctttgttcctcggacttatttttgcattgacttgcggacaagcgcatcctaagtttaataagaaaacctctaaatatctgttgcaatattcagttgtaggattgggatttggtatgaatcttcattctgctttagcttccggtaaggaaggtatggagtttacggtcatttcagtgatcggaaccttggtaataggttggtttatcggacgtaagttgttcaagatcgaccgtaatacagcttatcttatcagttcgggaaccgctatctgtggtggtagtgccattgcggctgtgggaccggtattgaaagcgaaagatagtgaaatgtctgtagcactgggtactatctttatcttgaatgctatcgcacttttcattttccctgccattggtcatgcattaaatatggatcagcaacagtttggaacatgggcagccattgccattcatgacaccagttctgtagtaggtgcaggagctgcttatggcgaagaagcattgaaagtggcaaccactattaaattgacccgtgcgctttggattatcccgatggcttttgctacttcctttattttcaagagcaaaggacaaaagataagtattccatggtttatcttcttcttcgtgttggcattggtagtaaacacttatttgctggatggagtaccacaattgggagcggctattaacggtattgcccgtaaaactctgacgattaccatgtttttcatcggtgcttctctttctattgatgtattgaaagcagttggaataaagcctttggttcaaggaattttgctttgggtaataatcagcttgagcacattggcatacatttattttgtataagaggaaaaaagagagaattatataaaagagaaaaaggtgggagaatgatcgtagtaaacgattttctcccacctttgtttattcagttttagtctgtggataaagcagaattaaagcaaattatttcttcttcaattcttcgaagattaatccttccagttcttcagccagttcaggattatccatgatgcattgtttggcggcatcacgtccttgtcctaacttagtatcgttgtagctataccatgaaccgctcttcttgatgattcccaagtcagcacccaagtcgatgatttctccggaatgggagataccctcaccgaacatgatgtcaaattctgctctgcggaaaggaggtgctactttattcttcaccactttcaccttagtcagtttaccgagaatctcttcgccatctttgatcggttggctaccacggatatccagacgtacagaagcgtagaacttcaaagcgttaccaccggttgttgtttccgggttaccgaacataacaccgatcttctcacgcaactggttgatgaaaatacaagtagtacgtgtcttgctcacagcagctgtcaacttacgaagtgcctgcgacatcaaacgtgcctgaaggcctactttgttgtcacccatgtcgccttcgatttccgctttaggagtcagtgcggctacagagtcaataacgatgatgtcgatagcagaagaacgaataagttgttccgcaatctccaacgcttgctcgccgttatccggttgagagatataaagatcatcaatatttacgcccagtttagatgcgtagaaacggtcgaaagcgtgttcggcatcaataaaagcagcgataccgccggccttttgtgcttcagcaatggcgtggatagccaatgttgttttaccggaagactccgggccatagatttcgatgattctacctctagggtaacctccaacgccaagtgctacgttcagggcaatagagcctgtcgggatcacttctacttgttcaacactatcatcacccattttcatgatagaacctttaccgaagctcttttctatcttttccatggcagcctgtaaggcttttagtttttcgcttgatgccattttattatctgtttcaaaattaagttcgtctttttttgccataccttatttttatataattaatggagttattgatttaaaatctgtgaggcatgttctttggtcttcacttctttgggagtgataatccgttctacgattccctcttcattaatcaggaaagtagtgcggaaagtacccatgtaagcacgtccgtacagtttcttttctccccatactccaaattcttctactaactttttgtcagtgtcagcaatcagagtgaaaggaagattgttcttttcgatgaatttctggtgcgacttttcattgtctacgctgacaccgattacttcatagccggctttacgtagttcggaatagttgtcgcgcaggttacacgcttgtgcggtgcaacctgatgtactgtcctttgggtagaaatacaacacaattttttttcctttataagcacttaaacggatttcttcgcctttctcattgatacccaagacttccggtgctttatctcctacgtttatcataactttcttttaatgaataggtgtacgcttataattccaaatccttgtcgaattcttcatgccagggaagaccttgcttattgagttgttccatgaacggatccggattgaattcttctacattgtttacacccggacggttccattcgcctttgaagaacatcatggctccaatcattgccggaactccggtggtgtagcttactccctgcataccagtttcctgataagcttcctggtgactacagttgttgtatacatagtaagtacgttccttaccatctttcagaccacggatacggcaaccgatagaagtttctccttcgtagttttctcctaaatcctgcgggttaggcaatacagccttcaagaattgcaatggtacaatcttcattccgttgtaatcaacctcgtcgattcgtgccataccgatgttttggataacgcgtaaatgagttaaatactcctgtccgaaagtcatccagaaacgtgcacgtttgatagtcggataatgtttcaccaaagattccagttcttcgtgataaagaagataagagtcacgcggaccgatgttcgggtatgtcaggtctttgtggatttccagcggaccggtagttacccatttgccattttcataatagcgtccgttctgcgtaatttcgcgaatgttgatttccggattgaagtttgtagcaaaagccttatgatggttacctgcgttgcagtctacgatgtccagatattgaatttcatcaaaataatgtttagctgcataagcagtatagataccgcttactcccgggtcgaatccgcagccgaggatagctgtcagacctgcttctttgaaacgatcgtgataagcccactgccagctgtattcaaaatgagcttcatctttcggctcatagttggcggtgtccagatagttcactccggctttcagacaagcttccataatcgtcagatcctgataagggagagccacattaatcaccatttcgggtttgaaatcgttgaataaggctaccagctcctctacattgtctgcgtcaacttttgctgtttttatattggggttacctattgcctcgacgattttatcgcatttctctttcgtacgactggcaatcatgatatctgtaaatacatcggcattttgtgccactttgtgtgcaacgacagtgccaacaccgcctgcaccaataataagaactctacccatttctgtatttaatgaattataatttatgatttattggtttggcaaatatacgtgattattttcagataatcattgcgcagctactcctttttatttgtaacgttgcaaggttccgttttcgaattccagcgttttgccattgtagaaccaagtttcgaaacgactgtcttttttcaactcgatttctatcggatcaccaatggataaacgacattctaccgtactcatccctgcctctaaatctccccgggagataatctgccaacggctttctgtaatgcccggatattttttatgtatatcctcgaatccgaaaaagtcctcgatataattatcatttttgacaatcacgtcatatttcagatctgtttccaattcgtagattgccccgtccctgtccgttaatgacagagtagccaggctgccgggaggagataatttaatctcttttatttgcagaaccgtatatcggggcaagtgaacacgtgattcggtctgcttatcttcaaaagatacgattcttttggccggcagcatctttttaggataaacggtcattcccaagtatttatttttcaggctttcaatagtacccagactcttgttagtgaaactgaatgcatttgaaaaatatttcattctcttttcgccttgaaaatcattcaggtccatgccggagttcgttcgcgagagagcgacttccagataataagaatgtccctgtgtatctttgaatacgattttcactggatatgcctgactgccgactccaatagcggtaattgtagcttccgtattgacaggaattgctatatcccgatagccggaataattgttggcatcgtctactcgggcactttcagattgtatatagactgtttttcctattaacaactctttggcagtatctacatctttcagataaaccaatccattgataccggcacggggagccttctcgcaaatctcgtccagcctcatgttctttatgtcataataatattttcctccctcacattcgaatacgaagcgagtggaatagttggttccggttgatatattttgagccttctcttctgttcccgtgaaagtgagaatcttgtgcttcagcaggctgttgtctattcctttttcggtgtcgtagctggaaagagtaggaaggaacatgttccgtgtagaaggaacaaacataaacttcattccgggtgtccatttacacagcggttgcagtggaaagttattcttgatgaattgttcttcttcacctacagggatttcctgtgtggaaggagtagtgacaatgtaatcactttgagctgtgataggacacgtgccacaacagaatagaattaaagacaggacaattattctcatatttgtttactttaagtgaactatgtaaattgttcgtttgttgtatatctactggcaaatgtatatattttatgttgtattggatgttattttccaatctttttgatatctttgcccccgattttaacttaaacgttataacaatatgaagaaagtatttgtttcaatttgcattgctggtgcagcacttgcaatgtcttcgtgccgttcggttgagaaggcaatccccctgtcatctatcaatggtgaatggaatattatagaagtcaacggctcgaaaattgctccgggcgaaagtagaacccttccttttatcgcttttgatacagcgaccggtcgtgtgtccggtaatagcggatgtaatcgtatgatgggcagtttcgatgtaaatgcgaagccgggaagccttgaacttacagggatggctagtacccgaatgatgtgtccggatatgactactgaaaataatgtattgaatgcttttgcgcaagtaaaaggatacaagaaggcaggtaaagataagatgtatctttgcaattcgtccaaccgtccggttgtcgttctacaaaagaaggaggctgatgtgaaactttcagttttgaatggagaatggaaaattaaagaagtgaatggtgaagcaattccttccggtatggaaaaacaacctttcattgcttttgatgtgaagaaaaagactattcatggcaatgccggatgtaatttgattaatggtggttttgaaaccagtacaagtaatgccaaatctatttctttcccgggagtagcaagcacaatgatggcttgtcctgatatggaaacagaaggtaaggtgctgaaagctatcaatgaagtgaaatcattcgatgtgttgtccggtggtggcattggtttgtatgatgcaaacggtgcattggtcatcgtgctggaaaagtaatagataagagttatatataataggatatgcctgtgtcgcacttgacgatacaggcatattttttttcctttatcgaaccagagccgcctgtatttgtttaaagaaacagttgttgattggctttgaatatgactatgtcagcagtgtttatttattaaaactgtctttttggcagatattatgtcatgcattcgtataatttccttttggcacacggtttgctttttaataagcgtccgttcgcggcgaagctccctgataagagcagagaaacaaccggacaaaaagaaatcattgaataaataataaataaaaaaataacgatcatgggaaaaattattggtattgacttaggaactacaaactcttgtgttgccgtattcgaaggtaacgaacctgtagtaattgcaaacagtgaaggtaagcgtacaactccttctgttgtcgctttcgttgatggtggcgaacgtaaagtgggtgatcctgcaaaacgtcaggctattacgaaccctacacgtacaatcttctctatcaaacgtttcatgggtgaaaattgggatcaggtacaaaaagaagtgactcgtgttccttataaagtagtgaaaggtgacaacaacactccgcgtgttgacatcgacggacgtctgtatactccgcaagaaatctctgcaatgattcttcagaaaatgaagaagactgccgaagactaccttggacaggaagtaacagaagcagtcatcaccgttcctgcttatttctccgactctcaacgtcaggctacaaaagaagccggacagattgccggtctggaagtaaaacgtattgtaaacgaaccgacagccgcagctcttgcttacggtctggataaggctcacaaagatatgaagattgctgtattcgaccttggtggtggtacattcgatatctctatcctcgaattcggtggtggtgtatttgaagtactttctacaaacggtgatactcaccttggtggtgacgacttcgaccaggtaatcatcaactggttggtacaggaattcaaaaacgatgaaggtgctgacttgactcaggatccgatggctttgcaacgtctgaaagaagctgctgaaaaagctaagattgagctttcttcttctacaagtacagaaatcaacttgccgtatatcatgccggtaggtggtgtgcctaagcacttggtgaagactttgactcgtgcaaaattcgaatctctggctcacgaattgatccaggcttgtcttgaaccatgtaagaaagcaatgagcgatgcaggtttgaacaatgctgatattgatgaagtaatccttgttggtggttcttcacgtattccggctgttcagaaattggtagaagatttcttcggcaaagctccttctaaaggtgtgaatccggatgaagtagtagctattggtgctgctgtgcagggtgctgttttgacagacgaaatcaaaggtgtagtattgttggatgttactccgctgtcaatgggtatcgaaacactgggtggtgtaatgactaagttgatcgacgctaacactaccattccggctcgtaagagtgaaacattctctactgctgctgataatcaaagtgaagttacgattcatgtattgcagggagaacgtccgatggccgctcagaataaatcaatcggtcagttcaatttgtcaggtattgctccggctcgtcgtggtgttcctcaaattgaggttacattcgatatcgatgcgaacggtatcttgaaagtatctgctaaagataaggctactggtaaagaacaagctatccgtatcgaagcatccagcggtttgagcaaggaagaaatcgaaaagatgaaggctgaagctgaagctaatgctgaagcagataagaaagaacgtgaaaaaatcgataagctgaaccaggctgacagcgtaatcttccagactgaaaatcagttgaaggaattaggtgataagttgcctgctgataagaaagctccgattgaagctgctttgcagaaattgaaagatgctcacaaagcacaggacttggctgctatcgatactgctatggcagaaatcaatactgccttccaggctgcaagtgctgaaatgtacgcacagggtggtgcacaaggtggtgcacaggctggtcctgatatgaacggtggtgctggtcagcaagataatagcaagcacggggataacgttcaggatgctgactttgaggaagtgaagtaaagatcgctgaatatacaataaattaaaataagagagctgtagattaaatgtttacagctctcttttgttttatatgtaatgtgatttatttgaacccggactttattacagtatttctctaatcttctcgcggttccccacaatccaaacgagatctcctaattggaaagccgtatctttatccagagggatcaattcattattccgttcaatagccacaacgataccgtcgtacttttctcccaaatgagactgcgcaatggttttatttaagaaacggaattcatcatctacagtgaaagagtggagcgtcatctttttatctactgcatccgtatctattgtgttttttacatcttctattctatttctgaactcctgcaattgcatatccgtaccgactacagtcagtttatcctgcggataaataggttcagaacttttcggaatgtatatattcaaatcaccacgcgtgattgcaactatattcactccaaaattttgcctgaatgaaagttctcctaaagacttgccgatgtaaccggaataaggcgataccacgacagatgtcaaatcaaggtccttgtcattgaactcgctattgaaacttgtttttagcgggtgtcgttttttagcagcctcttcccttcggttaagattggctaggaatctcgtttccaatcgtgaatattgcgtgaggtcttccctaagaataagaatcaatgccacaacagctatggcaatgatcacacttattccccagttcagcttgaaatagctgataactacgctagtgatgaagaaaagagcaacagatacacggcctagaacgagagaaaccagtcgtccgtgattgtaattctcatctctccatagcttcaggaataattcggaagagttgtatttgttggagatgagtgcccacaaaaaaggagtcataagcaaaagagtgcccagacacatcaccagcttaatccatagggtaacaggagcaaacatttcactgatggcgggataaatgatttgtatagacagcagccagatagcagtgagcaatacgctataaataataaccctgccaatcatgttttttagtaatttcttccagtcactatcgtgattcatggttttcttgccggaagcataacgatctaatgtttcctgtactttagtaggcaatattttgtaaagccattcggcaaaagggttggctaaacggataaaataaggagtcgtgaaagtggtgataacagatacagccacaataataggtgaaataaacggatcgagcactttgagcgaaacacccagtccggcaatgatgaaagcaaactctccgatttgtgccaggctgaatccggatttgatagaagtgttcagcggttctccggataagagtacgccaaatgaagagaaaatggctttaccgataatggtaaccagagtaatgatgataacaggccaggcatattctaccaataccgccggatttactagcataccgaccgatacgaaaaaaatagctccgaagaggtcttttaccggttgtatgatatgttcgatgtgctcggcttcgatggtttcggcaaggatagatcccatgataaatgcacctaatgccgttgaaaagcctgtataggtagccaataccaccattcccagacaaagaccgatcgaaacaatcaaaagcgtctcattattcatcagcttctttgcttttttaagaaaagccggaataacgaaaataccgatgagaaaccacaggattaaaaagaaaacgactttgagaacactaatcaataaatcttcacccacaaagtcctgacttactgccattgtagaaagaagtaccatcattaaaatggcaatcaaatcctccactaccagagtaccgaatacgatgcccgtgaaacgctggttgcgtaaccccaaatcatcaaaggccttgatgataattgtggtagacgacatagacaacattcccccaagaaagatggaattcatcgtgccccattctaataattgtcctaccagaaaacctatgagcaacatactgacgacttcggtggtggccgtaataaaagctgtggaacctacattcatgagctttttaaaactaaactccagtccaagtgcaaagagcaggaatataacacctatttccgcccatatattgatattttcgatatctcccactgtggggaaaatatttatataaggccccgctagtaatccggcaatgatgtaacctaagactaaaggttgtttcatccatttgaacagcaaggttattacactggccgatattaatatcagcgcaaggtcggcaatcaaagttggcaaatgtgacatttagtgatggatttattcatttttatattcctgatagttagacagaaaagagccagggaacatggatgtttagctcttttctttttcgagagtgtcggcagtcaattattcattatattgttttcctctacaaaaagagggaaacaatataatagatagttgctgccaagagtccactgaccggaattgtaagaatccaggcagtcatgaggctttttgttattccccagcgaacggcagacaagcgtttggttgcacctactccgatgattgcacctgtgatagtatgtgttgtactaacggggattttcagcatttctgtaatgtagagagtgaaagcaccggctgtttcggcaattactccttccaatggggttactttggtgattttggttcccattgtctttactattttccaacctccggacatggtgccgagtgagatggcggtgaagcacgaaaaagcaacccagtcgggaaggtcattgatgctgttgatacccatgcccaatcccatagaatgggcggctatcatggcagcggcaatgatacccattactttttgtgaatcattcaaaccatgtccgacgctgaagagagcggaagaaacgagctgcaacctcttaaaccagacttcagctgtatgaggatgtgcacggcggcagatgtaaagcacaaacagagtgaaaccgaaagcaatcaccattccgataaaaggagccagaaagatgaaagctgcaattttaagaatgatattaagttgaattgcttcaaacccgtttgccataatggcagctcctgcaaatcctccgataagcgtatgtgaggatgaagacgggatacctttccaccatgttaccaggttccaggtgatggctgctatcactcctgccaatataataggtaaagtgatatattgttctaccaccgttttggatactgtattggcaataccgaatccgcctattatgtatttggcaatgaaaaaagcaacgaaattgaagaaagcagcccatagtacagcttgaaagggggtaagcaccctggtagatacgattgtagctattgagtttgctgcatcgtgaaagccgttgatataatcgaatatcagagccagaataatgatagtcactaataattccatgtgttccggcttactttatgcgtactttacaatcaggtttttcagaatcttgcctacgtgctctgcggcatcggtcgttttctccagttcatgcatgatttctttaattttgataagttcaatgcaatccttttcttcttcaaatagcttggtgataaagaattcatatacgtcatctgcctgattctcgatttcatgtaatcttgagcaatattcccggagaagagtcggcttcttacggaatatttcaagttcgtccatggctttacagatgtaggtcgcttcttcctgaatcaaacggctcaattctttgccgttctccgagataggacggggattgtaaatagagattcgtttggcacaactatttattccatcgatgacatcatccatgcaggaagctaagtcatgaatatcttcacggtcgaaaggagtgatgaatgtagtgcccaattcatcaaaaatccgatgcgtcagtttgtccccttcacgttccagctctttgattttcttatagtagtctgcacgttctgtaggtgagtcatgttgcaagctttctgttaaaacaacggatgcttcacaaagcacttctgaaagttgtttcagcaatgggaaaaatttgggctcctttggagtaaaccggctaaaaaaagaatttttcataagtgtaaaaactttaaattgttttttcttctctatttatattagtaacaaatgaatacagattatagtttggcgttttaagactttagtttggctcgtactacctctatgattgcaggcaatatagagatgaatatgatggcaacgatcagcagtttcaagttctcttgtacaaacggaaggtctccgaagaaataaccggcgtagcagaatatgccaacccaagccgcaccacccgctaaattatacatcataaaatagtaatagttcatctttcccattcctgctacgaagggagcaaacgtgcgtactatcgggacgaatctggccagaataattgttttcccaccatatttcttataaaactcgtgtgtcttctccagatgactttgtttgaatatcttggaattgggattattaaaaagctttcgaccgaagaaatgtccgatcatgtaattgcaggaatcgcctaatacggcagcggcaaataaaatgataacgagtatatgcacactgataggcatgtcaggtaaggcagaaatagctcctgcaacgaagagcagagaatcacctggaagaaaaggagtgaccactaatccggtttcacagaagattataaaaaacaaaatggcatacgtccaggcgtgataatcacgcacaatcataaccatatattgatcgatatgaaggatgaaatctaataaaaagtccattttatatactttggttgttatggtaaaaaaagaatgttattggcttccagaccatagtgaatactcttttcactcaaatggaggatgcaaaccgaaagtgaggcatcaaagactggaatagtcttatgccggaaaaatataaaatggctaaatgagtatgtggcctaatgaatagatatgatatctatcagaatatttaaaaagattggtataatatgaaaaacctgtccattggttttgaggaagctggatcttcagagagcttagtatacggatagtgacagaaggaatattgaatcgtagtatctttaaaggagagaggtggcggaaggagaatggatttaaaacgccattatcgttattgtaatcttgctttccggtgtattcttttgttttgactagtttctgttctttatccagctgtatgatgcaggttttggaggtgtatgaattggtataggtttgtatactggtactaccggtttctaaccgatatgcctcctgtgcttcatcggaaatcagatggaatccccaattcagaaatacgcctaatagtatacagaatatgtacttcatcataacggtcgcaaaggtagaaactatttttatatgaaatacatattcacaagcataattaacaattatatcagtgactaccggaaattattctttgagccaactcatcgtaaatttcatcggagtataggttatcccgttggtacattgtttcccggcaatcttgtcgaaacccagactttgataaaaaggaatagcgtacgtggatgaattaacagtcatttcatctaccggacaatcattgatagcgaaacagaataactgtttgccgatacctttgcattggtacttttttcggataaagaataaagaaagatgtttcccttcatgctttgtccccatgatgccgaccagattcttatcctcaaaagcaccataaatcactaattcattcatcagttgctcgctggagataaagcttttaaatgaattcaaaccttcttcatcgaagtcttccgctccacattgtatatatacctccaatgctaacgatgtagccagagcgtattcggtcttgtctaatttgcgtatcatagtgattgcttttatcattaatttgccgggaaaattactattaatttccggatatggtattgaaatctgatttctttttcttttttttgtaaaagctgtagggtatttccggtttgagcgctcttattagtagaaacgcaatttatttacctttaaaaagcatcagtatgaagaatgtagaaaaacacttggttggatggctatcagtttgtttgctgctttgtagctatcctgtgtgggcgcaaggagatgccggagattatcttacgattgttggtatggtgaaagacaagcaaaataaaaaagctctggagaacgtaaatgtatcggtgcatggtagcaatatcggtactgtgaccaatgcggaaggagaatttgctttgaagataaaaaaaacggaaaccccgcgtgaactggacatttcacatatcggttatgtaaatactcatatctctttggagaaagaaacagccgctatgttgacagtttggttgacgcctcattccaatctattgaatgaagtggtggtatttgccgaaaatccacgtataattgtagagaaagcaatcaataagatccctttaaattatagtgataagcgtgatatgctgacaggattttaccgggaaactgtacagaaagggcgtcgatatatcggtatatcggaggcagtgctcgatgtgtccaaaacagcctataccaatagaaatataaactatgacaaagtgcgagtggagaagggacgtcgtctgcttagtcagaaagcaagtgacacattagctgtcaaagttgtgggtggacctaatctgggcgtcactttggatgtcgtgaagaacaagggagcgttactcgattttgaagaattgaataattacgaattctggatggcagaatccatgcttatagataatcgtatgcagtatgttattaatttccgcccgaaagtcattctgatgtacgctttattatacggtaaattgtatatcgatcgtgaacggttgtcattcacccgcatagaaatgagtctggatatgcagaataaatcgaaggcaactaccgctattctgtataagaaacctctcggtctaagattcaaaccgcaagaactctcttacctggtcacttataaagatgtagatggaaaaacgtatctgaactatattcgtaacacgatccgttttaaatgtgactggaagcggaagttattttccacaagctatacggtagcttccgaaatggtagtgactgatagaaaagaaggagtattggagaatatacccaacaaagaagctttcagcctgaatcaaatattttatgataaggtagacgaatactggaatccggatttttggggaaactacaatattatcgaacctacggaatctttagagcacgcagtggataaattgaaaaagcaatcgaattgaaacagggatagttttcttatatttgaggtcaatcataaagaaaagcaagtatgctggatgaactgctcatactaaaaaagataaaggaaggtgacataaaagcgtttgaggaactctttcgccgttactattttcctctttgctgttatgcggcaggcattaccgggcagatggcggtagcggaagagattgtggaagagcttttctatgtactttggaaagaaagggagcgcttacagattttccagtccgttaagagctatctgtacagggcgactcgcaatcaatctttgcagtattgtgaacacgaagaagttaggaatagataccgtgaagcagtattgaacacttccaatccggagcagtcgacagatcctcatcaacagatggagtatgaggaattacagaaattcataaataacactcttgaaaagctgccggtccgcagacgacagatttttgagatgcaccgtttggaggggcggaaatatgtggagatagcgacacagctttctctttcagtaaaaacagtagaagctgaaatgacaaaagccctccggacattacgagaagaagttgaaacttatattcacatgaagtgatgaaaacagaaatttataaaataaagacagatcaggcatggaaccgattgtataatcgcctggacaatgaccgtttacttgcgaaagttgatgaaggccgttctatacgcaaacattcacaatggatcagatacggagcagttgccgccgttttgataggcgtcgtctggggagctttgtattggatgaccggttctgaaagagaaccggcacagaattttcttacacaggaaaatcaaggcatttccactttggcaacgactcttgaagacggttctgtggtacttttggcaaaggaaacctccttgttatatccggagcactttattgctgataaacgggaagtgagtttgcagggaaatgctttcttcgacgtagcaaagaagcagggacaacccttttggattgatacggaacaagctaaaattgaagttttgggaactgctttcagtgtacagagcgatgaacatgctccgttccgcttatctgtacaaagagggattgtgaaagttactctaaaaaaaggaaatcaggaatgttatgtaaaagcgggagaggcagtagtggtgcaatcgcaacgattagtcgttctcgatgcggataaagagaatgaagagtgggggagcttctttaaacacatacgttttaaagatgaatctttggcgaacattctgaaagtgatgaatctgaattcggatagtttgcagattcaagtggcttcacctgcattggaggaacgcaggttgacggttgaattttctgacgagtcttctgaagtcgtagctactctgatagctagcgcactcggtctgcaatgtgtccagcaaggggatattcttttgttatcagaataaaactcatttaaacttgagaaaatgaaacaggcttatcgctatctatccattctattcatactctttttcgtagtcgatacgatgagagcggatgggggcgatgtattggaacggatagttcggcttccaaagacaaaaggcactgtttattcattattaggtaatgtctcccgacagtcgggatatatgtttatttatgacagtaaagttattgataatgatgctgtcgtgaagataaagggaggagaacgatctattcgccaagcggtgtacgatatagtaggagataccggtttggagtttcaggtgattggtactcatattctgattactctcccttcggagaaaaagattcatatacaacaggattccattccgaagcagcctattaacttttccattaccggcactttgctggataaggagacgggtgtgcccatctcttcagctactgttggagtgagggggacatctatcggcagcataacaaatcagaatggagattttaaactgtccttacccgattctttaaaaaacgattcgattaccttttctcatataggttatctttcacaagatatagagtttgctttgttgattggacggcacaatatacttagtctcgaacctaaagtggttcctttgcaggaagtagtgattcgtcgaagtgaaccaaagaaacttttgcgggaaatgattgaacggagggaacagaactattcgcatactcccgtgtatctgactaccttttatcgtgaaggagttcagttgaaaaacaaatttcaaaacttgtcggaagcagtgttcaaggtttataagacatcctcacattcagcagtgccagatcaagtgaagctgttgaaaatgagtcggctaagcaatgtggaagcgaaagatagcttattggtaaaagtaaagtcgggaatccaggcttgtatccagatggatattataaaagatatgcccgaattcctgattcccaatatagagaatagcatttatacctatacttcggagggcgtgacatttttagaagaccggtttgtaaatgtggtgcattttgaacagaaaaaaggaatcagtgaacctcttttttgcggagaactattccttgattctgaaacgagcgccttattgcaagcccgcctggaagttcatcctgtatatgtgaaaaatgcggcaggtatgttcgtcgaaaggcgcgcacgcaacatacgcatgattcctcaaaaagtggtatataccatttcttataaaccgtggcagggaacttattacatacatcatatccggggcgatcttcatttcaaagtgaaacgtacaaaaatgctgttcggcagtcgtgatcttcatatctggtttgagatgattacttgcaaggtggaaaccggacaggtagtcgcgtttccccgtacagaaagattgcctacccgtacaatcttctccgacacatatttcaaatatgatgagaacttttggaaagacttcaatgtgatcccattggaagaagaaatcagcaaactaatagaaaaaatctctttgaagatagaagaaataggagattgatttattttgccattcaacaggattgctgtacctttgcacccggtttaaaagattgtatgttatggaattaccaaaagatccgatgatgttgttcagcgtcatcaatatgaagttgcgcgactgttattcttcacttgacgaactttgtgaagatatgaatgtgaacaaggatgaattagtgaatcagttgaaagccgcaggctttgaatatagtgcggaacacaataagttctggtaattatctccttgtttacagcttataaatagagtatttctactaaaaacatagtgacgctatatgctcgggatagtgacggcatcattgtctcatgccgtcactatcccaagcatatagcgtcactataattttctaccttcatctaaacgtcatcaggaatcatgtgtttattcctatcgtatataccgacaatgatttccgccagttctccctctcttgttaataaaagcaaaataccaaatcccatatttaacttcggcaatcttccgcgttctaactaataaagttcagaaaaagaattgatgataaacgagaataaaattcgtgaagcttgtgcctcgaatcgcgaacggggattcaagatgctgatggactcttttcaggtgccgatatataattatatccgtagactggttgtatctcatgaagatgcggaagatgtgcttcaggaagtctttatccggatattccggcatatcgatcagtttcgcgaagaaagttcattgtcaacctggatttaccggattgcgacgaatgagagtttacgtttgctcaaccgacgtaaagatgaaggagttgtttctgcggaagatgttcaggaagagttgatgggcaagttgaaggcttccgattacattgattatgagaatgagttggcagtaaagtttcaggaagctattttaagtctgccggaaaagcaacggctggtattcaacttgcgttattacgatgaacttgaatatgaagagattgcccgtgtactggatactaaagtggatacactaaaagtgaattaccactatgcgaaagagaagataaaggaatatatattaaacagatagaatgatgaaaaaggattttgattttgatgatattggaaaacggacaccttaccgtacccccgatggattcttcgaggacgtgcaacgaaaggtgatggaacgtgccggagtgaatcaacagcggaagtctcatacgaagctgattatttctacggtgattaccatagcagccgtatggggcggatttctgtttgttccgtctttgcgacaggcagatgaggtgacaacatcttcttcgaaagtattagccaatggtacggaaccggtagataaatggattaaagaactatcagatgaggagttggaagagctcgtcagcttctctgaaaatgatatatttttgaattaagtaactcaattaattattttaaacgtgaagattatgaagactaaatttatttatgtaattttggccgttctcctgatgggaagccagatgactttgtctgcacagaatacggataacaaacaaaaaaaacagcgtcctacaccggaacaaatggtgcagatgcagactaaacaaatagtaaatacgttgatgttggatgatgcaacggcagctaaatttactccggtatacgagaagtatctgaaagaattgcgtgaatgtcgtatgatgactcataaggcgagaacagagaaaactaaagcacaaggcacagacgctaatgctaagaaagaacgtccgtccatgactgacgacgagattgcaaccatgttgcggaaccagtttactcaaagtcgtaaaatgctggatattcgtgaaaagtattacaatgaattcagcaagatactttcgcagaagcagattttgaagatttatcagcaggaaaagatgaatgctaataaattcagaaaggaatttgaccgcagaaaaggtcagaaaccgggacagggacaccaccagggacaaaaaactcgtgctccgcgtcaagcccagaaataaagattaggtttattttattatagttttattttactaaatcaacacaatttgaacataggcagccatatttattcttttcagtaccgttt

SEQ ID NO: 8180 - DNA, 1582 bp, Unknown
  gut microbiota DNA sequence
aaaaaatacttctatgaaggtagtctgcggtcttgacgtacacaaagatagtgttttttgctgtattctgtgtgctaatggagaaaaaatccagcataaattcggagttcttaccgaagagttggtcacacttcgcgaccttatggtctctgaaggtgttgaagagtgtgcaatggagagtaccagtatctactggatacccatatggcgagtgcttgaagggtcagtgaaacttcatctggtaaacccttattttataaaacagcttcctggcaaaaagagtgatgtgaatgatgccgaatggatagctacttgtctgagtaaagaactgatagcatcaagctttgttcctgatgataaaattcaacgtctgcgtcaatatgacagaaggatatttgacctgaatgcttccataagccgcaatttagtcaaacttgaccaatgcatccagaggtgcaacatcagaatcagtaattatatatccacaacagattccaaagggtaccgttcaatagttaaacttatatcccaaggtgtgacagatgcggaagtccttgtgaaggaactgcatggaagaacaatcaacaggcatggcagagaaacattggtgaaagcacttaccggagtggtcagcgagaccgacatagacattataaaacagcttgtagaagagattgaattgcagcaacggcacaaggacgaagcacagcaaaagatgactgcactatgcatggagtggtttcctcaagaagttgaaaaccttcagactataccgggagtgaaagaacgtagtgcgacctcaataatagcagaaataggaacagacatgacacatttccagacaccaaagaaattggtgtcgtgggtggggctaagaccccgtaacgaggaaagcgctggcaaaatcaaggcacgaggtatcacacatggtaacaggtttgtaagaaaaaccatgattgaatgttcatggggagctgcacgtatgaaagattcatttttcgcagaattctcatacaggcaatgtatcgaaagaagaaagaacaagatgaaggtgcaagtagctattgcgagaaaaatacttgttgcagtatggtatgtacttagtcagggaactcagtatatcaaaccaacagatcattatacggcagcccatatgactgccgtataatgatacaaccgtccgttacaaggtcaatatatttgtggtgattagatcccgttttcgcaaagtggctatcgtttcggacggagtaggacacccggttgagttttaatctcgaagaggaaatttacataattgttcattgttccgactataatcggaactgaaccgccatgcagtagtgcaaggaaaaaagatgtagaaaggaatagacactcgtttccactcacaaagatagtcgcggtcttgcttttcatagaggaaatatagataattattaatagctccaatcaattgttattaaattatttggattatcccaataatgcaattttacatcaattgcataaatcaggatacaaatcctctaaatcaggaaaaaaatctcctcattttataaaaaagaatagagcttacaaa

SEQ ID NO: 8181 - DNA, 18737 bp, Unknown
  gut microbiota DNA sequence
cgaacaaatctcccgccttttctacaaaggtatagaccaaatgttcctgttcagtcggaaactgattcaggactcgcagaaaacccggaaagcaccgtcccacaaactgaaactcatccattggggaccggatcttcctttctacgaccacctgcttgcagaaatgcccgaccggaagcccgaaggatttatctccaccggcaaagaaaaccgggacgtagacaccttgctccaggcatttgccgcaacgaacgagaaactggatttgtacattgccgtctcatgcggtaacatcaactataaaaagatactcgaccgctattcagtgcccgactccatccgtatccactataccgacggagtgattccctacgaactggggaaactggtggcacgcaaaagttgtatcgtgatctgctgcctggacttcccctataccgtaggactgaccacgctcgtggaagcattcgccctcggcatccccgtcatctgttcgcgcaaccccaacttcgaaatagacatcgacaaggaagaaatcggcattaccgtagaatataacgatgtacaaggctggatagacgctatccgctacatcgccgaccatcccgaagaggcacgacgcatgggagaaaatgcacgcaaactggcagaagaacgcttcaacctcgaaatcttttcgcgcgaaatagcagaaagcttgttggaaatatcaaacatttcctctaaaaaccgtacatttgcataaacttttgcccatgagagtcctgataataaatacatctgaacgaataggaggagcggccattgcagcaagccggttgatggagtcactgaaaaacaacggtatcaaagccaaaatgctggtgcgtgacaaacagaccgaccaaatcagtgtggtccgcttaaaaagtaactggttgcaagtgtggaagttcatgtgggaacggatcgttatctggagtgccaatcgtttccgccgataccatctgttcgacgttgatattgccaatactggcacagacatcacctcactcccggaattccgccaagccgacgtgatccatctacattgggtcaaccaaggaatgctctcgctgaaagatatacggagaatacttacttccggcaaacctgtggtatggaccatgcacgatatgtggccatgtaccggtatctgccactacgcacgggaatgtaaaaactatcagcaagagtgtcacgactgcccttacatctacaaaggcggtggccggaaagatttatcttaccgcactttccgcaaaaaacaaaagttatacagctacgctcccatccatttcgtcacgtgcagtcactggctgaaggaacaagcacagaccagcgcattgtttgaagggaaaagcgtcaccaatattccgaacgctattaataccaacctgttcaaacccatgaacaaaaaagaagcacgtgccaagttcatgttgccggagggtaagaaactggttctgttcggctcgttaaagatcaccgacaaacgaaaaggagtcgactatctcattgaagcctgcaaactgctggcagaaaagcatccggaatggaaagagtcactgggggtagtcgtattcggtaaccaatcacagcaattgcaggagcagcttcctttccatgtctacccgctcccttacatcaagaatgagcatgagatagtaaatatctacaatgccgtagacctcttcgccatcccgtctctggaagagaatcttcccaacatgattatggaagcaatggcctgcggagtaccctgtgtcggctttaacgtaggaggtatccccgaaatgatcgaccatctgcacaacggttacgtggcacaatacaaatcttcggaagattttgccaacggcatacattggatattgacggaaccggaatacgatgaactctccgcacaagcctgccgcaaggtcttgggtaattattcggagagcatcatcgcaaagaaatatacagatgtctacaataaaataacggggaaatatgcatagtgtccatcctactcccaagttctctatcattacggtgacgtacaatgctgaaaaggtattggaagacacgattcagagtgtcatttcacaaacctatcatcatatagaatacatcatcgtagatggagcttccaaggatggaaccatttctattatcaaccgctaccgcccgcacatacacaccgttgtcagcgaaccggacaaagggctgtatgacgccatgaataaaggcatcgcccttgccagcggcgattatctctgtttcctgaacgcgggcgactgttttcacgaggacgacacactacaacaaatggtgcataccatcaacggcagcgaactgcccgatgtgctttacggagaaaccgctatcgtagaccaggacaggcatttcctgcggatgcgcagattgtccgctcccgaaacgcttacctggaaaagtttcaaacagggtatgttagtctgccatcaggcattctttccccgtcatacgctggtagagccctacaacttgaaatatcgtttttctgccgatttcgactggtgcatccgtattatgaagaaagcgcgcaccttacacaatacccatctgacgattatcgattatctggatgaaggaatgactacccgcaatcagaaagcctccctgaaagagagatttcgcatcatggcaaagcactacgggttgattggcaccgtagcacatcatatatggtttgtgatccgtgcggtgattcaccggtaaagctggttctctttaaaatgttgcaggcagcgcaagcaactggtacatcagcgtacgtgccatacgtatctgcccctttgtactaggatgtaaacggtcatatcctgcatcgtagaagtaaatcagttgttcttccaccatcgggttcagtccggttaccgcattaaaatcaattacgggcactccccatacattgccggcttctttgacagcctgtacgtaggcatccacatattcaccacaactattctgatagttttcatccggttgcacgttcttctctccaaaatccgccagtgagcggtgcaacggggttaatagtacaatctgcttatccggaaacagttgtttcagcctgttgattccgatgttgatacgtcctttatacgtgtttccatccatcataggcgtacgtttcttgcgggtttccagctttttggtctgtccgcgggctgccatcacctgttcttctgtttccgtaaaccactctccgataggcacaccgtcattaaaatcattcgtacccatcagaatcaagatagcatccacttctccaccgtgttcctgctttagtttctcggcctgacggggcacatcattccattgtctgccgctgataccatatacataaggagtaatccccagccattcctgcaggaaatcccagtatttctttattttgtcaccatagcagttgggatctgtaatagagtctcccaaataccccactctttttccttgccatggatgccggacagctccattattcgtttcagcagagtttgcaactttagatgtttgattctgtccgcacagaaaagaggaacagaaaaacagaatggtacatgcgagtaataatttgcttttcatcggtattatacattaaataagagatttgtatctaatatcctgcaaatgtaattcaaaaataggtagtttcaatcaatttgggcagtcaatctcatccatacaaccggacagacaaacgggtctctatttgacgattcttgctaaaatgcaggtttacagtattttttcatcaaagttatcattgagttttacacctaaaatcctatctttgtcacaaactaaaagaaaaattggatgtttaactcattttcattccataaggattccgttctgtaaataatctgtaagccttcctctcattacagattatcccttatgttttctgacatattcttgtcagagttattttctatatctaaattttaaactatttgtatggtcaaatggtcacaagcatcgtcacatgctttcatttaccgtactgctaaaacattaaaaaacaatgagtaacgaattaaaaacaatccacgaattcgattttacactgatatgtaattacttcaaaggactaaaacgtcaaggtccgggaagccctgaagtcacacaaaaagccttaagtttcaccaacgaactgtctgacgaagccagaatagccgatattggctgtggcacaggcgggcagacaatggcattagctaactatacgaaagggcaaattacaggcatcgatcttttccccgacttcatcgaaatattcaacagaaatgcaatagaagcccattgcgaagacagagtaaaaggcattgtcggttctatggacgctttgccgtttcaagaggaagaactcgatctgatctggtccgaaggagctatctataatataggattcgaacgcggcatgaatgaatggaataagttcctgaaaaagaacggattcatcgctgtaacggaagcatcctagttcaccccggaacgcccctccgaaatagacgacttctggatggctaattacccggaaatcgatacgattccgagaaaaatagcacaaatggagaaagccggatatatcccgacagcccatttcatcttaccggaaaattgctggaccgagcatttctatgctccccaattcccggttcaggaagcctttctgaaggaatatgcaggaaatgaagctgccgcagacctcatcgccggtcaacgacacgaagagagcctatataataagtataaggaatactacggctatgtattctatataggacaaaaaagataattgactatctgccggagaagttagcaagataggataactctccggcatttattatcctttattttgcagaagatatggaaacgaaagatataaataaggaagaatatcagttacggatcaacaaagtgaccgactatatccatcaaaacattgaccagccgttatcattacagaaaatggcgggtatcgcatgcttttctcctttccacttccaccgcgtatttacaaccctgaccggcgaaacgcctacggattatatcaaacgcacccggattgaaaaagcagccctattattaaaacaaaacaaggaactttccgccaccgaaattgccgccctttgcggctttagcagcctttcgctgttaagtcgcaatttcaggctgcatttcagtatgacgatccgggagttccgctcactaaaataaaacgctaaagaatatggaaaaagaaaataagattctgatttttcgaacttctatcaccaaaagatgtgacatcaaacgcataggaaaacttttggcagagttccctcaaatagacaaatggaatgtggactttgaggactgggagaaaatattaagaatcgagtgcagtggtatcactgcactcgaaatatcagaaatactccggaataatcatatttttgccagcgaactggaataaaacggagggaaagaagtctcaaactcccaacaattgtttcaattcacccattccttcagaagcccccttctgaattacatgtatcgaacgggaagtatgcgtatctaccggtttcggatcaatcagatacacctctgctcctctcggtacataatgaagcagccccgccgcaggatatacattaagcgatgtaccgataatgacaaaaatatccgctttctccacatagcggatagctgtttcaatttccggcacagcttctccaaaccatacaatgaaaggtcgtaattgagtgccgtcaccggccttgtctcccatcttcacttcatattcttccggtttcagctcttttataaattgaggattatatggatctctgctggaacatacttttgtcagttcgccatgcagatgaataatgtggctacttccggcgcgttcatgcagattatcaacattctgtgtcaccaccgttacatggaaacttttctccagttccgccaacaactcatgtccacggttcggtttcacctccaacaactgtttccgacgttcattatagaaattaatcaccagagccgggtccctctgataaccttcaggagtagccacctgctccacaggatatttatcccacaaaccgcccgcatcccgaaatgtactgatcccactctcggcactcataccggcacccgtcaaaactaccagatttttcattactattcctccttctttttttaatagccacacaaatgtaatcagaatcatcgaataaaagaagactttcttacgcttaatctaacctgatatatacgaaactttaagatgaaagatacagatagttagtgtcagacatactaagatttattcgtctgactatagttatatttacatctgactatagttattctttcgtctgactatagttagacgaaaagtaaactatagtcagacgattaattatctgcataaacaaacctaaataatcagaataagccgattaaatcctacgaacaaaaaactaattctttaaagaaaagcgattaactttcacagatataagaatttttaaatagcaaatgctaaatcattcaaataaaacacgtacttttgcgtttcataaatttgcaattgattgaaagctaaaaccatgaaggtgatacatttcaatcgccaacaaaaaacattatatggataaattcagttactctattggcctcggaattggtcaaaacttatcaagcatgggaatcgaaaaccttgcggtagatgatttcgcacaagcaatcaaagatgtattagaaggtaatcagacggctatcagccacaatgaagcccgcgaaatagtgaacaaatatttcgaagaattggaatctaagatgagtgccgttgctattgagcagggacaggcattcctcgaagaaaacaaaaaaggaccgggcgtagttgtccttcccagcggactacaatatgaaatcatcaaagaaggtacaggtaaaaagccgaaagctaccgatcaggtaagatgccactatgaaggtacattgatcgacggtacactgttcgacagctctatccaacgcggagaaccggctgtattcggcgtcaaccaagtaatcccgggatgggtggaagctttgcagctgatgccggaaggttccaaatggaaactgtatattccgtcagaactcgcttatggtgcaagaggtgccggagaaatgattcctcctcacagcacactcatttttgaagtagaattactcgaagtattataaataaaaaatttcaaagcaaaatgaaaaaagttagtatttttatggcaatcgccgctgcagcaagccttgcttcttgtacagctcaagctcctaaagcaaatctgaaaacagacatcgactcattgtcgtattctatcggtatggctcagactcaaggtctgaaaggctatctgacaggtcgtctggatgttgatactacttacatggcagaattcatcaaaggtttgaacgaaggcgcaaacaagactagcaaaaaagacatcgcttacatggcaggtctgcaaatcggtcagcaaatcagcaaccagatgatgaaaggtattaaccaagaattgtttggtacagactctactaaaactatcagcaaagaaaacttcatggcaggtttcatcgcaggtactttggaaaaaggcggcgtaatgactatggaagcagctcaagaatatactcgtacagctatggaaactatcaaagcaaaagctttggaagaaaaatatgctgactataaagctgaaaacgaaaaattccttgctgaaaacaagactaaagacggcgtaaaaactactgcaagcggtctgcaatacaaagtaatcactgaaggtaaaggtgaaattcctgctgacacttgcaaagtgaaagtgaactacaaaggtactttgatcgacggaacagaattcgacagctcttacaaacgtaacgaaccgtctactttccgtgctaaccaagtaatcaaaggttggacagaagcattgactatgatgcctgtaggttctaaatgggaactttatatcccacaagaacttgcttacggtgcaagagaatctggcaaccaaatcaaaccgttctctactttgattttcgaagttgaactgttgagcatcgaaaaagataagaaataagaaagttcttttctaaatagaaaaaggaaagaggcgcaaaacgtttgtgcctcttttttttgctttttcctattttttttctccgaaaagaagaataattaaaataaatctctatatttgcttactatttgataacaacaggaaattacaatttattattatggaaagaatagacaacctcgacaggcagatcctagagattatctcccagaatgcccgcatcccttttaaagacgtagcagccgaatgtggagtatcacgcgcagctatccatcagcgcgtgcaaagactgattgacctaggtgtcattgtaggctctggttaccatgtgaacccgaaatcattgggctacagaacttgtacatacgtaggtatcaagctggaaaaaggctccatgtacaaatctgtcgtagcggaattacaaaagattcccgaaatagtggaatgtcatttcactacaggcccgtacacaatgctgacaaaactttatgcatgcgacaacgaacatctgatggatttgctgaataacaaaatgcaagaaataccaggtgtagtagctaccgagactctgatttctctggaacagagtatcaagaaagagattcccatccgcgttgaaaaataattgtgatggagtttctaaatgaatatcaccttgcagggttattcatcggaatctgtacctttttgattatcggcctttttcaccccgtcgtggtaaaggccgaatattactggggcacaaaatgctggtggatattcctggtactcggcattgccggtgtgattgcctccttaagtatcgataatgtgatcttatcttctttattaggcgtgtttgcgttttcttccttctggacgatcaaagaggttttcgaacaggaagaacgggtacaaaaaggatggttccccaagaatccgaagcgcaaatataagttctagaagcaaaggattacagttttttctcgaaagaatttgcataattcgacggaaaatactacttttgtcaccgcatccagttaatggatacatcgggcttttagctcagttggttagagcaacagactcataatctggaggtccttggttcaagcccaagatggcccacgaaaaactcctgtaagtatttcacttacaggagtttttcttttatacggtcagaataatgagatttacaaaattaggaacagtattccatattgaaataagaatatcaatactaaatgattccaaagtgcttcaaagccttacacaaaccgtcattctcaacggtatcagtaacaaaatcggctgacgccttgacagtctccgatgcatttcccatagctactccgattccggcagctttcagcataggaatatcattaccgccatcaccgcaagccattatttccgccatctcaatcccataataatcggcaaaagctgaaagtccggttgccttactgattcctgcaaggttcacatcagcaaataagggatgccatcgtgataaggaaaggttaggcagaagcggcattacttgctgctccatttcatcatcgatataaaaacaaagctggcaacactcttttctgtcaaatagttcttcaatgtctacaacggcagggatgggatgttccacgattttggctatccgttcgacagtcggagtcagccgattgacaaacacgccttcatccagttcaatagcaactgcgaaatcaaaagcctttgctatttccatggctttcttaaaatcatcctttggaataaggtgtctccttatcacagtgccatccagtaagacacagtcagctccattcagtgcaataattccatcatacggaacagcagctatttcgtgaaggtcacccgctgctctgccggtagcaatgactattcgaatcccacggtcatgaatctccttaagggcttcaacagaagattgcaatattttatgagtttcaaaactcaccaatgttccatctacatcgagcatgattgcttttatcataacatctatattttttatttacagtctattacccagcgacaaagttactgaaaaaatccccatagcaggtatacctccaatacataaaacaaaaaaggcaaaaggaaacgagatccttttgccctatacctattgatacctactgaaaaatgatagttaacgtttagcggaagtccttcaactcttcctgcaatttctgacgggtaaagaatatgcggctttttacagtacctaacggaagattcaacttctctgcaatctcacggtacttgaatcctgaaacgtgcatagcaaacggaaccctgtattctttaggcagagcattgactacgcggtgcatttcctttaaatcgtaagctctttctgtactttcaaaacctgactcttgtggcagattcagatgatagaggttttcagtctgatcgacaaatgtctgatcgcgcactactttgcggtaattattaataaagatgttccgcattatagtatacatccatcctttaaaatttgtgtcgggggtatatttgtcttcgttatccaatgcttttaatgaggtttcctgtaacaaatcgtttgcttcttcacgatcggttgtcagtttgtatgcgaagcggagtaattcatcctgtactcctatcagatctttcctgaagcttaaacttttcatatacgttatttttaaattgtgagtattcgttgttataattttgatgttgcaagtttacgggttttcaacaaatgtggcaggtgaagaacagacattgtttaggggaaaatctatcggttgatagaatttaggtcatttttgatagtattcaggtggttttaatctgccgggatagcaaaaatcccattttgaagtcacacctgactcaaaatgggataacacaaacaaaacaaacaatattagcgattttcacaaacagctgtctttttatattaaaaaaatcataagacttaatttagaatctgtcgctttaacattctatttatgggaacaaaagtattactttatggcaaaaaggaacgcataatttaagaatagttataaagaataattgttttatgtataaaaaattgtatccaactataaagaattgtatctcatagtcagtacaaaaagagagataaattagtctttcggcgatattttataatatcacacattccaaagtgatgtaaattctcctacttcttttttcacataagaattaatttctatatttgggcaatgtacaaccaaataccaatttattatctatgactgatactatttcttatcaatatgcagctccttccacattgcaacggtcggccgatcaggacgaactgtttcttgccaaatatagcgaaatagaaaagagagaagccccctgtttcttttggggaaagctgacgcaaccttatatgacggcacgttgcctcattgcgttatccaatgttgtgcagtccagtttcaacctgacaccggcacaacttacaatgctgaaagatccgattgtaacagctggaaataaccgtctgcgctttgaaggattttctaattgtgcaggtgtatacgccagggtcgatgtacttcctgatggacacaacggagaattcttggaaaacgggacaacgaatgtagattttaatcccggaatgatttccgctttaggaggaataggcagacaagaaaatgtagtaatgtcggtcggccccaaagaagtgggactctataataaaggtgagaaggtgatagagcgaaaagtacctcttcccgtaaaatggataaagggactgactacggtacagatttatcaatccgttgccgaaaaggtctattccttcaatcgcatacaaaccttacaactcttccagacactaccgaaaagtagtgtgaaatgtgactattttttagtgatgcgcggtcaaaaaccggccttttcaccggtgaaaagtatgaatggcatctgcatcggaggactccaccgtttgcgcttgcttgaacctttgcttccctttgccgatgaactgaaagtatttgcacatcctactatgcaatctactatctggcaactctatttcggtccggtccgcttcagtctttccctttcccgcgaatgttggagaggattctccggagaaggtgccgcactggaatctttgctcgaagacgtacctgaaagatggatagaggcgatggataaatacagttacgccaaccaacagttcaaccctacgctttttgccatagaagaacatattgacctggataaggtagattctctctcggcacgattggcagcaatgggattgctgggattcgatttggatgaaaacagtttcttctaccgccgcctgcctttcaaaaccgaacgtattttgagcctcaacccgcgaatgatagctgcagaaaagttgctggaagaagacaaagtagaaatcattgcgaatgatggcaaccggacggaagcccgtgttacaggaagcggaggagtgaggcataccgtcattctggacagggagaacgaaaaagaacgttgcacttgcacttggttcagcagtaatcagggagaacggggagcttgcaaacatattctggcagtaaagaaactagcgcaatggaagaactaaaaaaagaactggagaagttatccaaagcctatgtggatactccggagaatgaagagaagatattaatcccttttatcaagagattattggagttgccaatgaaggacaggcggaagttgctgccgcttatccgggaattgcaatggataaaaggcaggttcgctggtttcagcagtgagacaacctgtagtgcggcacgggcacattttctatcggcagtacagtttgtatgtgccaacagacgggagatggatatggcatatcatgtgaagtttgatatgctttgcaaactactcccgctttacaaccctgcctggctgacagattttatcaacgatgacaaaacatggttcaatttcgatctcaattacgaagaactgatgcagctcatggatatgggttacctcaaagaaatcgctccaagccgtattgcacatgtactcccctggattacccgcatcagaaataagaatcccaaaggagacgatactttcaacagtgaactactactcaaacgggatattacactgaaagaacacatctggacgcttttcgaacacgaatcaatcatcggttatcaggatgattgtgccaaaaatgcttataaaaaaggaatcacaatacgggatgaaagtatcagcgcggccctctatcgcttttcactggacggccatctggatagagaacggctactaagagccaccctcgccacttttcaccggagcttcaaaaaagacatggcaggatggtttgccagattctttgaaacgctgcaaccgaccaccggagaatcgttatccttacaggaagagatcatgcaaacattcacttcttcctacaccaagccggtaaatataatgttgcaacagttgaagagcattgcagacgaagaaggattccgttatcaggaattcatcgaacgggcaaccacccttttcttctccagtcccaaaaactcgctattaaccatttactccatctttgaaaagatcgttgcgcaacattccgaaatgaaagagccttgttgtatcactctctgccaactattcttgaagaaggacgaaagcctgcaaaagaaagctgccaactttatttcaaaatatggggacgcctcttcgtccaatctccaagaaacactacagtcttatcaaccggagatgtttcaaagcgtgcaagcgatactcgcatctttcaagccacagtctatagattcacagtctacagaaccacaccttgcaaaagaagcaaatgcaacagatacaggtgtgacagaagacattcttcatacagaaggaaagaatacagaaagaaatagtacagatgaaaatagtaccgataactccctcctctccgaagagccatctctggaagccatccgcatttgccgggaagacaaccgtattccattccctgccgacaaagaagatttcctgtttcagcttagccgtttgttcgacatggaggagaactgggagatagaaacaacgattgccgctatcattgctttccatccccaactggataaagaagacctcaaccggatggaacctattttccaacgggcagccaatattgttgccaatagttgggaaccatacgaagatctccttgccactttcctgttggaataccaacgcttatgggcacagacagacaactccaacacaggagttttgagaaacatgttcacccggctggaagagaaactgaaaggaatagataaaaacaggggagcttacgacgaacgttccttcaaacgacttgctgactggaaacccggttacagcaacgcaacctgtttcatacctatccaacagttatggctgaatgtgatccgccaaataaaaggaggaaattcattgccattgctttctactcccacccataccccggcatacctacaagccaccgaactgatacgccggcttgccgcataccaggaagcaggaaagaaaccttgttcgtgggatttccaactggctattgcccgttgtgccatggaagacaaagaagaagccatcgccaccgcccggcaactgttgcaagatgaatacctgcatctctgcctgttcttattggacgaaaacatacaacccgaaccgccttacaaccatccgaccgcctgggtagctgccggactggtaaaagcaccggagacggaatttgaagcattcaagtctttctcttgtaacacattgccacacaatcatctgacaggagactacgagtggaaagaagtgaaacccaaagaaaactcatacgaaacggacagacgcctgctccaacttgattttcacaaatggcacaaatatatcgaacgcaacagccatcagctatggcaggaacatctgattattaacagcaaatacaacatggatgactcccgctacatggaacctctattgtgttgctaccctaaccggccggaaccgttgatagcccagattatctccaattacatggctttcggcagtccacaggaagacagcaaacgtacccttgcctgtgccttgcgcatgttgttgtctttccattgcccgctcaaagaaatgagtctactcctattaagcggctcgctgctttttgtagacaaaacagtccgttcctatgcagcggagttatgggtagaaggactctccacaggaagaataaacaaccaccgggtaggagaaatcctggcccggcttatcaacatggaacttgctccgttaaaacgcttcaccacacaagtgtacgaaagcatgtacaaacgaagcgctttccacaaccgccaactggaagaattgctcactgtatttatcagcggattgcccgacaaacccgtcaccggactcaaacaactgctcgaactctatctggaactattaaccatcaaccgcagcaaagttacaaacgaacaactcttgcaacgcctgcaagaatgggcaacgaacagcaatttgaagaaagtgaccacttcactcaacaaactataattaattcatgattatgaccctagaagaacgcctcaacgaaatagtagaaaagcaacagggggatgccatcatcccctttctgcaaggactcacacaggaagaacgaaagagcctggtaccccgcctgaacaaactggaagaatactacagtaaattcgtgcaacttaacgagaacacatacggtacacgggggacttccgcacagcatcgtatcatcaatcttaccgctctcgtcatctattcgctgaaagaattccgtaaacaccaatggggaatcaacaccgagcaactgaatgaattgatcccgtggtacgtcccctcctggctcgacagcttcttcaaagaaggtgaaggcaaagaattcggcggtttctacggaatggattacgaagtcctgatggattggatagagcagggaatacttactgtgacaccttctccacaaaccattgcgggttatctagtgaattatatgaataatactgatttcctgcaaaaacgcgaaatcacacttaaagaacatatttggtatctctttgaatacgactgcggacaaaattggatggataaccggaatggcggacaaccttatttttctttcagatacttcgtagaacacggacaactagaccgtatgcgtgtgctaaaggaatctctgctcgctgtcaaccgaaatatgaacaagaatttatgcggctggtttgcaggcatgtttaccgcacttactcccagcatagaagaacaactcgcgttacaaccggaaatattagccgtcctgtccgcccctcacagccgccctgtcaatatcatgctcggactgctgaagggcttatgcaatcatccgcaattccggatcgaagagtttctgaatcagacttccgttcttttcgcttcagatgtgaaggcagtccatcaaaacacattagccgtacttaacaagctggcaaaagaaagaaaagaatttcgtgacgccatctgttgtgttgccgcacaaggattaatgagccgggaagaatccactcaaagcaagatagtcaaactgatcctgacgtatggagagacggaatctcccacattaagagaagcactctccgtatatacggaaacgatgtcggcaaacacccaaaaagagctgaaggcttatttggagaataacgagtctgaccatacttctgcccataatgaggcgactcccgcccacttcggacagcccgacaacgattccgcctctttcgtgtatgaaccaatactccccattatccgtgaggacaaccggatacaggaaattgcttccaccgaagacctgatatttcttgccagccaagtgctggatgggaacgagatctatcacttcgacctgttactcggtgccttagtgcaatgggaccgtcaacaggaagcgaaacaaatctcacaatggacgcccattcttcaacgcgcttacaaactactgatgagcggaggaagttcacgaaacggcatattagaccaactaatggcaactttcctccttgattatgcaaagctactggttaaacgcttccctgaagaagcaaaagagctaagcgacttacatcagaaaatggtacagaaagatgaactgcaaaaaggtgaatgggcctatcgtaatctgcagaaactcaccatccgtcagaaaacgaacaaaaaagagaaattccccgttcacaaacgactcctatgccggacactagacctcttggaaagcaaggagaaacctttacccctactatccactcccacccatatacctatgtttattgctccggcaaccctgatagaaagattaaaacaatatcagcaggcaaacaccgagccagacgatatggatatgcaaacggcactctcgcgagtggcactggatgattcatcgcaagagcttcctatcctcctccaagacttaaagggggaataccaacatttactttctttcttgttaggagcagaaaacgcactccctcaagcacccttcacccatccttcctggtggatgacagcaggactcatcaagtcaccggagacaatctactccgaattcaaagatttctcttacagtaaaggtccacgtgaattcctgaccggaaactttacatggagaacttacctgcacactgactcatatatcgattacaacaagaaaaaagtagaatggacctccgcaattcttaatttcgatatcccggaaagcaagaactctcatatcgtcaataaagacgaatataatgaaagaatcagttaccattcatacgatcctcatccgttagtggtcgaaatgtatccgctgatagaacgttacgacgatatacagaacgatttgccacgtttggcatggttaactcccaatatgccggaaccattattggtatggtgcatccgcagcgcgatatactatccgatgctaaatgaggttagggaaataggcatcaccaaagccaccatcgaagcacttcatcagttaagacacacctggcatgaggcgtcttatatattggaagccagttgtatgttggtagcagataagacttcccgttcttatgccgccgaaatctggatagaccgtgtcggcaaaggatgcatagacagtaagcgcataggtaaaatcttaggttcacatcaacataccggctggggaccgctgaaaagactcaccgacctgatacagcaacaaatgatgaatgtcagccccctacacaaccgggagctggagaaactaatcgtggcaatgctggccggacttccggaaaagccaatcaaagatttaaagaagttgttggagatctatgcggaactgttatcaatcaaccacagcaaagccaaagatgaacaggttttgcacttgctggacgtttggaaaggagttgccaatctgaagaaagcagtggctaatatccaatattaagagaggcggctggaactacttaatctcttacgttgtgccaccgtatt

SEQ ID NO: 8182 - DNA, 7422 bp, Unknown
  gut microbiota DNA sequence
ctccatcaggtatttcacccggtaatgcccttcacccgccattttctgcttgcggataaagttcatctgacgatctatttcgtcgcgtgtccatttaccttcatcgggatggagaaaataaatgccgagtcccggaatcacctgccgtccgttgctctgttcctgccagtcgagggcgaaagggtagaaattgtttccctggaaatacatcatcggataaatctgatccataataccttctcccatccaaccttgcgggtcctgataaacggtaaagaaagcattccatccacgggaggggtaacgagaagtatcacggtatttacctaccgggcaggtacttactttcacccaaggcttcatagcttttacacctttatatatataacgtacaatttcggagatattatcccggcgccactgatccagtgtgcgtcctttattgtatcgtcggaaatcatatttatcaggaaaaagaggagcattctccggataacgcagatagtcgaaatgcactccgtccacatcataaccgctaacgacttcccgcaccagtttcatcaagtactccttcgttgccggatgtcccggattgaggaaatattcgcgcttgtaaggaacgcatatttctttcatccgcttggtgacagactgactgccgagcgaagcaacatgcttcttatttcctagtgggatagttaccatccaggcatgacattccatccctcgcttatgacattcttcaacggcaaaagccagtggatcatatcctggatttcctcctgtctttccggtcaggatcgaattgaaaggttcgattgccgaaggatataatacatctccacgagtacgggtttgaaataggatagtgttgaagttggcagccttcaacttatcaagaatatctattaactcttctttctgcttgcggattgtttgaggggttgttgcacgtgtgcgaggccaatccagtccgtacaccgctgtcacccatgcggcacgaacttcgtgcttgggttgcgcaacaattgagaggaaaggaaacaaaagtgaaagaatgaaaatagtatagcgcatatcctttattttttgttttaaatccctgcaaagttagtaaaagtgtcggtattgttgggctgtttcgtgagattatgttacatttgccaagttaaaaaacgacacgctatgattacatttactctatgcctgctggcgttgatagtaggctattttacgtatggacgcctcatggaacgcgtctttggtcctgacgaccgtaaaacaccggctcttaccaaggcggatggagtggactatattccattgcctacctggaagattttcatgattcaatttcttaatattgccggattaggtcctattttcggggcaatcatgggagcgaaatttggtagctcttcatacttgtggattgtgctgggaagtatttttgcgggggcagtgcatgattattttgccggaatgctttctttgcgtaatggaggtgaaagcctgccggaaataataggtcgttatttgggactgactaccaagcaggtgatgagaggattcactgtcattttaatgattctggtgggttcggtttttgttgcaggtcctgccggattgttggcaaaactcactccggaaagtttggatgctacgttttggattatcgttgtatttgcatattatattctggctactttgctgcctgttgataaaataattggtaaaatctacccgttgtttgcggttgccttgttgtttatggcagtaggcattttggtgatgctctacgttaaccatccggctttgccggagttatgggacggattgcaaaatactaacccggaagcgagcgaacttcctatcttcccgattatgtttgtgagtattgcttgtggtgccatttcaggtttccatgctacgcaaagcccattgatggcccgttgtatgacttcggaacggcatggacgtccggtattttacggtgcaatgattaccgagggcattgttgctcttatttgggctgctgccgctacttattttttccatgaaaacggaatggaagaaagcaatgcttctgttatcgttgatgccatcacaaaagaatggttaggggcaatcggcggagtactcgctattttgggggtgattgccgctccgataacttcgggtgatacggctttccgttcggcacgtctgattgtggcagacttcctggggatggaacaaaaaagtatgcgccgtcgtttgtacatttgtattccgatgtttgtactagctattggtttgcttttgtatagtttgcgtgatgcaaacggatttaatatgatatggcgttattttgcctgggcaaatcagacattggctgtgtttaccttgtgggctataacagtttttctggcggtatccaagaaaccttatatcattactttggtaccggcactgtttatgacatgtgtatgttctacttatatatgtattgctcctgaaggattaggactctcgcatacagtctcctatggcgttggtatagcgtgtgtaatggttgcgactgtttggttctatatctggataaataagcaaaaaacaagaaaattatcagaatgaagaaaataagaaaatcaacaggagtggcgcttgcattccttatttatgtatctgtaacagcggcttatttgttgcctcgtaatacggaagtcagcctgacagagaaaataattacggtggcagtttcttatgtcatcgtcctccttctttggctggtgcttcggaaaaaggaacaaatgcgcgaacgccgcaaaaaagacgaacaatctattcacttaaaaaagtaagtttatgaagaaattagctttggctctttgcttattggcagtctcttttactgcacaagcgcaatttgagaaaggaactacgattattaatccttcattgtcggggttggacttttcgtatagtaaaaacgataaagcaaagtttggagttggtgcacaggtcggtacattctttgccgagggtattgccttgatggtaaatgccggagccgactggtcgaaaccggtagatgagtatacactgggcacaggagtacgcttctacttcaataaaaccggtatctatctgggtggtggactcgactggaaccgcttccgttggagtggtggaaaacatcagacagactggggactgggtatcgaagccggatacgcttactttctttcgcgtacggtaaccattgaacctgccgtttattataaatggcgtttcaatgatggagatatgtcacgtttcggtgtgaagattggattcggtttctacttgtaagagagattgatttttttcatatattaagcccttgcagatatagaacttctgcaagggcttaattacataaatgtattattatagttttgacgattgcttatcctagtttttctttcagaaactgccctgtatagcttgctccgcaggcagcaacttcttccggggtacccactgctacgatatttccgcctttatctccaccttccggtccgagatcgattacataatcggcacatttgatgacgtccatgttatgctcgatgataacgatgctgtgtccccggcgaatcaatgcgtcgaaagcatccagcagtttgcggatatcatgaaagtgtaatcctgtagtcggttcgtcaaagataaacatcgttgggtcagctttctcctgacttaaataaaatgcgagtttgacacgttggttttcaccaccggaaagggtagaagaagcctgtcctaatttgatatatcccagtcctacatcctgcaaaggaagcaacttcttcacaattttcttctgtccatgttcgttgaagaactcaatcgcttggttgacggtcatctccaatacatcgtagatacttttatcgttgaatttcacttccagcgtgtcggatttgaagcgttttccatgacaagattcacactccaataccaagtctgccataaattgcatttctacagtaatggttccttctcctttacactcttcgcaacgtccgccttcgctattgaaactgaagaatccgggggtatatcccatttgtttcgccaaaggctgttcggaccatagtttgcggatttcgtcgtaagccttgatgtaagtcaccggatttgagcgcgatgatttgccaatcgggttctggtctacaaattctacattccgcaggtcacgcaaacttcctccgattgaagagaattctcccggtcggtcactacattcgtctaattcacgtttcaatgcccggaagaaaatatctcttaccaatgtactcttcccggaaccggaaacacccgtaacaactgtcattacattgagcgggatacgtacgtttactcctttcagattattctcacgtgcgcctttcaattctatataattattccacgggcggcgatgctccggaacaggtatttcatcttctcctaaaagataacgtaccgtatagctgttgcttcccttctttaaatccttcatatctccctggtaaacaacttctccgcctaggcgtccggcattggggcctatatcaataatgtagtccgctgcacggataatctcttcatcgtgctctaccactactaccgtatttcctaattgttgcagttgacgcaacacatggagcaggcggtctgtatcacggctatgcagtccgatgcttggctcgtcgagaatataaagactacccacaaggctacttcccagcgaggttgccagattgatacgctggctttctccacccgataaggaattactaagtcggttcaacgtcagatagcccaaacctacatcgattaaaaagcgaatccggctatttatttcaatcagaatacgtcgggacacattgctgtcgtgctcatccagttccagatggtcgaagaattgcttcagttctgtgatgggcaaatccaccagttcggaaatattctttccgcccacccgtacatatccggcttccggtttcaggcgggtgccgtggcatttcgggcaaagcgtctttccccggtaacgcgccagcatcacccggtattgtatcttatattgattctcttccagcatcttgaagaaatcattgatgccgtggaaatattggttgccttcccaaagtaacctacgttgagcgtctgtcaactcataataaggagtgaaaatcgggaagtcgaatttttccgcattgtgaatcaattcttctttccattcgcccatcttttcgccgcgccagcatacgatagctccttcatacaccgataatgaacgatccggaacgactaagtgctcgtcaatgccgattactttgccgaatccttcgcacaccggacaagcgccgataggcgagttgaatgaaaacatctggtcgtttggttcttcaaagatgatgccgtccgcttcgaatttagtgctgaaagtatgtaacttcgtggttccatctgatagaaaaaaacgcagcatacaggttccgtcaccttcgtacatggctgtttcggcagaatcagtcagtcggctgatggcgtccttgctggtggcaaccgccatacggtcgaccagcagatagacttcatcacctgccacaggtgtatattcatcgattcgtttcatttcaccgttcacttcgatacggttgaatccttgtttcaggtctatctccagttgctgttgcagtgtgcggtcttcacgcaggcggatagacgtcagcaccgtatatcttgtgccttccggataagaaagcatacagttgacgatgtcctctgtggagtgcttcttcacttcctgcccgctgatgggactatacgttttccccacccgtgaatataacaggcgtagatattcgtaaatttcagtcgaggtgcccacggtggaacggggattacggctgtttactttttgttcgatggcaatggcgggaggaatccctttgataaagtcacactccggtttgctcattctccccaggaactgacgcgcgtagctgcttaagctttctacgtagcggcgttgtccctctgcataaagggtatcaaaagcaagtgatgattttcccgaacccgacaatccggtgataacaacaagtttgttgcggggaatatctacatcgatgtttttgaggttgttgactcgtgcgcctttgatcgaaatatagttgttttctgacataaaatactccttttttatggtagtcggcaaagttagcgaatttatcgagagtttgtattatctttgcgtcacattattacgatttaagaatattatgaagctgaaaaactatcttttacttttagctcttcttctggtggtaggagtgagggcacaggtgccatcaggcaataaatatcctaaacgtgaattccgtggagcgtggatacaagctgttaacggtcagtttcgtggcattcccacagagaggctgaaacaaatattgattagtcagttgaactctcttcaggaagctggtattaacgcaatcatctttcaggtacgccctgaagcggatgcattatatgcttcccagcatgaaccgtggagtcgttttctgacaggaacgcaaggtcagatgccttctcctatgtgggatccgatgcagtttatgattgaagaatgtcagaaacggaatatggagtttcatgcctggatcaatccttaccgtgtgaagacctcattaaaaaataagttggcgccggagcatatttatcaccagcatccggaatggtttgttacttatggcgatcagctatatttcgatccggcacttcccgaaagccgggagcatatctgtaaaattgtgaccgatattgtgtctcgttatgatgtagatgctattcacatggatgattatttctatccttatccggttaatggattggattttccggatgatgcaagtttcgcccgttatggtggaggtttcaccaataaggcagattggcgtcgtagtaatgtgaatgtgttgataaagaagcttcacgaaacgattcgtggcatcaagccttgggtgaagtttggtatcagtccgttcggtatttatcgtaatcagaagagcgatccattgggaagcaacaccaatggtttgcagaactatgatgatctttatgccgatgtactcctttgggcacgtgaaggatggattgattataatattccgcaaatttactgggagattggccacaaagctgccgactatgagacactggtgaaatggtgggctactcattcggaaaaccggccgttgttcattggtcagtcggtgccaaagacagttcagtttgccgatccgcagaattcttctatcaatcagcttccccgcaagatggctttgcaacgtgcttaccaaacaatcggaggtagctgtcaatggtatgcagcagctgttgttgaga

SEQ ID NO: 8183 - DNA, 14750 bp, Unknown
  gut microbiota DNA sequence
tctttaccttcccacggtcgtggtaatatcttctcacggctgtgggaagatcctaccacagccgtggagagatctcgtcacggccgtggagaattagcaatatcggtgctttaggggaacaatagcggcaccttggttgaacaataacggtgtcttagcggaataatgcaggcttggtaaataagggataattgctgcatagtgtagttttaaacaataatatgctgacaataaaagacagaaatctttattgtcagcctattgtcagcttctattgtcagtaggtaatagcttgaaaacaatcactttatgaagccataactcttggcctgacaataaaagccattttttataaattctcaatgtagcctaagttcaacttagcctcaaattatatatggaatggtattacctattgaatctgaatactgcacgtttgcaagtcattttcatttgaactgtttccgtaaagtatcttatatgttccgcttaaaggacgtatggtattggtcgctgtatcgaaccattcgaaagaatcgtatggaagctctatattgacattctgcgtcttacctttagcaatgttgacccgttggaaaccacgaagagttttttgtggaccttctttgtcgtcgggacggcagatgtacacttgcaccacttcttcaccgtctctctgtccgacgttacttaccgggatggtaaggattgccttttcgcctttgtttaatttcgattggttcagggtagcttttccataagagaaacgggtataacttaaaccgtagccgaatggataaagaggtgtttccgtcataaaacggtaggtacgccctttcatcgaataatcttcataatccggcaattgttgtatgcttttatagaaggtgataggcagacgtccggcaggattgtaatctccgaaaagaacatcggcaacggctgttccacctgcctgtccgggataccatgcttgtagaatcgcatcacaactttgagtttcgggtacgatagccatcgccgaaccggagaaattaacaaataccgttttctttccattctttttcagcagagcgagcacttcgcgctggatggcgggcaattcgatttccgtacggtcgccacctttgaatccgggatcagatacccgcatcgattctccttccaacaggggagagatacctccggagaagatgactacatctgcatttttcaacttgtttagaacttcgcgcgcatccattggagtctgtttagccagatcgaaatgaagtgtagggttgtcttttacttgaataaaatgcaattgaatgtcataactctttccagcttcataattgaacgaatacaggttggtgtgattcttgatattggttgcttccgctatctgcttgccgttgaggaataaagtaactcctccgttcgtcatcacgcggaaagtggcggcgccggaatccgttggacggaaagtagaacgatagatggcggtgaaattcttcagtcccacacccggagcaaatacggtagaaccttctgcgctgaaatggaaaggagtagtcagacggtcggttgcggcaatcttgcctttatattcgcggttattccaataggtggcgctgaatccggcctttccgtcgatgctgcattggttgaacaagctgtgcagggtggtatcgttcgtgtatccgcacactggttcatagatgatttgtgcgtcgggaagtttggcgcgtattccttccagtaaagttacggtgtgtgaagggaaaccgttgtaattaccccattgcatcaccgagtcgttggcgttggggccgatcactgcgactttcatttgacggtttaatggaaggatattgttcttgttttgaagcaataccagactttcatgcgccattttcagtgccagttctttatgcttggggcagtcaataacagaataaggaatgttactccacggatgagtcggattcatttctcccagttcgaagcgggctttcagcaatcttttgactgatgtgttgattttttcttccgaaatcagaccttttttcacggcatcggtgatacttttgaagttaccgccacattcgaggtctgttccgtttaaaacagcgtcggcagaagcgtgggcggcatcgggatgcgtttcatgttttttgcgttggaagaaatctccgattgctccgcagtcggttactacgattcccttgaatccccaatcgttacggagaatttgggttaacaggcgattgctgccacaacagggatcgccctcaaaacggttgtaagcgcacatcacttcttttactcctgccttttgtaccagttctttgaaagctggaaggtaagtttcccataagtctctgggagcaatgttctctgcattgaaactgtggcggttccattccggtcccgagtggacagcaaagtgtttggcgcaggcgtgaagtttgtcatattcggcatcttccggtccttgcagacctctgacgactgccattcccatgcgtccgctcaaataagggtcttcgccgtatgtttcctgtccccgtccccagcgagggtcgcggaatatattgacgttgggagtccacatggtcagtccctgataacgtttatactgtcctctttcattgaaccgacggttcttggcacgtgcttcgtcggatacggcatcaaagacttcatatagtaattcgtcgttgaaagaagctgccatacctatggcttgcggaaaaacagtagccagtccggcacgggcaacgccatgaagggcctcgttccaccattcatacggcttaatgccaagccggggaatagccggcgaattgttttgcatcaacgctactttttcttctaatgtgaggcgttgaagtaaatcgtccgcccgttgttccgcagttaatttcgtgtcctgatagggatacttgctgggttgttgtgcctgtacatttaccccttgaattccgataagacaggcaatgatccattgctttttcattttctagttcttttggtttttagatttgaggctgcaatagtacgcgcttttcattatttttgtggggattatccggtagaaaaggaggaattcttcactttttcctctctttgtattctgatggcgtaattcctatcactttcttgaagcatttgctgaaatacttcggatcgttgaaccccgtcatatatgctacctgcgagaagttgtattcgtcgctgtcaatcaattggacagcacgcttgatacgtatttcccgtataaagtccacaggcgtcagtccgacgattgattttaatttccggtagaagatggtacggctaagcatcagttgttctgcaaactggtcaatggttagttcggcattgtccatctgctcttccatgtatgccattactttctccataaattgctcgtcgtacggagtaatttgtggttgcgaaggagtgagaagatctggagaagaggcagtctttccttccatcagcctgttcatataaatttcctgcaatgctttgcgctggcgtagcagggaggcgatacgggtttttagataagtggcactgaaaggtttggtgatgtaatcgtcaataccttgttccaatccagcgatgcgatcgtccaaagaagccttcgcagataacacaatgatggggatatggcaaatattattgttctctttgatttgccttatcatctctaaaccatctatcacaggcatcatgacatcactgataatcaggtccggcaaatcgtcaacagcatgctgcaatccttcttcaccgttggaagcggttatcactgtgtagttctccgatagaatgttcttcagaaatgctttcaactcttcattatcttctgccactagtatggagaaaccatccgaattattctcaagctcttctttttcctccatctcttccggtgcttttatgctgtcaaccggatgaggcgttgaactttggctgtcgttcaggataaactctacctgcacatcttcttcgaaaacctcccgttgtaaaggcaaacttaccgtgaaacgactgcctactcccggctgactgtccactgtaatagtgccatgatgcatttccaccatctctttcaccaaagataatccgatgccggaagaaggttgcagaatattctgtttgaccaatgattcgaaacgttggaacaaagaatgttgcttttctactgcaattccgattccttcgtctgccacctctatctctatcgtcttttctttcgttgtcatattgaccgttattgatttatcggcaggtgtgtacttgaacgcgttggaaagcagattgaaaaatatcttttcaaatttatctctgtccacccagctatacaccgattggatggtagaggtcaactgatagtttatattcttttcttcggctatcgatttaaaactactcatcaccttctgcaaaagtggaatcaaatcggtctcttcaatcaatagtttcatcttttgattctgaatcttgcgaaaatccagaatctgattcatcagccggagcatgcgttctgtattctgatgtaccagagtcaagtgttcacgggcggaaggagaaagaggttcattctccaacacctccgttacagggctgctgattaatgtcagcggagtgcgtaactcatgagatatatcagtaaagaatcgtagtttgatatttgctaattgttgctccatatctactctgtggcgtaaccggtagatgtaaaacaacacatatacgatacttgccgtgaaaagtataaacagaatgaaatagagtaaccatgcccaatatgtttcccaaaaggtggggagtacatgtatttgcagagtccgtacattgtctacccaaactccctcactgtttgtagattttatctgcaactggtacttgccggcaggcaaattgatgtaacttgcagaacggttattgtcagcttcattccattcatcctctagcccttgcaggcgataggcatatagaattcctttcggattgacgtaatcaagcgcagcaaactggaaagtaacattcctttgcgatggcttcaattccagttctttcagattgtcgatggaatgagcggtggaatgtccttgaatcttaagtccggtaaaaacaataggagggacatagtcactcttccgcatcttctccggagaaacttctagaaaacctttgtcagttcccaacacaatttgattgcgggcattgataataggaagagcttcggagaagttgaactcctggtagatggaactcaattcataattctcaaatgtttctttgacaggattgaatttggaaagagcaatttccgaaacaacccataattgattctgcgcatcttcaatcatcgatagtgccaagtcggaagccaatccgtcgttcttgtcatagttcttgaattggatattctcgctaagcaagttgggagatatcactttgtttacgcctccggtaaaactgattacataagtggttttatttttgtctgtataaatgtgcatgatatcgttggcattaagactgtttttatctcccggtctgcggatattccggtagaatttaatctcttccagccgttcgaagttgttcgagaatgtaagcaatccattagtcgttcccactagaatgactcctcccggagcttcggtgatattacgtactttcattccgtaagctatggggtagtttcttaattcattattgctatggataaatgaggtttttccatcttttgtttgtgtcagcaaatttaatccgcctccataacatcccacccagatattattgcgactatcctgaaagattgtataaatgctgttgctgcttaaactgtaaggatcattgggctggtgctcaaaatggtgaatagagtaatgattttctcttgctttttggtttactcctatctttggggaaactcctgtgctttttagttggaagagaccgatatcttttgtccccaaccagatatttccttctttatcttccagaatagaatataccccattaaagaaagcttgcttttcttttgtgatattcccttgtttggataaatatcccaccaagctgccatccggtgcaaatatttgaatataattagacttcgatgcggtccaaaggcgattatgactgtcttgcaggaatgcccgtgtttccgcctcgtaatcagtcaaattgaattgataactttgtggaaagaaacataacttttctacgccgcgtgctgttgcaaaccagcagtttccctgattatccaatgtataatacctgactaacgggctgaaaatggatttgggattattgatgtctgtaagaagcggtttgagagttttttcttttctgtcgtaatagcagaagtttccttccgtggggagtagccataggttgttggcattatcttcaaatataagtttgcgacttttgcgtccatgtttgataatttcatctttgggagtgaacagatgttctttctcattggtcgctagattaagacggacgataccaggatcttttgaaaagatccagatctctccttgacggtcttgatagacggattctacaaagttagaagtctgtgtagcggtacggatatcgatttgctggaagctgttttggagaatagaatacaatatcagtccattgtctgttcccaatgccaacatatctttccctatcgtagtaacattgtttatcttatcgtgcggataaggaatatctacgaatttcagctttttagtatgaaaatcatacctggctaacttatcattctctgcgatcagatagatactttcttttatttgagtgataaattgaaaaggaaagtcggtatccaacgttttctttcctatgatggaaacgcctttgtccgtcaatatccattcgtcttcttcagagtcttggtatacgttaaatatctggtcacctttcaagttgtgattcgaagatgcataaagggtgataccttctccttttttacataattgctcgtctactctgaatgcatatccgttttcacagagaatccaggcaatccctttctttaatgaatagatacgtgtaacataattagtttgtttcgtggaaagttcgataggttgaagcacatcaataaacttctcggactctacatcaaaaaggcaagcttgcccatcgtaagtggggcaccatatatctccgtatttgctttcagaaatagttcccatacgattacttccgaatgcgtatttgctctcttgtgaagttttgtaagtcttaaacgtgtagccgtcaaacttgttaagcccattccaggtactaaaccagatgagtcctttctgatcttgcaatatgttcattactactccttgggcaagaccgtcactcaccgaaaaatgtttcacctggcagatcggttgagcaattaaagtgatcgctattgttagaaaaagaaataaagtatggagccgtttcatagtagttgctttaatgtttatagcaaaaatagataaaacaatgcagaatagaaagttcgataagtggtttgaacaaattatactcgtttttgcttattttttcctcttcttactatataatattggtctctcttctttgttttggaaaagtgaaatgaataatattcgttaaaaaaatcctctttataatcttattcagaatataaagaggataattttattgacaagagttgcatggggtatggtgagatgaaatcataattggggaataattgcacaagactttcacaagtatcctcctgccaatgcctaaaatcattacaaagctaattaaatagttttttgaatagcaatgtttattaatttatcttatggaatttatgaaatttttaatatattgaagatattttgtgtcaactttccataactcgctgattttgcttatgtttgtagataaaataaagaaagaagtgaatgaacatgtctacacagctattatataatgattttcctacttttttgcggaaatattttccttacaaggtacaaaagatttcattgaacggaggtttcacttgtcctaatcgtgacggaacaaaaggatggggcggatgtacatattgcaataaccagacttttaatccggattactgccggacagagaagtctatcactacccaattggaagaagggaaatgcttttttgcccataaatatccggaaatgaaatatttggcctactttcaggcctataccaatacgtatgccgaactggaaggcttgaagcgtaaatatgaagaagcgttgacggtagacggggtggtcggattggtaataggtacacgccccgattgtatgccggagagtttgttgcgttacttggaagaattgaacaaacatactttccttatggttgaatatgggatcgagagcacttgcgacgaaaccttaaaacgcattaaccgggggcatacttatgccgatacggtggaagccgtccggcggacagccgcctgtggtatcctgacaggcggacatatcatcctcggacttccgggagaaacgcatgatacgatggtggcacaagcggaaatactttccgatctgcctttagctacactcaagatccatcagttacaattgattcgtggtacacgaatggcgcatgagtatgatgaagctcctgatggttttcatttgtttaacgaggtggaggaatacattgatctggtgattgattatgtagaacatcttcgtcccgatatagttgtggagcgttttgtttcccaatctcctaaagatttattaatagctccggactggggattgaaaaattatgaatttgtagcgcgtttacaaaaaagaatgaaagaaagaggtgcttatcaaggtaagaagtatagggattcggaaaaaaggattatttttgcagacgataaacttaccactgaataaatagctgtttgagcggaatatagatggtggaagaaatataaatggatttgaagaatggaacataaaacaagaattaaaggaaatgtccactatgtgggagtgaatgaccgtaacaagcacagatttgaagggatgtggccattgccctatggagtttcatataactcttatctgattgatgatgaaatggtggcattggtggatacggtagatatttgttattttgaagtctacttgcgcaagatcaagcaagtgattggagaacgtcctattaattatttgattataaaccacatggaaccggatcattcgggatctatccgactgattaagcaacattatccggaaattattatcgtgggtaacaagcagacattcggtatgattgaaggtttctacggtgtaaccggcgaacagtatctggtaaaggaaggtgatttcttagctttgggacatcataaactgcgtttttatatgactccgatggtgcattggccggaaacgatgatgacttttgatgaaacggacggcgttcttttctccggcgacggattcggatgctttggcactgtagatggcggattcctagatacgcggatcaatgtggataagtattggggggaaatggttcgttactactctaacatcgtaggcaaatacggaagccccgtgcaaaaagctttgcaaaaattgggaggactacctatttctgccatctgttctacacatggtccggtatggacagagaatattgccaaggtaattggtatctatgaccgtttgagtcgttatgatgcagacgaaggtgttgttattgcttatggaagcatgtatggaaatacggagcaaatggcggaagctattgcagaagagctttcggcacagggtgttaagaacattgtcatgcataatgtgacaaagagccatccttcttatattatagcggatattttccgttacaagggattgattatcggttctcccacttatagtaatcagatattcccggaagtggaagcgctgctctcaaagattctgctgcgtgaggtgaagggacgctatttgggttatttcggttctttcacatgggcaggtgctgctgtgaaacgtctggcagagtttgcggaaaagagcaaattcgaattggtcggtgatccggtggagatgaaacaggcaatgaaagacctgacttatactcaatgtgaaaacctggcacgtgccatggcggatcgtttgaagaaagatcgttaaaactgtgaatgagataataatttattaactaacctataaaacaatcgacttatgagacttattattcagccggactatcagtccgtatctctgtgggctgcacattatgttgctgctaaaataaaggctgccaatccaacccccgaaaaaccatttgtattgggctgtcccaccggatcttctcctctgggtatgtataaagctttgatcgacctgaataagaaaggaatcgtttccttccagaatgtggtaacattcaacatggacgaatatgtaggattgccgaaagaacatccggaaagctattattctttcatgtggaataactttttcggtcatatcgacatcaaaccggagaatacgaatattctgaatggtaatgctccggatttggatgcagagtgtgcacgttatgaagaaaagatcaagtcatacggtggtatcgacctgttcatgggcggtatcggtcctgacggacatattgcgttcaacgaaccgggatcttcattgacctcacgcactcgtcagaaaacattgacgatggataccatcattgctaactcccgtttcttcgataatgacatcaataaagttcctaagacttctttgacagtgggagtgggtactgtgctttctgcaaaagaagtgatgattattgtaaacggtcataacaaagctcgtgctttgtatcatgcagtagaaggtgctatcacacagatgtggacaatcagtgcattgcaaatgcatgaaaaaggtattatcgtttgtgatgatgctgctacggcggaattgaaagtaggtacttaccgttacttcaaagatatcgagtctgctcatttagatccggaatctttgattaagtaagcataaaattgattctataaaaagagaatgggctgcatcagtgttgaattgattgcagcccattttgtatgttagagatagctgtcagcggaattaattctcttccagccagccttttccctgtcggacgatttccagttcgttatccgtgcatttcactaccgttgaaggttctatacctccgataccgccgtcaatgaccagatcaacgatgtcgccgaacttttcatctataagctcgggatcagtcatatattccaagtcctcgtgctcttcgtatggcagtgtggtggtcataatgggagcgtccagcaggcgtgcgatttcacggctgatgttgttgtccggcatacggatacctacttctttccggttgcggaagattttcggtaaccggttggtgccgttcaaaataaaggtaaatggccccggaagattatgcttcatcagtttgaatacgttattgtctactttcgcgtactcactgatactgcttaagtcataacagatgatggacagattgttttttcgagggtctatctctttaatccggcagatccgttctatggcacgttccttcagaccatgacagccgatggcgtacatcgtatcggtaggatagatgataagtccgccgtcattcaggatatcgatgattcgttgtaaatcctgcgggttattgtttttatcatatagtttcagtaacatattaaaagcttcatcccttccctctcgcaaaggagaaggaggagggacgagtggggttaaatggttattatcttctctttttatttgagtttctttttcaagaaatccagtgccttttccgcagctttctctgtgactttctgtttgattgagtctttgttggcggtagcggcagagtccagtccaagtttctgtccgagtttgctgattgcttcatcggctacggcttcgacagcttggttggccatgcttttagtatctacgctgactttcggagaggtgaacgaacctccgattttcaagtcaagagtcattaacttagagatattgcctacggatgcgggcagtttcactttaccggaatagtcgatggtttgatcgagtcctgtgctgccggaaagattcagtgtgtagtctcccatcttgatatcaaacggtttggtttctacgcggccgtctttgatggtgaaatccaatgtcatgtctttcactttcatgtctttcaggctgggttgcttcacggcatcggctatctggtcgattgcttttactccgcttaaactaaggtcgcgcgtggaaaggctaccgtcaccctgcatcgtattcagtacggggctcatggctgcatccaaatctgtcaggacattgatgcttccggagaaattacctttcaggttttcgaagataggagccattttctgcaccatatccagttctttgtaagcttgtgcgaaaccgatattggagagcttgaatccggctttcatttccggcttctttacgttggcggtggagtagtagccgttcatcactacattaccacccatggtgttcatggacaggtttttcatatccactttgccatcttttacaacaagtttgccattcatattattgaaagacatcttgtcgaataacacctgtttcaggttagcgtccatttggaagtcgatgttacggggaacttcaacaatacctgtggcggctgtatctacagagtcggtagacgcagcttctgatgtggaggcttcatcggcagaagcggtgatgaagtcgttcagattgaagtagttggaacgaatattcaggtttcctttcaatgtgctacctttcaatacataaccgatgtagttttcaaaccggctgtcggcggtgatatcgttctttccgatgttgacagttgtttcactcaactggaggtatttcggagtgaaggtgaagagagactttttaatttctacatccggcatatctttcattttgagtttcatgcccgtcagtccgatagtacccgaagcttgtatacgttcgtattcttctttttcgatagatgagaggcgtcccgacatttgcatatcggcatcgatggtaccgttcaactccatgtctccaagcgggtagacttgtttgatcatacctaagttgagtactcctttcgcttctgctttaaaatccggatcactgatcggcgttttcacagtagcagtcaggctaaacggatttccggcaaggcggaaactgaacggatggatgttgaccgtagtcaggtctatatttcctcccggattttgaacgttggcactgatgttgatttgatctactcctgccggtagagccggatagcggaacatagcatccttgacttgcatgtcaatattgaatgccggaacggtgtctccttgcaggatacctttggccgttgcggtaagcgttgcagttccgtctgttttcagactggagaattctgtggcgtaaatggcgggaattaatgacaaaatttccttgaagcctatatcattcgtgttaagtttcaagtccatgtcgatagccgggtctttcaaggctacccaaccgtcgattcctgcctgaatggcgttgaggcggatagtgttgtctttcaatgtgtatttgttgttggcaaggtcggcatctacgtccatcttggcggagatattggcatttgccaggaaagggattccattcatcttgtaggtgagtgatttggtttccgcttccagtttcagagtggtacgttcgcttcctaagtctccggcacaaatagcgttgaagtcgcggatatcagcatacatctttccttgttgatcgtcataaatcagattcatgtttttgataacaaagcgttgcagtttgactttgaaaggagaagaggcttcttcttctgcaggcgtttcggctgttgctattgtatccggtttcatgatatcccagttggcacgtccgtccggcaagataatggcatgtaacttcgtgtcttcgataaatattttagaaatatcgtaaccgctatctccgaaaagggagaataagttgactgcggcggtaacttctccggcttgtacaagggtgtcattggcaaattcacccgtacccttcagccagaaatcttcgagagtgacagaagcctgtggaaaattgcggaacagactaatgttaaggttcttaaagtcaaattgtgcgttaagcatcttgttgccttctgtttttacaatgtcggctatctttccttggaaggcgaaaggaagaaggaacatcagaatgataattactcctacggtgatagctgcgattttcaaaccttttttcatttgcttctattttaagagtttgagatataatgaagagcaaaactaataaaactttttgataataagagataaaagagaaatttttagggattcttatttttaaattaagcggaatccaaaggactggcttctggcttaatccgaacttccggttttagttcaaatcggtgcagaaatgagataaatgatcattttgcggagtgccctgaaagggcttaattatatagcgtagggcaacgccctacgcaaaaacgacaatctgaatttgcgccctgaaagggcataattgtatacggttccgccctttcagggcttgtggctggtgtgtttttttcgtagggcgttgccctacgctatataattaagccctttcagggcaccccaataaata

SEQ ID NO: 8184 - DNA, 18743 bp, Unknown
  gut microbiota DNA sequence
cgtcctcgtcgttttggtaagtcattgttgacttctacattacatagttatttttccggtcagaaagaattatttcaagggttggctatagaaaagctggaaaaggagtggacggaatatccagtgcttcactttgatatgagtacagccaagcatgcagactgtgaacagctgttgcaagagttgaatatgaagctaattcgttatgaggaggtttacggaaagatggagggagaggttaatccaaatcagcgtctggaaggactcatcaagcgcgcttacgagcagacagggaaacaagtggttgtgctgatagatgaatacgatgctcctctgctggatgtagtacacgaggaagagaggcttggcgtattgcgtaacatcatgcgcaatttctacagtcctcttaaagcgtgtgatccttatttgcggtatgtgtttttgaccggtatcaccaaattctcccaacttagtatatttagtgaattgaacaatatcaagaatattagcatgaatgagtcttatgctgccatttgcggtattacagaaaacgagatacttgtccaaatgaaagatgatgtagacgcattagcccaaaaactggaggttgcttctgaagaggtattggcaaaactgaaagaaaactacgacggctatcatttcacttatccgtctcctgatatatataatccattcagtttgcttaacgcttttgcagatggtaaatttaattcttattggtttggtagtggtacgcctacttatttgataaagatgctggataaatttggtgtagcgccttccgagatagggagaaaaactgcggttgcggaggattttgatgcacctacagaaagaatggtgagcattactccattgttatatcaaagtggctatatcacgataaaagattatgataaggagttggatttatatacattggatattcctaataaggaggtaagaataggtttgatgaaaagtcttcttcctaattatgttgctagtaaaacaccggaaaccaatactatggtagcttatctttcccgtgatattcgtaatggtgatatggatgctgctttacgtcgtttgcaaacgtttctgtctaccattcctcaatgtgataatacgaaatatgaggggcattaccaacagatgttttatattatattcagtttgttgggctattatgtagatgtggaggttcgtactgccagtggacaggtggatatggtgcttcgtacaaagactacgttgtatgtgatggaattgaaactggacaagagtgcggatagggcgatggagcaaattgatctgaagaattaccccaaacgttttgctttgtgcggattgcctatagtaaaggtggctgtcagttttgatagcgaacagtgtacaataggggaatggaaaattttaaaagtttaattatattgctgattaataaattgttatatactagtatgaatataaagagctccgcaaggggcttttttcttttctatccggaataaaagcttcacctttgcagtgttgatcaacaaaacgtgaataaataatttgaatttaaatctttaaaaaaacgtagtatgagtgtaatttacaaagtcattacgcgcccaacagatccgcgtgttcccaattctcccaagagatattatccgcatctgatcactttaggtcagtctgtcaacctgaaatatattgcacagaaaatgcaggatcgttcttcgctgtctgtcggtgatatcaagagtgtgatccagaattttgtggaaaagatgaaggaacagttgttggaaggtaagtctgtgaatattgaaggtctgggcgtctttatgttgactgctcgttcgaaaggtgctgaattggcgaaggatattaatgccaaaagtgtagagagtgttcgtatcttttttcaagcaaataaagagctgcgcgttacaaagactgccacccgtgcagatgagaagttggatttgattagcttggatgaatatctgaagaagcttaatatgactatttctcctaatgatcctgaaaaaccggatgatggtggagaagaaggtggaggaaatgaaggtggcggtagcggagaagcaccggatcctgccgcataatgaattggcaattaatgattgatggttagggtgtttatttagtgtttaataaaaaagaaaaatgtctatgaaaaaaacgtggagtattattttgaaaatgattattgctgttgctggtgcaattgccggagtggtcggtgtacaggcagcaaacttgtaattgattatcttataaataggtatatttatgaatgaataacaggcgggaaaaatcccgcctgtttgtgttttagatataattagagaattatacttcctcgcatactctcatttccattcctttatacactactacaatcttatgcaactgtgtggtgccaattgcatttttcactgtatcagtatcagcataacggtttgtctgggcgataccttccaatcgtaattcttccacacgattctctgaatctttgtatttggcatatttcaactcgattatgtagctgtgtttcatgtcgggataaatatccaataatggagataggaagatgtcggcatatccctcttgtgtgtctgcctccgaaatgggacggtagaatcggttttgtgcagtcatggctaatgtgaaaccatgcacgaaaaattctcccttttgtttgtcacgctgggaggcataactcttcaggcaatcggctatataatcaaaatatgctttccatgtacctcgataagcgagtgaactggataattcatttttttcataattactgaagcttaagttggcttcattgtaagtgttcaatagataggtgtaaagctgttcgcggactacctgattaggaatggtgagtttgcactttccttcatgtgtaccattaatagtaagcataccaaaataatagagtaggctgatgaagttgtctggatcaataatactggcggctggaaatcctttcttcacttctccagtgatgtagccttggcttattaaggtttgtatgatggaagcatcgtgggcaaactccttatctttacggatgagcatacgtaatttctcatagtcaatgcggatgttgtcttctaccatgtccttcggtacttcaccgtatcggatgtagtttttgacgaaataaagcaccatgttggaattgtacatagtggtttgaccataacattcttgtgcaaagcagtaattatcataccacggtttcataatttctatcaactcatcgatggtatggttgaaatgccttgtattagaataataagttaacatttcgcgaacttcactttctgtgaatcccatcatttcattgaattctgatgaaagtgagtaattagtgccgatattgaagccgctggtcaagtcatccattgttacgggactgacaccagtgatgaaacaacgtttgatgctggagtcggtaccggattttattttattgaagaaggcacgtaaataaccttctttgtgtgtctcatcggtgtaacggttcatgctgtcgacatcagagagtattgtattggtgaaatggtcatattcatcaatgaagagataaatcttttgatttacacgagcgcattccataaacagatattcgaattggctgactgccccgtctttttcgttcattttttctttgattccttcgggtaaatagtcggcataaacatcgcagaaatagtcaaatacgattttgcaatgttcgtccagacctttgcggtagctgtgtaaatctccactgattcctgagaaatttaattttattactagatagctattacggtctttcgtagggtgctttccgatataaaggtcgccaaataaagcgtcaaacttatctttggtacgtatgtcataataatgttgaagcatattcaaggtcagactttttccgaatcgacgcggacggataaaaaagaagaaacgatccgactgctctatcaaagggatgaaagaggttttatccacgtaataataattgtccaaacggatgtcctcgaagttcatcataccataaggtaacaacttcctgtctgataatacatattccataatttatgccttttatatgaatatactttgaataagtgtagacaaagatacttcctttccgctactttcccaaacaaacgttctttctttttggtttcgtgctatttgttatgagtgccgctccatattttaacaaaatagaaattataatcaaactcgttggctgaatagcggattttatctacctttgtaccttaattaaatgcgtcattttaagcaagaaaaaacatgattcgaaaaataataaaggctctttggatatttctggcagtcattgtgttggctattgttgtcatctttgtctctatctcaaagggttggattggttatatgcctcctgtagaggaacttgaaaatccgagttataaatttgcaacggagattttctctgaagatgaaaaagtgcttggcacgtggtcttacagtaaggaaaatcgggtatatacagcttacaaggatttgtctcccagtattatcaatgctcttattgcgacggaagatgtccgttttgttaaacattctggaattgatgccaaagcattgttccgtgcgtttgtgaaacgtggtttgatgtttcagaaaaatgcaggtggaggtagtactttgtcgcaacagcttgccaaacagttgtttacagaaaatgtggcgagaaacacgcttcaacgtcttttccaaaaaccgattgaatgggtgattgcggtgaagcttgaacgttactacaccaaagaggaaatcttgagtatgtatctcaataagtttgattttctgaataatgcggttggtattaaaactgctgcacatacatacttcgcatgcgaaccgaaagatttgaagatcgaagaggcagctacgttggtagggatgtgcaagaatccttcactttataatccggtccgtttcaacgaacgttcccgtggccgtcgtaatgtagtgcttgagcagatgcgtaaagctggttatatcacagatgcagaatgtgattctttgcaggctcttccgttgaaactaaaatataaccgcgttgaccacaaagagggattggctacttatttccgcgaatatctccgtggtgtgatgacagcaccgaaaccggtaaaaagtgattatcgtggttggcaaatgcagaaattctacgaagattctatcgcgtgggaaactaacccgttgtatggttggtgtgcaaaaaataaaaagaaagacggtacgaattataacatctatacagatggattgaagatttatacgacgatcaattcacgtatgcagcaatatgcagaggatgcagtaaaagagcatttaggtgattatttgcaacctgtgtttttcaaagaaaaagagggaagcaaaaatgctccatacgcaagatcactgccggaaaaacgagtggaggagttgctgacaaaagctatgaagcagacggatcgttatcgtcttatgaaagaggcgggagcttcggaacagcagattcgtaaagcgttcgataccccggaagaaatgactgtcttttcctggaagggagataaagatacaattatgacaccgatggattccatccgttactacaaatctttcctgcgaacaggattcatgtcgatggatccggtaagcgggcatgtgaaggcttatgtaggcggaccgaattatgtatatttccagtatgatatggcaatggtgggacgtcgtcaggtgggatctactatcaaaccgtatttgtatacattagcaatggaaaatggcttttctccttgtgatcagacacgccacgtagagcaaacgttgattgatgagaacggaactccttggacgcctcgtaatgcaaataataaacgttatggggaaatggtgactctgaagtggggattggctaattctgataactggatttctgcttatttgatgggcaaactgaatccgtataatcttgtacgtttgatccatagttttggggttcgtaataaagcaatcgacccggtggtttcgctttgtctgggaccttgtgaaatttctgtgggtgagatggtaagtgcatatacagcttttgccaataaaggaattcgtgtagctccattgtttgttacacgcattgaagatagtgatggtaatgtgctttctacctttgcaccgcaaatggaggaggtgataagtatttcaagtgcatataaaatgctggttatgttgcgcgctgttattaatgaaggaacaggtgggcgtgttcgtcgttatggaattaccgccgatatgggtgggaaaacaggtacgaccaatgataactctgatgcctggtttatgggattcactccttcattggtatccggttgttgggtaggaggtgatgaacgtgacattcactttggtagaatgacttatggtcagggagctgccgctgctttgcctatttgggcattgtatatgaagaaagtgtatgatgacccgactttgggatatgaccagcaggagaaatttaaactccctgaaggatttgatccgtgtgccggttcggaaactccggacggagaggtgatagaagaggggggattggacgatctttttaactaagtctgaaataagtattaacccgtagcgtttggggcactgaactgtaggtgtaatatctctaatatctaatgtttaatacttaaatacttattttttaatgcataggtatattgtttgcatagggagtaattacaacaggaaagagaatttgacttttgccagacaggaactgactgaatcgttctcttctatatgttttgcgcccgaattggaaactgaacctttattttttaagaatccggccttgttttccaaccaagtggttatgttcttttccgataaagatgaagaggtagtgaggaaaatgctgaaagatatagagcaaaggtccggacgtcgtccggaagataaaaaagaggagaaagtttgtctggacattgacatgcttttatatgataacaaaatagtaaaaccggaagattggcaaaggggatatatacaacagtcattatctgccttccattcttcattatttattaagtagatgaaatttcttggaattatacctgcccgctatgcatccactcgttttcctgcaaaaccgttggctatgttgggtggaaaaactgttatacaacgtgtgtatgaacaagtggctggcgttttggatgatgcttatgtagccacggacgatgagcgtattgaagctgctgtcaaggcgttcggaggtaaggttgtgatgacttctgttcatcacaaaagcggtacagatcgctgttatgaagcttgtacaaagattggaggtgactttgatgtcgtggttaatatacaaggagatgaaccttttattcagccttcacaattggatgcggtaaaggcttgtttcgaagatgtaaccacgcagattgccacgctggtgaaaccttttactgcagatgaaccgtttgctgtactggaaaacgtaaattcaccgaaagtggtagtcaataagaactggaacgcgctttattttagccgatccattattccttatcagcgtaatgccgagaaacaggactggctgaagggacatacctactacaagcatatcggactgtatgcctatcgtacagatgtgctgaaggagataaccatgcttccgcagtcttctctggaactggctgaatctttggagcagctccgttggctggagaacggatataagataaaggtaggcattagtgaagtagaaactatcggaatcgataccccgcaagatttggaacgggcagaagagtttttgaagaatagaatctaatcgtatggatcgtaaaatacaacctgaaatacaaaccctgaaaaattttcgtatacttcctcccgtccgaatgacattgccaaatggtattccattgactgttattaatgcgggtgaacaggaagtagtacgcatagatgtgcttttcgctggagcccgttggcagcagtcgcagaaactgcaagccttgtttacaaaccggatgttgcgcgaaggtacgacaaaatatacggctgccaccattgccgagaaactggattactacggttcgtggctcgaactgtccagctcgtcggagtatgcatacatcactgtttattcgttgaataagtatttggcgaaaacattggaggtggtagaatccatgattaaagaaccgcttttcccggagaaagaattgcatactatcctcgataccaatatccaacaatatctggtcaatacttccaaagttgatttcctggcacatcgcagtctgttgaagtcgctttatggcgaacagcatccatgtggtaaaatagtggtggaggaagattatcatgccatcactccggaagtgcttcgtgaattttatgaacggtattaccattcgggcaattgctctatattcttgtccggcaaggtgacggaggatattatcagccgggtgacggatacattcggcacttcttttggtcaacatcaacagccggcatcgaaattaagctttccttttactgccgttcccgaaaagagaatttttatagaacgtgaggatgccatgcagagtgctgtaaagatgggatatacaaccatcactcgtaaccatcctgattatctgaaactccgggtattgatgactttattcggaggctatttcggcagtcgtctgatgtctaatatccgtgaagaaaaggggtatacttatggcatttcagcaggaatcatgttttatccggatagcggattgctggctatctcgacagaaacggataatgaatatgtggaaccgttgatacaggaagtatatcatgaaattgaccgtctgcatcaggaacctgtgtcgatggaagaactgactatcgtacgcaactatatgttgggcgaaatgtgccgtagttatgagtctcctttctcactttcggatgcatggatctttattgctacttccggtctggatgatgactacttttcacgttctctgctggctgtaaacgaggttactcctgcagaaatacaagatttggcacagcgctatttgtgcaaagagacattaaaagaggtcattgcaggtaaaaagttgtcataaattgctttccgaaagtgggctgtttgggatagaaattgtatctttgtccaaattgtaattctaaaatgagtaacgactaaaaccaatgaggaaatatctatatactacacttttattggctctcctcgcacaagagggagtaatggcacaagaaaatgaaggaaaaaaaggcggatttttcggaaaaattaaagatacattctccactgaaataaagattggcaactatacttttaaggatggcagtgtctatacgggagaaatgaaagggcgaaaaccgaacggaaaaggaaaaacggtttttaaaaacggtgatgtctttgaaggtgaatatgtgaaagggaaacgtgaaggatatggaatttatatgttccctgacggagaaaagtacgaaggacagtggttccaggaccagcagcacggaaaaggtatctattattttatgaataacaaccgttacgacggtatgtggtatcaggattatcagcatggtgaaggaactatgtattatcataacggtgatttgtatgtaggtcattgggtgaatgataaacgtgaaggcgaaggtacatatacttgggcaaacggtgccaaatataccggtcactggaaaaatgataagaagaacggtaaaggtaccatgaactgggatgacggctctaaatacgatggagactggaaggatgatgttcgtcacggaaaaggggtctttgaatataccaatggagataaatatgatggtgactgggcggatgatattcaacatggaaaaggtacttattactttcacacgggcgaccgttatgagggctcgtatctcttaggtgagcgaaccggtccaggagtttattaccatgctaacggtgataaatatgtaggtaatttcaagaacggcatgcaagacggaaaaggtacttttacctgggcgaatggtgctgtgtatgaaggaagctggaaaaataataaacgtgatggtaaaggagtttataaatggagcaatggcgatgtttatgacggtgactggaaagataaccgtcccaatggacaaggcactctgaaaactgttgctggtatgcaatataaaggtgggttcgttgatggattggaagagggtcaaggcgtacaaatcgacaaagatggtaatcgcttcgatggctttttcaaacaaggaaagaaggatggcccttttgtcgaaacagataaagatggaaaagtgattaaaaaaggaacctataaattcggaagactccaataaaatgatgaatgatgaatgaaaaattggttgcttactatcaccaattcaaattcttagtatgttgagacaaataagaaagccggctaaacttgaaattagccggctttcttattcttcattcttcatttatcattcttcatttaaatgatatattgtgaactgatagattcgttattcatcactcgtttgattgtttcagcaaacatgtcggcaatgcttaactgtttcactttcgggcacttcttagcataagggatgctgtcagtaaataccatttctgtcagggcagactcttgcacacggaaagaagccggatcagacattacgcaatgactggcgatagcgcgtacagattgggcaccggcttccaacatgatgttggctgctttggtgattgttcctgctgtgtctacgatatcatcaatcaagacaacgtttttaccttccacgtcaccgatgatttgcatagatgctacttcattggctttttcacgtgatttgttgcagagtaccaatggtacgccgaggtatttggaaaaagtgctggcacgttttgaacctcctacgtccggtgtagcaataaccagattttccaattgcaatgactggatgtaagggaggaatacagctgatgcgtacaagtgatctaccgggatattgaagaatccctggatctggtcagcatgcaaatccatcgtaatcagtcggtcgatacctgcaacagacagcagatcagctaccaacttagcgccgatagatacacgaggtttgtcttttctgtcctgacgtgcccatccgaaataggggactacagctacgacgctctttgcagaggcacgtttagcagcatcaatcatcaggagaagttccattaagttgtctgagttagggaaagtggattgaaccaggaatacatgtgcgccacgaattgactcctcgtatgaaaccgcaaattcgccatcggcaaaatgggtaatgttcatatttcccagaggacaatccaggctcgcgcagattttttctgcaagatatctcgagttcgttcccgagaataccataaagggtgctttttcgctcattttgtaatagatgttacctatttgttaatttgcctgcaaaggtaggaatttctcttattatttagaaggacttattgtataaaaaatatttttctctccaacttatcggaaatatttgtagatttgctttctgaaaacagttaatagtcaaaaatgagttcacgctttcctttatatataataggtatagtgttgtttgcctctttcttttcgtgcactgatatggtgccgaccaaagaggtgcgtctgattgattcattaaacgggaaagcgtatgcttatcgttatcgtagcctggattcttcttataagtatgccaatgaagcctatcgacaggtaaatttttataagtcggggaaagcggaggcatccaataatctcggattctgtgcttttatggcgatggattttgaccgggcggaagcgttacataaggaagtatataaactgactaaaaatgagcttgaactgttgattgctgatatcggactgatgaagatttgtcagcggacagctatgaacaaagaattttatgattatcgtaacagtgcgctccggcgtatgaaacgtattcgggaagagagtgatttgtttgctgaccgccacgaggcacttcgactggattatgctttcaccgaatttttcattgtttcttctatttattactattatcttcagcaaaggcaggaagccatcgcatctctcaatcagatcccggaagatgaagtattggcagatacgaatcagttgctttattatcattatatcaaaggatcggcttcattggtggaagccaccaagccggaggataggaaaatgcgtgagttcgaccaactatatataacctggaggactgcggttcagactaatcatccttatttcgaaggaaatggtctgcaagggctggctaatctgatggtttcttccaacaacttcgaactctttcgaacaaggaggggatacgcgctggatcagtttggttttcctgtagattcgcttttgcctttgcgaatggcacagcttgcgcttgaaaaattccgggagtataatgatttgtatcagattgctggtgcgtatgtgtctatcggtaagtatatgaatgagcacggacgttattcggaagcattggatacgcttacaaaagcgttagattgtgtgaaccaacaccatatgctttattatcatcatgcagtggatacgttggacaagctgcgtatttatgcggaaggagatacgacatatactggagtaccgtggattatggaggaagacgtaaggacggtgcccgaatggatttcgaggattcgggaacaattgagtgtatcgtatgccgggcttggaatgaagtatgcttctgattacaaccggaacatatatctggatattctgaattatactcgtcaggataaagagttggagagtcgttatctttcgttggaatccgattcacgacaaatgacacttgtactttctttggttattgccggacttgtactggtggttattctttggtggttcttcaataagcgatctaaaataaggaatcaagtagatgtggaacgtctgcaacggatactggctctttgccgggacatcacttcttctataccaatgaatgttccgttaattcaacaaggcatcgaccaactgttcggaaaagggcgtcttcaactggaaattccggaggaaggaaaagcggcactggttcctttgcatcggttgaaccgtgatgaaaaagcgttggtgcacgtgcttgaaccgtatatcgtttgggctgcggacaatgagcagatggtagaagcgttgagtgacgagcggatgcaattggaaaagcaacgatatgtttacgaacaacatatcgcgggaaataaacgccagaatttgattaagaaggcttgtctggccattgtgaatggaattaatccttatattgaccgtatcttgaatgaagtgcataagttgacggaacgaggatatatcgatcatgaaaagataaagaaagagaagtatcaatacattgacgagctggtaactacgattaatgaatacaatgatattttggctctttggattaagatgaagcaggggacgcttagtctgaatattgaaacgttcgatctcaatgaactctttgaactgttaggcaaagggagacgtgcttttgaaatgaaaaatcagaagttggaaatagaaccgactacggttatggtgaaggctgaccgggcattgactttgtttatgattaacacgctggcggaaaacgcccgaaaatatactccggaaggaggaacaatcaaagtgtatgcccgtactacagatgcgtatgtcgagatttccgtagaagacaacggaagggggatttccgaagaagatgtggctcgtattatcggtgagaaagtatatgactctcgtgtcatcggaatgaagaatgtagctgatccggaggttctgaaggagaataagggcagtggtttcggactgatgaattgtaagggaatcattgagaaatataagaaaacgaatgaattgttccggggatgtgtctttgatgtagagagtgaattggggaaagggagtcgtttctatttccgtttgccttcgggagtgcgcaaaacgatgggagtcttgttactttgcctgttgcttccgtttggggtgagttcttgtctgcatgatccgattcctcccatgttgcaggagggcgattcgatagtggtggttacggattctgcctatgaggatttactggatgcagcgtcggattatgcgaatgtcgcctattttgctaatgtggatgaagattatgaatttgctttgcaatatatagattctgctatactcttgttgaacgagcattatgagaaatatgcgcgtccggatcgtccgcatcggtatatgaagctggtgggtgaaggaacgcctgccgaaatcagttggtggaacgaattgtttgattcggattatcatgtgattctggatatcagaaatgaggcggcagttgcttttttggctttgaaacagttggatgcatacagttataataattcggcatttacggatttgtataagttgcaaggagaagatcagactcttgaagcatattgccgacagttggaacggtcgaatacgaataagacagtaggaattattttatgttttgttctactgattgtttctttggtcggatactatttcctgtatatgagaaaacgtttgcagaatcgtttgaatctcgaacaggtacttgagattaatcaaaaggtatttgcggcatctttggtcagaccgcaggaacaagaaaatgcagaggcactccaacgagaggaaagtacacttaaagaaatcccgcaacgtattgtggatgaagcattcggtccggtgaatgaactactgacaattgaccggatgggaattgccgtttataacgaaacgacacatcggctggaatacgcttctcgtcccgggcaggaaatgccggagatggtagaacagtgttttagttccggagaatatctttctgaacagcatcttcaggcaattccgctgatggtggaagcaggaggtgaacatcaatgtgtcggtgtgctttatctggaacgcagggagggaacggagcaggaaacggaccggctgctttttgaactggtagcgcgctatgtggctattgtcgtatttaatgcagtggtgaaactggctactaaataccgggatattgaatcggcgcatgaagaaacacgcagagcttcttgggaagacagtatgttgcatgtacagaatatggtacttgacaactgcttgtcgacgattaaacatgagacgatctattatccgaataaaatcaaacagattgtaggacggttgaatacgcagaagctttcggaaacggaggagcgtgaagcggtggagactatgacggaattgattgaatattataagggaatctttacgattttgagctcgtgtgcttcccgtcaattggaggaagtcactttccggcgtactgtgattccggtgcaggaacttttggacgctgccggaaaatacttcaagaaatcaatgaagaaccgttcggagaggatagaactggagatagaaccaatggaagcgaaagtgataggagacgtgaaccagttgcgttttctattggaaaatttgattgatgaagcattgactgtgcgtgaagatggattgatacgtctgcaagcacgtcaggataatgaatatattcgttttctctttacggatacgagacgtgaaaagagtgtggaagaattgaaccaattattttatccgaatctggcacgtatgacttccggtgagaaaggggagttgagaggaacggaatatctgatatgcaagcagattatccgcgaccatgacgaatttgcgggacgcagagggtgtcgtatcaatgctgagccggctgaaggcggaggatttacggtttatttcaccattccgcgccgataaaaggagaacacataaaagttattagataagaaacatggaagaacagaagtttaaagttattatcgtagaggatgtaaaactggagttgaaagggacagaagaaatattccgtcatgaaataccgaatgcggaagtgatcggtacggcaatgacggaaagtgagttctggccgttgatggaggcgcaactccccgatttggtattgttggacttaggactgggaggttctacgaccattggtgttgacatttgccggaatatattcaaacgctacaaaggagtccgggtactgatcttcacaggtgagattctgaatgaaaagttgtgggtggatgtattgaatgccggtgccgacggaattatcctcaaaacgggagaactactgacgaaaacagatgtgcaggctgtgatggacggaaagaagctggtattcaactatccgattttggaaaagattgtagatcgtttcaagaaatcggtagccaacgatgccaagcgtcaggaagcagtcatcagttatgacattgatgaatacgacgaacgttttctccgccatttggcattaggatatacgaaggagatgattgccaatctgaaagggatgcctttcggcgtaaaatcattggagaaacgacagaatgatcttatcggacgccttttcccgaatggagaacgggtgggagtgaatgctacccgattggcagtacgtgcactggaattgcgtattatcgatttggataatctggagcctgacgaagaataagtaatggcaagtaatacctctggaaagtaatgaagaataaatggcgtatgccccatcccgctacgatgttccttctgctgactatggcagtggtctttctttcatggatatgtgatatctatgggttgaaagtgacattgcctcagacaggtgaggacatccgtgtacaaagcctgttgagcccggaagggatccgttggtggttgcggaacgctattaagaatttcacgggctttgctcctttgggcatggtgattatcgctatgttcggactgggagtagcacaacattccggttttattgatgcgtgcatccgcatgggagtagggaaccggcaggaaaagaggaaaatcatcttgtgggtgattgtgctcggtttgttgtcgaatgccattggggatggtggatatattattttattgcctattgccgctatgctgttccagtgggtgggacttcacccgattgcagggattgttacagcttatgtctctgttgcgtgcgggtatagtgccaatattgtattgagtacgatggatccgttattggcgcataccacccaagaggcggcactggcgcaaacgggttatcaggggaacacggaacctctttgtaactacttctttatgagtgcttcaacggtagtcattacggctattgtgtattggattactcaaaaatggcttcttcccacattaggaaagtatgaaggcagtgtgaaagtggtggcttatcatcctctctctcgcaaagagcggcgtgctattatgatttccattgttgtagcagctgtttatgtcgctcttatcttgtggcttactttttcttcttatggaattttgcgaggggtgaacggaggtttgatgcattcgccttttattgccggtattttatttctgctttctttgggagcaggtattacggggatggcttatggattcagttccggacggtatcgcactgacaatgatgtgattgaaggacttacgcagccaatgaaacttcttggagtgtatttcgttatcgctttctttgctgcacagatgtttgcctgttttgaatattcccatctggataaatgtttagccatcatgggagctgatttgctctcttcgtttgagccggctcctttgtctgctctcatcctgtttattctatttacggcattgataaacctgattatggtatctgctacctccaaatgggcttttatgtcttttatctttattccgatgtttgcacagatgggaattgctccggatgtagcacaatgtgctttccgtatcggagatagttcgacgaatgccattactcctttcttattttatatgcctttggtgctgacttatatgcggcagtatgataaacagattacgtatggctcattgcttaaatatacctggagatattcattaggtatcctggttgcctggacattgatgtttattgtctggtatttgttgaaaataccgatgggattgtagccggtacgtgaaaaaatatcaagtaggcaacatgtggacgattctattaaatgaaaaaatcgcaaacgctattttaatagctgtttgcgatttctctaagtgattcaagtaacgttctttaatcgcctgattattaattgtttgtataaacgtatggcctacaatatgcctacatttcttatctattacaggttatttcttacttaataagacttgtattagacgttccttctcctcaattatcctttctaaatcagctatttttgcatctttatcaagttcatttgattttattccagttatgggaatatcatcaaagaatacacctacaggaacctctaaaacctttgctattgcctcaatggtttttgtgttcgttgatccatttctaacaatagcctgtatgctactatcttcttttcctatacgtgaagcaagttctcgtatagtgattttctttaattcacataactctcttattaacaaaaaattagc

SEQ ID NO: 8185 - DNA, 5389 bp, Unknown
  gut microbiota DNA sequence
tatgaacgaattaacgggagcggactttaaatccgcaactgaaatgactgatgacaacaagaagttgtttatcgaaacatacggctgccagatgaatgtggccgacagtgaggtgattgcatcggtgatgcaaatggcgggttattccgtagctgaaacgctggaagaggctgacgctgtgtttatgaacacttgctccatccgcgacaatgcggagcagaagatcctgaaccgcctggagtttttccactcgctgaagaaaaagaaaaagcgcctgattgtgggtgtactgggttgtatggccgaacgggtaaaggatgatctgataacgaatcatcatgtcgacctggtagtcggtccggatgcttacctgacgttgcccgatttgattgctgccgtagagactggcgagaaagcaatcaatgtggagctttctactaccgaaacttatcgggatgtgattccgtcgcgtatctgtggcaatcatatttccggctttgtgtccatcatgcgtggttgtaacaatttctgcacttattgcatcgttccctatactcgcggacgtgagcgtagccgtgacgtggaaagcatcctcaatgaagtggcagacttggtggcaaaaggttataaagaagtcaccctgttggggcaaaatgtcaactcataccgttttgagagaccgacaggagaagtggttaccttcccgatgttgctccgaacagtggccgaagccgctccgggggtacgtattcgtttcacgacttcccatccgaaggatatgagtgacgaaacgttggaggtgattgcacaagtgccgaatgtatgtaaacatattcatctgcctgtgcagagcggtagttcccgcatcctgaaactgatgaatcgtaagtatacccgtgaatggtatctggaccgggtagcagctatcaaacgcatcatccccgattgcggactgactaccgatattttctccggttttcattctgaaacggaagaagatcatgccatgtcgctttcgctgatggaagcgtgtgggtacgatgctgctttcatgtttaaatattccgagcgtccgggaacgtatgcttccaaacatcttgaagataatgtgcccgaagaggtgaaagtccgccgcttgaatgagattatcgctttacagaaccgtctgtctgccgaatccaaccagcgttgcatcggaaagacgtatgaagtgcttgtggaaggtgtttccaagcgttcgcgcgatcaactgttcggccgtacggaacaaaaccgtgtagtggtgttcgacagaggtacgcatcgtgtcggtgatttcgtcaatgtgcgtatcacggaggctagttcggctacgctgaaaggggaagaaatctgatttcaccacagaggacgcagaggacacagaggtcttattctcatagtcgtggctgtcttgtagttgtgactgcctgtacggtatgtggtaactgcgcttatacaacacatcctgtggaggctttgaggattaatataaaaaatcagtgttcctctgtgtcctctgcgtcctcggtggtgaaacttacatcatcatgtgtctcctgatggagaacttcacaatcgccattgcgttgatggacgcgaatggaatatccatcggttcgtggtgtgtgttgtaacttaccagtttgagatgaccttctttctccgaacggtttacgtattttactgccagatactcgtctccgtcaatcataaacgacaccaggtatatttccccgtaaatgacattatcgaaactgctgatttccttatatccgataatgtctcccgatttcaatatagggtacatgctgtctccgttgacgtagaccgccccgtcgcagacggatatattgggaatcaatatcttccccagtgcatactgctttttattggtgaacaatgttttcaggttcgcagctgccgtaatgtcgtataatgtcacgctacggtcgtctattggttcgggtgttttcggattgtgtataatctcgacttctccctgcaccagttcgctttcgcaatgtctcggctgatgtttcggatttccttttcccaataatagccagttgtagtctaccttgtcccctaatttgtcgagcaacaagcggaaatcgatgctgtttcgtgccccccaattggtgactgtggctctcgaaactcccagatattcagctagttcgctgtctctttttaggtttaacgcctgtttggcacgcttgatgatacctaatacatccaaatttgtatccattctgttttttatttaaaagactaatcccggatttataaatggcagctataaaatggctgactaaaaaaatgtgtttactatatgtttataatcaatgacttgtaagattgttaatattaaaaatgaaaataagtgttttatttatgaaaaaatattctatctttgtcccattgattaatagaaaacgtttcaaaaatataaattaaaaacggatatgccatgcaaaacttcaagaaaaacaccgaaaccttgaaaatttctcatccgccacctgcggaaagcttgctgatacctgttaacagctatttcctcaaatgttaatagctatttctctaaccattaatacctgaaatgccagatgttaatacttggcaataggataacaaaaggataacatattgtatacgaatacttcgtatttggatgattacagacctgactgataaaaactagcatttataatttataattggataacaaaatgaaaagctcaaaagtacaaacactgtgcgtttgcggatgttgcaaacgctctcttccggcaagtgccttttatatcaataagaaaaccggtcttcccggcaactactgtaaggaatgtcgtaaaactgtcagccggaaccaccggaagaacgagaaacgctccctggcatgcgacagggaaagcagttatccggtaattacctctacggaagatcccacgttgcggcgggaacttattctgcatgcccttgaaaccgtagctgccagcattgaacggaaaaggcggaaagtccgtgaatcggaatttgaatacgaatcaggttctgaatctcaatccggatcagtctttgaattggaattagaatcaaaatcaggatcaaaattagaattggcggactgatttataaaaacaatttatatcatgggacgaataaaacaagggcttgactatttccctttgaataccgattttatgcacgaccgtgtcgtacgccgtgtgatgaagcgtgaaggcgattccgccttcacgatcctgctctataccctgtcttatctatattcgggcgagggttattatattcatgtcgacgatgacttctatgacgaactctccgaccagctcttcagcacggacaacgatagtgttcgccgggtgcttcgtctgtttgtggagtacggtttcttcgattcctctctctacgaacgttacggcatcctgacttccgccgacattcagcggcagttcctttttatcactaaacgccgcagccgccgtcatatttctccggactactgtctgctgccggatgaggaaaccgtacactccacccttccagatgctgttgcagaaaccccggatattgtaacgcaaaccctcgatactgtaacagaatccccggatactgcaacaaaaagcaccttcataaaaagaaaagaaaaagaaaggaaagaaaacatcctccctaaccctcctttgcccaaaggaggggatgagggagaagaaggaggagatttttctaacagaaaaccggcgaagaagaaacatgaactgacacagtcggatattgaccggatgcaagctcctgctgacggacacccgcgcaacctttccggactattggataaccttcgcctttatcatattcctccctctgaacagtatgcaatcgtactgaaaagtaattacggagaaatcggtggtaaggtttggaagggtttcggtgtcattcgggcaagtgccggaaagatcaaactgcccggtcattatttgttgagtgtcctgaataactgaattaataagggttatgatgctgctgcgttgtgtaatatgttgtaaattagtgatataacaacaacttcttatattaacgaatttattaacgcacacttttaaaatctcttgcacagacagaaataaggtcttatatttgcattgtcgataagcttaaagacacagacaaactagaattattaacgactaaaaactattacaattatgccagtattgtacaaacccttccagtcaactctggaagacaaaaaaagcggtaaaaaactcttctacccccgagttgtacgttcgggaaacgtagattccgcacaactttcgaaagagatagcagcctactcttccctctctccgggtgacgtaaaaaacacactcgacaacctggtgacggtgatgggtcaacacttgcaatcttcggaaagcgtaagcgtggacggtcttggtaccttccgtatggtgatggtggctcgtggcaaaggtgtggaaacctctgacgaagtgtcggctgcacaggctacgcttaccgtccgtttccaaccggcgactaccaggaaccttgaccgcactaccgctacccgttcgatggtgaccggtgcgaagtgtgcccgttatgataaacttgtttccgatgcgggtagtgcggaaggcggcaactccggtggaagcgacaagcccggtggaggcggtaatgaaggaggcggagaagcgcccgatccggctgcataaatggcgtcacagcagtgaagagtacacaaaatgtaaacgacaaacgtcgtaggcttaactaaacatttggcttttaactaaactagaaatcatccactaacatgaggattatcaacttgattgtggtgcattgcagcgctacgagggaggattgtatactttctccggaagatttggaccggttgcaccggcgtcgcggatttaacggaacaggctatcactactacatccgcaaggatggaacagtgcaccttacccggcccgtggaacgcatcggagcacacgccaaaggtttcaacgctcactcgataggtatctgctatgaaggtggtctggactgccggggacgcccggcagatacccggaccccggcacagcgggctacgctccggcaactcgtcgggcaactacaggagaaattttccggctgccgggtctgcggacaccgggatctttcgccggacttgaacggaaacggtgagatagaaccggaagagtggattaaacagtgcccgtgcttcgatgtggcaaaggaattcaaggagttcggagcatttgccgatagaactgatgagactggaagtacggagaaacacagagtaacacaacacattaaagaa

SEQ ID NO: 8186 - DNA, 7688 bp, Unknown
  gut microbiota DNA sequence
taatcccccaagaattacaactgagcctaaacttctcaccatcaagaggtcacataataggtcactggaagttttaaaaaaacagttcctcggtggcaaattcggtgacacgaatgcacgttgatagtccgaaaaacgctaatcttatgaaaagccgtgaagttgattgataaagaataaatccttaaactggctgtcgtcttgtttagtagaaaagaaaaacaggttttatagctcaagtgagtataaaacctgtttttaatttttctaaatcgggcagaactcttattcttctgcttttattgattcatcgattactttgatcttttgtaataccagttccaagtctgctttcaacttatctaccttgcggttcaattcagtcagcaggctactgcctttcttagaagtagaagtcaggaagcccagattgttctcataagtctgaagctcattcttcatattctcataagtgcgtaccagcttttcacgttctctgtacagagattgagtaccgcttccctggatattgctgatattcgaacggaagttacttaacttcttgttggaagcattgatgttaaagcggtcgaatagctgatcgatgattccgtgatactgcttgtataacttatctttttctttgaacggtacatgaccgatagagttccactctttcattaaatcccgaaccaaggtacttgcttcttcggtatccatgctttcatcaatagcggataacttctcgatcaacgctttcttcttttccatattctctgtttctacagaacgttgtgaagaagtagctttgttcttttgttcgaagaagtagtcgcaagctgtgataaaccgtttccagattgcatccgagtgttttttggcaaccggtccgatggtcttccattctttttgaagtttggtcagtgcatcggcagttactttccagtctgtactatctttcaaggcttccgctttttcgcagagcgctttcttcttttccagattctcgttcattccttctttcaggctcttgaagaattctcctttcttcttgaagaaatcatcgcaggcatggcggaaacgctcgaagatcttcacattcatcttctggggcgcaaaaccgatagttttccatttgttttgcaaggcaatcacttcctgggtcttgttttcccaggcagagaatgttttcagttcatcatactcaatcgcttcaacgatttcgcagatgacggttttttgatccaaattatgctgttcggcttctttcaacgattcgaagtgctgctgatggcggcggttgacagcggtagaagctgctttaaaccggttccagatttcatcacgcagttctttggctaccggacctgtatcgcggaattcctgatgcaacttctgaagttggtggaaagcggaaacaacatcttcctcgtcagctaacttttcggcagcttcgcagagatgcgttttaatttccagattctttttgaagtcatattcgcggaattcattgttcagtttcaataaatcgtagaacttctctacatataattgatagtttttccaaagttcattcactttaccttgcggcaccagtttcgtatcattccattgctgttgcagcttcttgaactctgtataagatttgttggcgtcatctccggattccaccaattctttcagttcttcaataatggaaagtttcacttgcaggttttcttccttttggcgttccagctcggcaacctgtttactgcgtttttccttgataacccccatcagacgtttgaattcttcttccgtcgggtcctcttcggcaacaaaatcttcaatgtttccaccgttgtctgtaaactgtaccttagcagcttccaactcggcattatgtaacttgtagaatgattgtttcagattgtcaatatcctgcttgttcgcattttcagcatcttgcgcaagctcttttagctggtttagtacatcttccttagtggcaggtttaggagctgcttcaggttgaacttcggcagtaacatcttcagccggagtctctgtaatagcttcagaaacctcgactgttttcttttcttcttctaattccccttggttcaagggttgattagtgtcatgagcgtccatcattgtatattagttttgggtcacaaattaatgaaataaaacgattacttcatactattttgcttatttttttttgtttatcgtgtttttatgacaataaaacggttattcccatgtacaacatcattccgatgatgtcatttgtaatggctataaacggacctgttgcaatggctggatcgattttgaacttctccagcgtcatcggtaccagtgtcccgaaaatagaagcgaacattaccacggcaaacaggctgatggatactgaataggtgaccgtagccgttgcgccgaacctgataaagttgtaggtgtatactaataaggagataatagtggcattaattaaagctactaccgattccttggttatctgcttgaaggtatttttagcgtccagcgagctgtttgccaaaccctgtacgatgattgccgaagattgtgttccgacatttcctcctgtaccaccgattagcgggatgtacagtgccatttcgggatgggcagcaaaggtggagtcgaaattacccaatatcatagagttgccgattccgccgatcataccgattaataaccaggggaggcgggcagtggtctgtctcaatacattatcgtccgtttctacgtcctgcgaaagaccggatgccaactggtagtcacgttccgactgctcacggacttcatccatgacgtcgtcgacggtgatttgtcccacaagccgaccgatactgtcgacaacggggatagccaccaagtcgtacttctcaatcgcctgtactacctcgtcaatgggagtatctacgtgtaccgaaatcggatctttctgcatcacgtgtttcactttggatacagaaggggaagtaatcatctttttgagcgggaagatacctcgcagacgttcgtcatcgtcgatgacatatacataatagatttcgtccagctcttccgcctgttgccgcatctctttcagacattcgggcatactccagttttcgttgacgagtaccatttccgtacccatcaaaccaccggcggtattttcgtcgtatttcaacaagtcgacgatgtctcctgcctgttcgatgtcttcgatgtgcgaaagaacctcttcctgcttgtcttcatcgagttcacgcatcaggtctacggcatcatccgtgtccatgtagtcaacgaagcgtttggcgattgtctccgaaggaagcatttcgagcagctctttacgagcatcttcgtccatttcgacaagcacgtcggcagcaatttcgttatcgagcaggcgatagacgaacttagcctcttccgcattcaggtcattgcacaattcggcgatgtcggccggatggaggtcgatgagaagaccttttaccttgtcggcgtctttttgctcaataaggtgtttaacgttgtcaatgtattcctcgttcatcgttgtcaattacaaattacgaattacaaaatccagttctctgctcactgttgcccgccaattattgggcgttgccggctgtctttagtgcttcttccactttattggtcagatcgataaattcggctaccgatagttgttccgggcgtttattaaataagatgtcctccgtgagcggacaatctttgcctaaaataggtttgatggagttgcgcaatgttttccgtcgctggttgaaggtcgttttcactacttgcttgaacagtttttcgtcgcatcccaactctttagtctcgttgcgtgtcatacggataacagcgcttttcactttgggaggcggattgaacacgtgttcgctgacagtgaacaaatattccactttataccatgcctgtatcaatacgctaaggataccgtatgtcttgctgcccggtccggctgcaatacgttcggctacctctttttgaatcattcccgtgcaacaagggacgatatctttgttgtccagcatcttgaaaaagatttggctggaaatattataggggtaattaccagtcagtacgaaaggcttcccgtcgaacaaccggtgaagattcattttcaagaagtcatcctcaatgatgtggtcttccagtgacggataggcttcgcgaagataagcaaccgactcatagtcaacttctacgacctttaccaatcggtctttctttactagaaactgggtcaatactcccatacccggccccacctctaaaataggcagttcggggaaggtatcgactgtatcggcaatatcttgcgcaactttcagatctttcagaaagtgttgtccgagaaactttttaggctttactaatttcatttaccaactaaataattacttttgcagctgacaaaggtaattcttttaaatgaagaacgtaccactatttattaaaaaataaatgatgtgtcagcgaagctaatgaagaattaaggatgaagaaactattaaaaaagacgctgaaactgatgttaccggttgttttaggcggctttatcttattctgggtatatcgcgactttgattttacaaaagcgggcgatgtgttgttacacggtacaaattggtggtggatgctcttctcgttattgttcggagtgtttgcacaagtctttcgtggttggcggtggagacaaacattggaaccgttggacgctttcccgaaaaagagcgattgcgtgaatgctatcttcatttcatacgctgccagtctggtggttccccggatcggggaggtgagccgttgcggagtgttggcgaaatatgataatgtctcgtttgccaagtcgttgggaacagtcgttacggagcggttggtcgatacgttgactattctcctcatcacaggcatcactgtattgctccaattaccgatattcgtcactttccttcagcagaccggaacgaaaatcccttcattagtccacttgttgacttcagtgtggttttatatcattctgttttgttttattggtgtggtgatacttctttattatttaagaaaaacgttgttcttctatgaacgggtgaaaggatttgtattgaatatatgggaaggaattatgtctttaaaaggcgtgcgcaacattcccctctttattttttatacactggctatttgggcttgttactttctccatttctattttacattctattgctttgcctttacggcacatttgggtatccttgcggcattggtcatgtttgttggcggcacgtttgccgtaattgtgcctacccctaacggagcgggaccctggcattttgccatcatttctatgatgatgctttatggagtaaacgtgacggatgccggaatatttgccctgattgtacacggtattcaaacctttttggttgttttattgggtgtgtacggcttggctgctctgccgttcaccaatagacatcgggcgtaaatttttagctaaaagtgtatattcttacatgtttttgccaacctcctttgtcatctgaaaacttttccataacttggcactgtttaattatcagatttaaaatagttttaaaatatttattatgagtaccattctttctttagctccacagaacgtgtggaagcatttttattcgttgacacagattccccgtccgtcaggacacatggaaaagattacagcatttcttttaggtttcggaaaagagctggggctggagtcttttgtagacgaagcaggtaatgtgattatccgtaaacccgccactccgggtatggaaaaccggaaaggtgtgattcttcaggcgcacatggatatggttccgcagaagaacaacgatactgtacacgattttgaaaaagatccgattgaaacttatatagacggtgactgggtaaaagcaaaaggcactactctgggcgcagacaacggactgggtgtagctgctattatggccgtgttggaagcaaaagacctgaaacacggtcctttggaagctcttatcacgaaagacgaagaaaccggcatgtacggtgcattcggcttgaagccgggtacactgaacggagagattcttttgaatctggactcggaagatgaaggcgaattgtatattggttgtgccggaggtatggatgtaactgcaactttggaatataaagaagtagctcccgaagcaggagatattgcagtgaaagttacattgaaaggattacgtggcggacattcgggattggaaatcaatgaaggacgtgccaatgctaataagttgctggttcgtttcgttcgtgaagcggttgccagctatgaagcccgtttggctagctgggaaggtggtaatatgcgtaatgctatcccacgtgaagcacatgcggttattaccattccggctgaaaatgaagaagaactattgggcttggtgaaatactgtgaagacctgttcaatgaagaatattcggcaattgaaacaccgatcagctttacggctgaacgtgtggaagttcctgcgggtcaagtgcctgaagagattcaggacaatctgattgatgcaatctttgcttgtcagaacggtgtgacccgtatgattcctactgttccggatacggtagagacttcttccaatcttgctattattacgattggtggaggaaaagcagccattaagattctggctcgcagctcgagtgatagcatgaaggaatatctgactaccagcttggaatcttgtttctctatggcaggtatgaaggtggaaatgactggtggatattccggttggcagcctgatgttaattctccgattttgcatgcgatgaaagcctcttataagcagcaatttggggtagaacctgcagtgaaagtaatccacgcaggcttggaatgtggtattatcggtgctattattccgggattggatatgatttcttttggcccgactttgcgttcaccgcactcaccggacgaaagagcattgattcctactgtacggaagttctacgacttcctggtggctactttagaacaaactccactgaaataagcgtattctttattatgtaaatattctcctattatataataggtatttatagcgaaggcacggatgaaatctcatccgtgcctttttgtcatattaatttcaggctatattacaattttatttcataacaaataaattaattgatgcaaatcaagaaatatgctataaaacatgaatttctctcttttttagatcaatgtataaacaaaggccgtatttttgtgttataaaacatgtaattaagaggataacaaaatgaaaagtttaaaaagattgtttagaaagatcggcgaagccgatgtacatgtttggggatattcaacaattaatgctaaaccaaacaagtaagttttattttttagttttcaggaattagtaatttaaagttttaaagattatggcaaagaaaatgagttctttagttagaaaaatccttagtgaagtaggtcgtaatgaaatgctttcatgggggtacagaattgagaaatgagaaagagtacattaactaggtttagagtggggatacgttattaaagacgatatccccactttttttatataaaagagatatagggtgag

SEQ ID NO: 8187 - DNA, 16657 bp, Unknown
  gut microbiota DNA sequence
atttatattagagacttcttgtcttctgttttgttacattccattactcgtgtcatttaatcaaagaacaactgttttttcttttataaataagtatgatgaaaataccgaatatacgtttactcaaccaacagttattaagtcctcttttctttcaacccaaggaacttgtgtcctggatgggagctatgcaggcacagaattattccatggtgaaatgggcagtaggaatgcgtttgaagtcagcaacgattcaaactgtggaaaaagcgctccgtgatggtgaaatcctgcggactcatgtaatgcgtccgacatggcatctcgtagcagcagaagatatccggtggatgttgaaactttccgccgggcgtattatatctgctaatgagtcttatgcgaaggggcatgacttggaaatttctgaagagctctatacgaaaagtcataatttgttggagaaaattctttgtgggaagaaaagcctgacgaggcaggagattgccgagcattttaaccgttcggggattgtagcggataatcatcgtatgacccgctttatggctcgtgcggagcaggtggggattgtatgtagtggggaagataaaggaagtaaatgtacgtatgcgcttttggaagagcgtgttccgccgatgccggaattgaccaaagatgaatctttggctcgtttggctagaagctattttcgtagtcatgctcctgctgttttgcaagattttgtctggtggtcggggctgcctattacagatgcacgtcaagctatttatttgattgattcggaattaacggcagaagaatggaatggacagacatggtatattcatgaagattgccggactcgtggaaaagttaccggcagtttgcatcttcttccttcttatgatgaatatttgcttggttataaagaccggacagacgttttgcctaaagagtattactcgaaagcatttaccaataatggtctgttttatccgattgttcttcatgaaggacaagtgataggaaactgggataagtctgttaaaaagagaggctcattgatagaacattcatggttccggttggatgattgtgttgatgaaggtgcgttggatcgtgagaaagataagtatatacggttttggcgataatatatgaaaaaacgtatattttatcgttgtataattccatatatgcaggatatatttaggcatgagttgaaaatgagaaggatttgctgttttcgaatttagaaaagaaataaatcgattgtgttttggaataatttgttttagtctgtgtcttttatagaatagatgtatagaacttgcctttattttgtctcaaattgatatgtggagtgttggctgtttcaggtgtaggttagctctgggatagcacttaaaataaagttttatatgctccttttaaaggaataaagtgtttctcaccgatcaataagtcgttcctttaaaaggaactggttattccttttaaagaaacgattgtcaataagtttatttatagtgtatcttttgactgtttttgaataaaaaactcctctgaaactgtatattcttgcattattttatacaacagaactgctggaagaggaaacctatgaatgcaatttatactcatcatcttaaaaatagaacatttaaagtaagatatactaccgcatttatattataatagagctttctctctatttaaataaatagcatcaggactgatttttatttgtccatttgcctttttgcccactccagtcttctttgatcggctaatggagtcactttaaactcttcgaatgtagcagtgaaccctttcccgtccggacaagctcccattaatcctaccatgacaggacaattatcttgcaaccaacacgtgcgcatcataatatattctttatcatcacgtgagaaaaatatttctactgcatccaggcgacggactgcttttatccatatagagcggggagcatccggcaattgtactacactccagtcactagtccgatgcgtaactacggcacttacattctgtttgccatcaacgtattccacacctgcttttatccagttttcatggtcgatgcgcagcattaatcccatttggtcaaaggtggtgacatagttgccggttatctttactttggcttcaaattctccaccataagttgcataatagaaaggtccgtcgtccactgtgaacccataatgagaaatcctccaaaagtctgtttttgcaggaacatccatcactaaggttttgccatcttttatttcccattgttgaggctcattcagccagttcattttattcaaactttgtgccatagaagaagttgttactgccataaaggctattgacatcattttgatttttaaatgtttcatgatcatttcttatttgattatctttatctttgtggtgcaaagataggtcatacctccgtgtgcaacaatactgaataataaccattttataagatggacgtattacaaaaggaaatagatgaagtttatgcgacacaactgatagccgatgaaatattggacaatggagttgtagagcaacatcaacgctttattcattcattgacggagattaatggtggatgtgctgttatttcagatctttcgaataggaaaagttacattgccgttcatccttgggcgcattttctaggcttaactcccgaagaagctgctttgagtgtgattgattctatggatgaagattgtatttatcggcgtattcatcctgaagacttggtagaaaagcggttattggagtatcagttttttcagaagaccttttcgatgtcttccgaagaacggttgaagtaccggggaagatgcagaatacgtatgatgaatgagaaaggagtctatcagtatattgataatttagtgcagattatggaaaatactccttccggaagtgtatggttgattttttgtctttataccttgtctgcagatcaacgaacggagcaggggatatgtcccactattacccatatggaacgtggagaggtcgaaacgctctttctttcggaagaacatcgcaatatcctatccgaacgcgaaaaggaaatacttcgctgtatacgtaaaggactatctagtaaagaaatagcagctgccctttatattagtgtgaatacagtcaatcgacaccgccagaatattttggagaaactctctgtcggtaattcgatagaagcgtgtcgggctgctgaattgatgaaactgttggatttgtaatccaataagatggcattgtttactgatttctttcttcagatttgaagcttatctgaagaaagaatagaacttatttaaaacaaaagcagcaactcatcaaatcttttcacctgtttcagatggtcatgtgtgaatgtgtctactacttcatgtttccacatcacttcaaaaggaatatgtatgccatatcctcccagcgatagaacaggttgaatgtccgatttcagagaattgccaatcatgacaaattcagaaggagcaatctgtaagatattcaacattcgttgatattctttctctgttttatcggacatcacttcaatgtgatcgaaataagaggctaatccggaacgtcccagcttattttcctgatcgagtaaatctcctttagtggcaactactaatttgtattttcctttctctttcaatactttaagtgtttcttttactcccggcaatagttcaataggcattttcagtaatgatttgcctaattcaataatatgttgaatgtctgtacctgaaatcttttgtccactcacatgcaaagctgtctctatcatagaaatggtgaaagctttggctccatatccgagatacttcagattattcatttctgtttgaaataaagcggctgaaatatcttcagaagtgccataaggctttaataggtctgtatattgtttctctatttcctggaaaaaaggttcattgctccacaaggtatcgtctgcatcaaaagcaatgactttaataagttctttcatcggttttcgtcgttaatggtgaattttagatcatctgtttgatattttgtatgcaaagttacaataaaaagaggaataaaggcagacggtttgtttttagaaccgaatctccatttaatttcatagaaatctctatctttgttactcgttttttttgagtttgaattttaattggatatacaataatgaaaataggagataaagtacgctttcttagtgaggtaggcggtggaatcgtaactggattccagggaaaggattttgtgttggtagaagatgcagatgggtttgatattccaatgccgatacgcgagtgtgtcgtgattgaaacagatgactataatatgaggcgtaaacccggttcgtctgcgccgaaaccggaagaacctgttaaaccggtaaaaccggagatgcctgttattcaacgtcagccggaggtgcgtggaggagatactttgaatgtatttctggcttatgtgcccgaagacgcaaaagcgatgatgactactccttttgaaacttatctggtaaatgatagcaattattatttgtattacacttatttgagtgccgaagggaaagcatggaagaaccgttcgcacggtttggtggagcctaatacaaaattgctgttggaagagttcaccaaagatgtactgaatgatatggaacgggtggctgttcagttgatcgccttcaaggacggtaagcctgcggctatcaaaccggctgttagtgtggagatacggatcgataccgtgaagttctataaacttcatacctttagcgattctgatttctttgaagaaccggctttgatttatgacattgtgaaagatgatatgcctgccaaacaagtatatgtttcggcggaggagattcaagaggctctgctgcagaagaaatctgtagataaaccgaagtcacaacctattgtgaaaccaaaccatactactcatggcggaaagagcggaattattgaaatagatcttcatattgattctttgctggatgatactcaagggatgggcaatgctgaaatactgaattatcaattggataagtttcgcgaagtgatggaaacttataagaataagcgtgaacagaagattgtctttattcacggcaagggagatggggtacttcgaaaggctgtcattgatgaattgaaacggaaatatagtaattgccgttatcaggatgcttctttccaggaatatgggtttggggctacgatggtaactattaaataatagtataaaaaaagtggaagccaaccggcttccaccctctctctcttttacatattaatcattttacttattcagttcaatacctttattctgtaaagtgatattcatcaaagctgcatacttggcgtactgttcagcactaagagtctttctcatcagtttcaagttaccataaacagcgttgcgcaattttgcttctttatctttcttcgctgttgtggctcttgacatctgtgtggagaaataatcgcaaatattggctacttcttcactctgatcggagtttaactttaaatatttgcttagtttacttacattgatgttaccttcccattttgcagttgtaggctgatttccggctgcaaatgttgtagcagcaaggcagagcgctgccactaatgttaatcctaaacgtttcataatacctacttttttaattgttatacctaaaaactattcctaaaaacaaatctaatacctattgaaaatactgtctaagcgcttagttttttctttttacctatgcaaatataagaatatgttttatagcataaaaataaagaaaaggaaaagattctttttaggctgatttcttgatgtaagtcaagagatgatctgctttttgatataaaaatacctttttatgaaacatttttgtaatacgtgtgcgaaaacgatagtagagtatttctctattttaggatttattgctgttaaaatgatattgagcaaaggaatgtgactaggaacggaacgctgaaatcgacaacaaagccatggaagatggaaatgattacaaattcctttcccgaatatcgggtaatgataggaagagtggtatccatcgttgtggctccaccaacagaaataggagctagctttccaaaatatttcactaataagggtgcacacagcaaagcgataatttcacgcatgatattggaaagtaatgcgatagttcccaattcgggacctttatattcggtgataaatatgctggagagcgagtaataaccaaatccggctccaactgccatacagtctaaaggacttcgctggctcataaaagctcccgctatggcgcagcctgctaatgtgccgagtatcgtcatgataggaaggaatacaagccggggattcagggaccgaaaactcttcagggtgttcggatcgttaccgatgctgatacctacgcagaacatgagtccgcagagggcatagtaactaagtttactgtcggtgaagtcgtatgggataagatggtaaactccacaaagagtgccgataatgaaaaaagagacaataatcaaactacctttcatgcttttgtctcctttcctttactatataataggtaccacaagccccatgcacataaagtacttcctatgaccgcagctaccgtgatgacaacagcttccagtccaagagtgtgtaatcctttgatgatagattcattaccccctacatctattccgagaagaaagagaagaatccatataaggagagtgattatcttgtgtatccatgatagtcttttactgcgtaacaagtagccaagaagcatgcctgtcagcataattccaataatgataaacatagttagtgcctgctttttggctgcaaagatagtattaaatgtaaatcttggctaatctcttccacgatttctttcatggctattgacagacattcgaccatatcatccacgcaagcggcattgacagacggtgaatcttcaaaactacggtttatcgcagtctgctatccataatttatgatttgttttcatcgttgtggtttttctatatgaatgatcttacttgtctccgtactgattccaatcatcccaattcctccatgtacattgctggggtacttgattggttcatttattgtttcatcgtaagcgtcggaatctaccaggttaagtgctttcagatagtagtattctgtttccgtgatgcttaaaagacgtacaataatatccatctttacattggtgccgtattcaggaaatccgtcaatatctgtctggttgtaaaccgtcattgtgtaagatgtatttttgaatcgtgagtcgtcgaatacaccatatatattctttacggtgtcgaacatgccgttgtcttcgtcatcgctgttggtgggctgtccgtctgtcagcacaatatcctcgcgggatataaaatgatagcgatgtattgtccggctgacaaattctcctgtttcttcattatagtctttcactgtcatttgcttatccatgataagccggtagtaattatcttcgttggatcgatctttgatattgattttgtatcggagaaaattctgcgtataataatactttgtcattggaatggtgaccgtatcgatatcagctatttcatgtggacgctgtggtacggtcacttcagcccatgcgtgatattgtccgtcgtctgtgagggcgtcgatacgaactacatctccgggagtaaatttgctggaaatatggaagcggcattgcatatctccttccgtttggggtgggagcggacgtaaactttctgataactgtccgttaacgcgtacttccaccgtggcattttctacatgagtggcgtatcctcttcccgtgaaattgagatagagaacgttggtcagactgtctgcgttgattagtgcgttcatcactagtttggggggattgtcctttgcactaaaagggagttcgttttcgcaagaaactgttgtcagcaatgctattaacaggataaatggataacatatacgagttctcataatgggtttagaatttataagtgtaagtgaatgatggaattaatggaagtatagtatatttcttgataatcggtttgttgggatcgtttttgctggtgctgcgatatacaaaggtaggattcatcgcattatatgcattatacagactgatattccaggtacgcataccatgtttggtctttttgttgaaattgactcccacattcaaccggtgactggctggtaaccggtaattattacgatgctccacatatgaagcttctccgatggtgggtgaagttatgtttgaatcaaaataacctccatatcctcctccaaatccgttgtttgtgccgtcactaggacggatgacagcggttttctcttcagggattgtacttgttccacctgtatagaacacccaggaagcaccgatgtcgatacggtcgctgaacttatggttgattgtcaggttgatattatgtcttcggtcatatttatatgggaaccgttcaccgttgttgatatcgcctttggcaaactgacgatcacttttggataaagtgtaggacaaccatcccgttgttcttccaagggttttctgtgccataaactcaatgccggccgaacgtcctttgcccatttccactttgttttcccaaccggaggaagaaccgaagaaactgacgccttccttatattccagcacattatacatatccttataatacccttctaccgagaattcccatcctttgattcccgtatagtatccgcccaatgaatattggtgggagcgcatcggcttgatctttttagtgaccggaacccataaatccgtaggcatggcaatgggcattgacgatagtaaatgtacatattggctcatttgggtataagatgctttcagggttacatcttttcccaactgatagcgtacggaaacacgtggttgcaaagaaaagtaactttgtttttgcacatgaaacaatgagaaatgcagtccgagattcaggcgcagacgatcattcatcttgatgttgtcttccaggtaagcggataactcatgtccgtaaatccggttgttggctatgctgtggtaggttgtgtccaggtctattttatctcctgtcttattggagattttagaggtcataacttccgggcggaaacgatgatagatatatcctgttccaaatttgaggtggtgtttgggagatggattataatcgaagtcgatctggtaattccaatcattgattcccgaacggtaatcggctgaataccggttggtaaatgatgtaccgctactgccgagatattgattgttggtatatgagttgatgtcgaataaataattgctgtaggagactgtcgtattgcagaataaacggttgttgaatacatagttccatctggcagaaagaatcgtgtttccccaattcattttgcttccgtctttgaaatctgtatttccatcataattggcagcaaaatgatcctttccattgtaggcagatagatagacgcggctccggtcggagaacttatgattgattttggcattgatgtcataaaaataataactgtattcctcgtcatccggcatgaatggtttagcgatgaggtcgacatacgaacgtctggcggaaatattgaaagacgttttccctttcacaatcggaccctccaggttgattttgctagttagtagtccgatactaagtgtgccgtggtatttctgcatatctccgtcattggtacggacgtcgatgacagaagaaagccgtccgccgaaacgtgccggaaaagaacttttgaatagtgttacttttttgacggcttccggagtaaaaaccgaaaagaatccgaacatatggtctacgttatatacaggaatcccgtcaagtaagattagattttgatccgggcttccaccacgtatatacagtccggcagatccatctactcctgcctgtacgccgggcatcagttggatggctttcattacatctgcctctcccagtatgctcggagtattttttatttgcgtcattggaatctcgatagatcccatctgggtggctatagttcctgtctcggttttgtcggaaacgatgactacttcctgcaattgcgtgttaccctgcatgcggatatttagtaatgtatcttgtgagagcgtaaaatgatgtgcttctgtggcatagcccagataggagaaacgcagttcggtttctccttcgggcagggtgatgctgtaaaaaccgtaaggattggtggttgttccttgattttgatgactctcaatgatgttggttccaatcaacgtctcggaagacgtcccatcagtgacatatccgctgatagtgaacttgcggcttacagtttttgattcttttttcttttgcagaaggatatgccggccagtgaactgataactgatctgctcatttttgaacgcaaggtcaagtatctcacgcaaaggcttatcctttacctgcaaattgattttatgttttatggtaatttcctcactgtagataaaagaatatccggttgaattctcaatccgtttgacgaattctttcaatgtggcgtttcgtagtgtcagcgaaagtcgggcgtccgcattttgcgcgtatatttgtgtggtgataaggagtgctacccctatcagaacaatggttctgacagggaagcgatcttggaatataatattcatcttagtctggtttagcagtgataataatctgtttattgttttgtgagtagtcgaaataaccggcattatgtaatacagataaaatagttgccaggtcttctccattgcggaagcgtgctgtgatccggtaattttgcaaagccgcgtcggctatgtggatcgttgctccgaatgaattggatagttcgcgggcaatctcctgcaaaggtaggtcgtcgaatataaactctccctgccgccaggaaatttcatcttctacgttttctaaaaccttgcgggtgagtttttcttccaccttattatatatagcaatctcattcggtttcaaaatcacacgaactgacttgcttttattgctgactgctaccgaacctgtcaataacgttgtctttacatccgggttgttctgataggcatctacgttgaagtgagttcccaacacctgaacgtcaatcgtttcagtctgcacgataaacggatgtttcttgttcttgcttacttcaaaataagcctccccatttagtttcacttcccgcttgtccgatttgaacttttcaggataagaaagtgaagaataatggttgagtgtgacggtgctgccatcaggaagacagaccgtgcgtgtctctgccaaggtggaaaccgtttgtatcgtgaccggttgcatatataaataggctgtccataccgataggcaaagtagagttactgccgccgctgccgagaaagtacgtatcagtgtcagacgccgggtatgtgacttcagtcttttctctagttccgggtaactggttgttgctgaaaaccgtcctcgcggtgaacgtgtggaagcgacgagcttgttcagtatttcttctaattccgtatcggtgtatttcatcttttttctgtattgctcttgatctattattttcgtttcaacagaatggtcagtttgctgattcctccttctttccactggggagtgcaggataaagtgacattctgcttcttcaatatcatctgtttaggatagatttttatgacagttgttgctgacttcttacccgctttgatgattacttttttttctgttagctgtaccactgctgcttgtcctactaccggagggggtgtggcaagtactaccgtccggtcttcttttgttttttctgttgcaacaattttaattttcaactcacattcggatttgtcgctttcacattctactgtttccttcgaatgttcaaagcctgcatagtcctttggtaggttgtcgttgtcattgttgcatgaaaacaggcacagacaaactgaaagaaggacaaagattcccatgtttgcgtcatttagctttttcattttctgtcttttttagtgattgattgacttatttgttgataaagaccggagggggacagaaactccctacgctctttgtctaaaagaatgttaatctatttcggcccggctaatcatctcttttaaacgtgtgattgctttctgaagttgtgcgtccactgtattcatgctgatgcctaattcttctgctacttgtgcgtaactctgtttttcttcacggatgcggatgaacacttccctgcaacgatccggaagccggtcgagtgcttttacgtaaagagcgaacagttcttcactgatgagcgattcttccggtgaatagctttgttcttgaggctccggcagagaatcgggatgaataagcgtatgtcttgattctttttccagataattgagcgaagcatttttgacgagaatgaaacaataatcttcaatgtttctcacatcaagcaaattgctgcgttgcttccatagtttcaggaatacatcgagaacgatttcctgcgaccattcttcctgtttcacataataataggcaatacgaaagagacggtcgtaagtcatgttgtaaaagtcccggaaagcagtttgcgaatccagttctttcatttgccgcaataactttcttacttctgattcggtcatcggctttttgtttgtttggttagtctacccaaagtaaatcactcattatactgtcggaaataaaaatcccttcacgcgtcaggcgcaaagctccgttgtattcctccagtttaccatttttcagataaggtgcagccattttttgacaatactcccacatttcattgccgaacatctgtttcagtttctctataggtgttccccatacggtacgtatggtagtgataataaattcgttgtagcgggtggttgggtccagatactctgtctcgaaagcacggcagtcttcttctataccttttatataggtgtcgattgaagacacattccattcccgtgtcattccgtcaaaagaatgtgccgatggtccgcatcccagataagctattcctttccaataggaagtgttgtggcgggaatattttccggggcggcagaaattggaaatctcatagtgttcgaatcctgctttctgcaaatgctctatcagtgatgtgaaaaattctaaactggagtcttcgtctacctcggatatctggtgctgttttaacatattatatataggtgtatcttcctcataaatcaagtgataggcggagatatgttctacattcagactgatagcttgacggagatcgttttcccatcgttcttttgtttctccgggcaatccgtaaattaggtcgatactgatgttctggaaatcggctttccggcatctgtcaattgcttcgatggctgtacgggcattgtggcggcgtttcaatagtttgagcgtagcgtcatcaaaagtctgtattcccatgctgaggcggttgaaaggaagtgaggaaagcatttccagatattcctgcgataaatcatccggattagcttccagagtgatttcctgacaatgattcaatccgtagtgctcgcggatggtatcaaatatctgttcaaaatcctctttttccagttgagacggggttccgccaccgaaataaatagtttctatatcttctcctttcaggtattctttacgcatcgtcaactcccggcagagagcctgtacataacgggttttgagttcgctgcgagtggttgagtagaagtcgcagtagatgcagcgcgttttgcaaaaaggaatatgaagatagatacctgccatagctatgctgtttgggtttgtgggtgtaaaagtaagactattattagatatatcaaaaaagcagttgacggaaattatttatagtggggcgggaatacgctaaatagataattctcccatcgattagtagaagataatttcctgcaatgctgaatttaagatcttttcttttataaataagattcgaacttgtagccgggttttcgtttgacttaagtcaaacgatagaatgacttaagttaaactatcgcttgacttaagtcaaacgaaaactgattaggtaacgggggaactattgtatgaaaggaaaacaactaaaaataacatcgtgccggattactcgttgcaactatgaaattagtttatagccatgcgaaaataatttttaacccgtttcgaaaatgttcatgttaaagatgtgttacataacattgtttagtaacactgccataagtgttgcttttcccccaattaatccctaatttgcgcatcacaaaattaatggtatgtgagaaacatactgagtaattactaaaatcttatatattatgaaagtatatcagactaatgaaatcaagaacattgccttgttgggaagttctggctctgggaaaaccactctcgtggaagcgatgcttttcgagagtggtgttataaaacgtcgcggatctgttgccgcaaaaaacacagttagcgattattttcctgttgaacaagagtatggttactccgttttctccaccgttctccatgtagaatggaataacaaaaaacttaatattattgactgtccgggatcggacgacttcgtaggcagcacagtgactgcactaaatgtgaccgacacagcaattatccttctcaatggccaatacggcgttgaagtcggtacacaaaatcacttccgttatacagaaaagctgaataaacctgttatttttctagtcaaccagcttgataatgaaaaatgcgattatgataatatcctcgaacagctgaaagaggcatacggctctaaagttgttcccatccaatatccgatagctaccggtccgggctttaatgcgttgatcgacgtattgttgatgaagaaatactcatggaaacccgaaggaggggctccgacaatcgaagatattccggcagaagaaatggataaggccatggaaatgcacaaagcattggtcgaagctgctgccgagaatgatgaaaatctgatggagaaattctttgagcaagattccctgtcagaagacgaaatgcgtgaaggcatccgtaagggattgatcgccagaggtatgttccctgtattttgcgtctgtggaggtaaagatatgggcgttcgtcgcttgatggaattcttgggtaacgttgttccttttgtatctgaaatgccgaaggtacagaatacggaaggtaaagaagtggctccggactccaatggaccggaatctctttatttcttcaagacaagtgtggaaccgcatatcggtgaagtttcctattttaaagtaatgagcggtaaagttcatgagggagacgatttgctgaatgccgaccgtggttcgaaggaacgtatcgcgcaaatctatgtggtagccggtggtaaccgtgtcaaggtggaagaattgcaggccggtgatatcggtgctgccgtgaaactgaaagacgtgaaaaccggtaatacgctgaacggtaaggattgcgactacaaattcaattttatcaaatatccgaactctaaatatacccgtgccattaagccggtgaatgaagcggatgtggaaaagatgatgagtatcctgaaccgtatgcgcgaggaagatcctacttgggtgattgagcaatcaaaggaattgaaacagactttggtacacggacagggagaattccatcttcgtaccttgaaatggcgtttggaaaacaacgaaaagcttcaggtaaaatatgaagaaccgaagattccgtatcgtgaaacgattacaaaggctgcccgtgccgactatcgtcataagaaacagtccggtggtgccggtcagtttggtgaagttcacctgatcgtagaaccttataaagaaggtatgcctgtgcccgaaacgtataagttcaatggacaggaatttaagattactgtaagaggtacggaagagataccattggaatggggtggtaaactggtgtttatcaacagtatcgtcggtggctctatcgatgcccgcttcttgcctgctattatgaaaggtattatgtctcgcatggagcaaggtccgttgacgggttcttatgctcgtgacgtgcgtgtcattgtttacgatggtaagatgcacccggtagattcgaatgaaatctcctttatgcttgccggacgtaatgcctttagtgaagcgttcaagaatgctggtccgaaaattctggaaccgatttatgatgtagaagtgttcgttccgtctgataggatgggagatgtgatgggagatcttcagggacgtcgtgccatgattatgggtatgagtagcgaaaaaggttttgagaaactggttgctaaagtacctttgaaagaaatgtcgtcttattctacggcgcttagctctctcacgggtggacgtgcttcgttcattatgaaattctctagttatgagcttgttccggcagacgttcaggataagttgatgaaggattttgaagctaaacaaactgaagaatagaaatgaggatagttgataaatagtatg

SEQ ID NO: 8188 - DNA, 4590 bp, Unknown
  gut microbiota DNA sequence
aaaggaaacgtgccatttgtctctgtttcagctctttggtggtctgcgtgaaagcgctgttgacatatcctttttcgtcggggctgcaaagggtgtaccagtgtatgtccggggcaagggtttgcaattgctcgaagaggcggtagtcgtcggtcaatacaaagacgtcgcggatggctgttttttctttgatgaggcgtatgtaatgttccggtggaagcaggttggtttcggtgatcttgtctcctccgcgtatttggcatcctgcgtattgaggcggaagttgcaggctggcggcaaattggagacattcctgtgcggtggtgtcgttgagtttccaggtgatttccgtcagcttttggaaggtgtggaggtagtcaccgtctattcccaattcggggatatggaaatgctggttggggttgaacgtcacttgaaagttgagtcggaccggtttgccatacgtgaagaaagcaagggcttttccgatgatgttcttacaggttactttcagtttccatttcagtaacttcgttttagatagttttttgtcttgcatcaatgcttgccatgaaggcaggcgatgggtgttgtaggtgtggtgaaacggttcgtgcacttgctcgcagaaaggtgcgaaacagtcttcccagcccttttcccatccgaagttggcgtcgtcggagtaaagcttgaactgtattttgtgttgcaggcaatagagcattgcatggagcatataggtgtattcggtaaagaatccggcgtctatacctatgtgatagatcatcgtctttttgaaagaactgttcagaaggcggtatttagtggcaagatcattagggttcatgtggcttctttttgatgaaatactggatgctttctttaaaggtgaccgaacggctgccccacatggcggctgcgtagagtgctgctgcgagcactatcttgcttgccaggcggagataaatattctcgatggaacgggtggagtaataggtgattaccatgacggtggtggcaatgacagcgtatggaagtatgtctatcagtgcatggcgtagctttagtccgatttcttgccatacgaagtagtgccacgtcagtagccacagtatattggtggatacatagacggcgagcatggtatagatcccgtgtgaatggactaacagaacgcctgacagtagaataatgccgagcgctatggtgttccacatatagatgcgggattttcctttgctgatgatgagttgctgatagaggtatgcgatgggagtgaaggctccgctgatacacagaatctgcatgatggatatgctggaataccacttgtcggtgatggtgatggtaatcagttcttctgatacgattcccagtccgagcatggcgggaaacgagacgaaagcggtgaaacgcagcattttgcggaatacccgtttttgccgttcaaggtcgtccgacactttggtgagtaccggttgcgccactccgtttatcatgccggatataaagagctgtcccatgccgcaccatttattggcctggttgtaatatcctacttccttttcggtgtagaacttacccagtatcacagagaacaggttgttgttgatgtgattgaatacattggttaccaatagctttccgctgaatccgaacatttccttaatcggggtgaaattgaattgcaagctcggtcgccaacgggtgaaatgccagtaacaggctgtgttgacggctacataaacgatgctttgcgtggcaataccccaataagagaaaccgaagtaggcaagagtgattccggtgattccggatacggtaagcccgataacggaagacagggcccgctgtttcaccatcaggtttcgcagaagataggcactgtgggatattcccaggctggctatgaagaatccgatgaaggaataacgtgccagcggtgtcagttcgggagtatggtaaaaatcggcaatgagcggtgcgcacaggaataacagtagatacaaggataagctgatggctgcattgaaccagaagacagcattgtaatcgttatgtgtcacttccttcttgttgacaagggcggctgtgaaaccgctctcctgtatcgaactggcaatgagggagaagatagccaacattcccaccattccatagtctgccggagtgagcaaccgtgcgaggaatattccgaaaagcaggtttaacaactgctgtatgccgttgctgaatcctccccaaaatagtcctttggctgtcttttcttttagtgactgattctcgctcatgttatttgcaaagaatacatgaaaaggctatgcgcaatgatagcttttcatgtattccctatttaagttttattattttacttcgctacccggcttcacctcacgtcccggcatgataactgccagactgccgtcgttgttttcggcacttagaatcatgccttcgctgacgatgcctttcagtttgcgcggagcaaggttggcgatgaagcaaacctgtttgcctaccagttcttccggttgataatgcttggcaatacccgatacgatagtacgtgtttccagtccgtcgtcgattttgaattgaagcaatttatccgctttcggcactttctgacattcaagaatggtacctacacggatatccagtttcgtgaagtcgtcgaattcgatgttcgggcggataggattagccttgtagttggcttcttcgtttgctttctttgtatcgagcaatttttgtacttgtgcttcgatagtagcgtcctcaatcttttcgaacaataattccggtttgttcaattggtgacctacaggcagaaggttgtcacgtcccagttcagaccattcgaaagtattcatgttcagcattttgcggagtttttccgagctgaacggcaggaacgggtcgaaagcgatggcaaggttggcaaccagttgcagggagatgttgaggatggtacctacacgctccatatctgtttttgccagtttccacggttcggtgtcggccagatatttgttgccgatacgtgccaggttcatggcttctttctgtgcgtcgcggaatttgaatacgtcgagcagtttttccacttctgcttttacgtctgcaaattctttcagcgtttccttgtcgtagtcggtcaattcaccttgtgcaggtacgcgcccgtcgaagtatttttgagtcaataccattgcacggttcacgaagttaccgtatacggctaccagttcgttgttattgcgtgcctggaagtctttccaggtgaagtcgttgtcttttgtttccggtgcgttggcggtcagtacgtagcggagtacgtcctgtttgccggggaagtccgccaggtattcgtgcaaccatacagcccagttgcgggaagtggagattttgtctccttcgaggttgaggaattcgttgctcggcacgttgtccggcaggatatagctgccttctgctttcagcatggcagggaatacgatacagtggaacacgatgttgtctttcccgatgaaatggatcaggcgggtttcaggatctttccaccatgtttcccaactgtcggggagaagttctttggtgttggatatgtagccgataggagcgtcaaaccatacgtagagcactttgccttctgctccttctacgggaacagggataccccagtcgaggtcacggcttacggcacgtggttgcagtcccatgtcgagccagcttttgcattggccgtatacgttgggacgccattctttatgatcttccagaatccatttgcgcagccatccttcgtgcttgtcgagaggaagataccagtgtttggtttctttcatcaccggtttgctgccgctgatggcgcttttcgggttgataagatccgtaggagaaagtgaggttccgcatttttcgcattggtcgccgtaagcgccttccgaatgacagtggggacattctccggtgatataacggtcggcaaggaatgtttttgcttcctcgtcgtagtattgttcagacgttttttcgatgaattcgcctttatcgtacaatgttttgaagaaatccgaagccaattggtgatgcgtcggcgaagtggtgcggctatacacgtcgaatgagataccgaattcttcgaatgatttttttatcagcgaatgataacggtctactacatcctgcggagtaattccttctttcttggcacgaatcgtgataggtaccccgtgttcgtccgaacctccgatgaataatacatcttctttttttagacgcagataacgcacataaatatctgccggtacgtatacaccagccaggtgaccgatatggacaggaccgttcgcatacggaagtgccgatgtgacggtggttcttttgaatttcttttccattatatagtgtgatttttgttgttttcaactttgcaatgtgcaaagatagtgacttttcaccacagattacacggattaacacagattatttcattgagaagtggtcacagaatgaaacaggaacgtttcgtaataaaaaaacaggtaaaaagaaagtgatgtggttcaatggatttttgtggtg

SEQ ID NO: 8189 - DNA, 13032 bp, Unknown
  gut microbiota DNA sequence
tgcgtttattttataatcagcttctatttggaagaatttgcaaatggcatccagtgacatgcgtgtggcgtttgcttttccatcggcagagtaacctgcaatgtggggagtgccaataaatactttatccagtaactcacggttaatttccggttcatgttcccatacatcaatgatggcatctgaaatgatccggctgtctagggcttttaaaagagcattggtgtcaatgacctctcctcgggaggtattaatgataaccggtttttgtttgagtgactggaagaagttctcatctgccaggtggaaggttttatatttcccttccttatataacggtacgtgaaaggttatgatatcacattcttctgcaattttatttagtgaggcaaatagctctgttccttctttttcctcccgtggcaaatcattcagtaaaacgcgcatgccaaaatcccgggcaactttagctaccttactccctacgtttcccactcctatgattccaatcgtcagttcgtttaactttttgtttctgcaagatttccacaccagaagcgatgactgtatatattgggcgacagaagcagaattgcatcccggagcatttgtccattctatacctgcctgtttgcaatactttgtatcaatgtgatcgaaaccgatagttgccgttgctatgaatttcactcgactaccttccaataaattccggttgcagtgtgtgcgggtacggacgataagtgcgtctgcatcccgtacgagctccggagtgaaatctttccccggtacataagccacctcatcggctattctctgaaccgcttcttttataaatggtattttattgtcgataataattttcatatacaattcatctttaatacccacaaaggtaacaaataaaaaagtaagaaagggttgcttgtctgaaaaatattacatagatttgccctattatatatctattagctagttaagattatgacatttagtaacctttgcaacgagattttttggaaatcgacaactgattaccatgtaacggatagtgtggatgctccgatgaacaatccttacgagttgaaaactattgagtattatttatatctaaagaactggattgatgctgtgcaatggcattttgaggatattatccgtgacccgcagattgatccggtagaagcattggctttgaaaagaagaattgataaatcaaatcaggatcgtacagacctggtggaattaatcgatagttacttcttagacaaatacaaagaagtaaaacctctctctgatgcaacgatcaatacagaaagtcctgcgtgggctattgaccgcttgtcaattcttgcattgaaaatttaccacatgcagcaggaagtggaacgtacggatactacagaggaacaccgtcttcaatgtcagactaagctgaatatcctgctggaacaacgtaaagacctctctacggctattgagcagttattagctgatatcgaagccgggagaaaatatatgaaagtatataaacagatgaagatgtataatgacccggcattgaatccggtgctttatgctaaaaaataacgaatggcgcgtattctcattattcgtttttcagctcttggcgatgtagccatgacaataccggtaatacattcgctggctgtgcaatacccgcagcacgaaataacagtgttaagtcgtgctgtatggcagccgctctttcaggggctgcctgcgaatgtaggttttgtcggagctgacttaacaggcaaacacaaggggctttggggcttgaatagcctctattcggagttgaaagcgatgcattttgattacattgcagattttcatcatgtgcttcgttccaaatatttatgtctgcgattccgtcttgccaataaaccggtagcttccatatgtaagggaagggccggtaaaaagaaactggttcgtcgtcacgataaggtgatggagaatcagaagagttcttttcgccgttatgccgatgtgcttgagaagctcggtttgccggttttattaaatttctcttctatttatggcgaaggaaaaggcaattttgcagagatagagccagttacaggacctaaagaaaatcaaaaatggattggtatagctccttttgccaaacacataggcaagatttatccgttagagttacaggagcaagttatagcacattttgcggctaacccacaagtgaaagtgtttctttttggaggtggtaaaagcgagcaggaagtgtttgacacatggattgctaaatatccttctgttgtttcaatgatcggtaaactgaatatgcgtaccgagctgaatctgatgagccatttggatgtgatgctttcaatggattctgccaatatgcatttggcgtccttggtcaatattccggttgtttctatttggggggccactcatccttatgccggttttatgggctggaagcaattgccggttaataccgtgcaacttgatttgtcatgccgtccctgctctgtatatggacagaagccttgttggcgtggtgattatgcctgtttaagagatataaagccggaacaggttattgcaaaaatagaagggattgtaggttgatatttgcaggaattcaatttagttgtttttgagccgaaagagcgtagaatcaaataatgatggaaaaagagatacaacgaaagaaaaaggtactgatagatcttacgaattatggtagtctaacagctggtttcggacagattgcggccaactatgcggccgctttttcgtctatgccggtagaggatcttcattttgtatatttgttgagacagaaatatatgcaggaatttggcccgaatgtgacctctgttccggtacgtcgtatcaataagtttttcccttttacccttcctaaagtagatgtatggcatgcggtgaatcagcagcagaagttgttgcgtattgccggtggtacaaagtttatctttactatacatgactttaatttcttaacggagaaaaagccttggaaggctaaaatgtatcttcgtcggatgcagaataaggtcaataaggcagcagtagtcacaacgatttctcattatgtcgcagatgtcattcgtcaacatatagatttgaaggggaaagagatccgggtcatctataatggggtggagaggatcgatatgttggaaggaacccagccgtcttttgcgacgggacgtcctttcttttttacgattggacagatccgtaggaaaaagaatttccatctcctggttgacgtaatgcgccattttccggaatatgatttgtatatttgtggagatgcccatttcgcttatgctgaagaagtgcgtaatctgattcgtgagaagcaagtcactaatgtgtttttgacagatgtaatcactcaaagtgaaaagatttggttgtatcggaactgtgaagcgttcctgtttcctagtgaaggagaaggttttgggctgcctgtggtagaagctatgcagtttggaaaagctgtatttgctgctaatcgcactagtttgccggaagtttgtaatggacatgccatcatgtgggaacatttggatacagaatctatggtgcaaagtatccgggaacatttgcctgatttctataaagatgaggaacgcttgaccagaatgaaagaacatgcagcttcattcagttacgagaagcatatacaagcttatcttgatttatatcgcgagttagctcaattgtcttaatgtcgaagttaattgatcgtataccttttccggggtaattgatgcgaaacgttcttcataagttaatgttgcttgttgttccggcggaagaatatcgtcgggactaatacctcgggcaagtacggaatttgcaggtaaccacattgatttagaggcgcttggcgaataaatagcgaatgaaggaatttcgagggcttgcgcaatgtgtcgggctcctccttcgtttccgaaataaaacgagcagttggcgcaaagtgctgccagttgtcgtaatgaagaggcttgtatatcaatcttgatgcgttccggacatcccaattccttgtagatatttcttgcatcttcttcttcataccccggtgcatagttgaagatcatttgtatgtccttgtattcttccaatattcttttaagtgtggttatcataaactccgtattccattttttatggaggagcttggtggtgactcctattaggaatacagggcgcgcgaaatctatcccctccttttccatataatatcgaaagtcttttttctcctggtcagtgaggtataacctgaattcttttgtatattgaataggcttgattttctctaatggtgctgcaagcaataggttgcgttctaccatatcagttgttagactgttgctgtaagtgtctgtccgataatttaatagaaaacgtgtgtatcccttgatacgccctatccggaaaggagtttttaatgagaaaagagagaaaaaaagagtccggatcgtagaacgcatatcgatgatgacatcgtatttgttttgatgcgtcacttgccatactttttttatataagcagtgaatggcttattctcattcttgtcaaatgtaataaccttatctatgtccgggtgaccctcatagagcgatgctatatttttattcagcacaaagtgtatttctgcatcgggaaaactttttttcagcgtactgcacaatgcaacagccagaatagagtcccctatttgtctaaatcgaataatcagaatttttttgattggtttcatgcttgacttctttatgctttttatcgtgcaaacatagctaaaaaaaagcatttatgtctaaatataaatgaaaagaaaaaagaaaaaacgactaaagttgttcgcaacagtacttatatgtatagagagttagccaatctttgtgagaaaagaaaaaaatatagtcggaatgtgccttaatttctttatctttgctccatctttgtaattagtattatataggagagtgtaatgagagtgattgtaaatcccaagtacgcgcatctgcagaaggagatagaagaaattccaaggtccttccaggaaaaaggagatgtggtgtacgatgggcgtaatgttttaaaacgaattggcttaggcagcattgatgttgtggtgaagagctttaagaagcctcacatcatcaatcgtgttgtatattcgtttttccggcaatcaaaagcagagcgttcctatatttactctatggaaattcaacaacatggctttgacactccggagccagttgctatgatcgaacaattccagagtggtcttctttcacatagctattacatttgttgttatgatggtggcgaaacagtccgttccctgatggatgggaaagtggaaggaaatgaagataaactttctgcttttgcgcgctacacggctgctttgcatcaggcaggtatcctgcatttggactattctcccggcaatatattgatccatcagaatgatgcgaatgaatatagtttttccttggtcgacgtgaatcgcatgcagttgctatcggatattgattgtgatactgtgtgccgtaatatgtgtcgtttatgcatctctcgtgaagtgctgacttatataatgacagaatacgcttctttgaggggatgggatgtagaatctactgtcagtctggctcttcgttatagcgatcagttctttactcattatatttatcgtcgtgcggcgcgaaaagaacaagaaaggcatatcgtatccctgattttattcttccgtttgtaccgttccgtacgtaagttcttttcctgggaaccgcatatctcacgtttcttattgaaaaaagaaaagcgcatttatgatacatacttgtgtaagtatgactattgcgaattgctttctgctgattatcaatgattaactcttacttccgcgcatgactacactgcggattttatgcctgaaaaaacctttctgattggtatatgtgcagttatgcttatccaaaaatgcagaaatgactgcttcgtcatcatgtagatggtatgtgcaaattgcaaaatccaacttctggcaattctgaaataagttcttgcatccggccaatgcatgccgttcagctccttcgatatccatttttagaaatagatgctcctccgtttgattgttgaagaagtcatccagggtttgttctcttgaagagttatggtcgcttacatacttttggacaatcgtaactttatcttgccatggctcaaaggtcgctctgatggcctccaaccattgttcgtcctgttcaaacaggtaaacatgtttagcttcttcgatgatttccaatgaagaatatccttcggcgcaaccgacatctacaaatacctttcctgtcacttctttaacgctgttgaagtaatggtgcggtgagcgcctgtcttgttccatgctcaaagccctgtaatatttctgaattttcctggccggagtgctctttctgaaatagagccgtttctcttctttttgaacatagtataaacctttctcctcgtctttctgtatgtcaacgggcatatttgcatattcatctttgaattcatacaggtgtcttgaatatccatgttctttaatatattcatagtatttcagataaggagagccgggcttatatcctttcatgaaataatatgggagagtgccatatataaatttctttattgtgtgtttaagtatgttcatctcattaatttcttgtagatgtttaagatctcttccgcttgcttttcttcagagaatcttttggcaaatatttgccctttttcaatcattactttctttctttcagggtcagagtatatctgtttgaaagcattggccattcctttgatatcatcgggatgtatatagatcgagtcgggacctccggcttcttccaggcaagaacctgttgcggctactaccggaattccggagtataaagcttctataatggggatgccaaagccttcaaagcgtgaaggatatacaaaaatttcagctagctgataaaaagtcggcagatcatcaaaaggaacattgctgatgatgtgtactctttcttccagcttattctccttaataaaatgttcaatcttatcagtgtattctgtatggcggcctacaatgacaagatgaatttgttcaggaagcatcgtcagtgcttgtaccgccgaaagggcattctttcgttcttcaatacttcctacgttgaggatatagtgctccggtagctgatatttagctcgaacttctctttttttctcttctgttacagggtgcgtgaatgaagtatcacatccctgataaacaacctctatcttatcggcaggaatcccgaaatactcaataatatcacgtttggtacattcgctgatagcaatgattctatccgcattttcgcaggctttgcggaatttgtatgtatatatattcctgtcgatcgaatgatagtattgtgggtatcgcagaaatatcaaatcgtggattgttacgatactttttaccttacttttatggatattcaggggcaattcattgctaagtccgtgaaaaatatcaattctttctttttccaattggcgggtgattcccaacactcgccataacgaacttaactttttccagaaagaagtagtgggataagaaagctgtagttgccgatattgcttcgttaatttgttcagccttttattttcccgtttcttgggggcatacaatacatatttattctccggatagaattggcatagaatatccactatatagcggctataattacccaaaccggtgaaattctgtactgcacgttttccgtcaaaacctattctcatttctacttcttacctttatgtgattatagttagacttcaaactcccgataaggtttattcaggtctaaataatggaaattgtgttgtctttgcccactttgtttaggtatggtcatgtaatctccgtatttctgtgacagatagacatcgtatttctgtactccccacacttcttcattttcaaataagattggagtaggggtacccagaatatctttagacatgattcctttcattccgtcatcataatcacagaccaatgcggattggtcgaaatcatactttttcattactttcctgatactttcctgtgctccggcaagggtgaaaagctttctgcataatagcggtatccatgagctggggccttttccatgcttgtatggatcgcgatgaatcagataaagtacacgtttgtagaattcgtactttgcaaaatgcattctttgcgccatgcggctctccggaactccgtccagtgggaatatatcaatatatacgcctcccaaatatttgagatgcatacgttcaattagagtggtgtcggcatcctgtacttttgcaaatggaagaggatattccttgtcgttttcagcacatacagcttcgtatggtttcggtaaccattctttggcattagccattaataaatcataatcggctcttggcatgccgatatccagatcatcatcccaagggataaatcctttgtggcggacggctcccagcatggtgcctgccatgatgtaatatcgcagattatgttctttgcaaactttgtcaacagctaataaattctttaatatgcgaagctgtagagggcggatatcgtaatttgccatttctatctgaatttgattaataaagactggctggaatcagcttttgtgcctgttgaaagtcctctacggtgtccagttcggccgagaagaactcggtggtatccatgacgtaaaagctatatccttgcggaatcagtcgttcaaaagcccgttcgtagaatatattgtccagtccttcagtggtaatcataatgtccagttctcggaatagagctttggtgtattcagctgacatcttttcgataccgatagactctccgatagcatcggatatagaacagactttgctgatttcaacaaccttttgtgcatcgtctacgataacttttatttcttccgctccaagctcatggcgattcagtgccaatatgtcgtccttatccgagtgaagcagtttttctacaatttgaggatcaaaaacaatatcactgtctaataacaatatttcttccccgtctgtatatggtcgggtaagccataatgaatagatattgttggttgattcatatctgtcattatagatgaaagtaatattttggactggataacgtgcctgcagaaaatcaacgatttgttgctggcgataccccgtgacgataatgaattcgtcgaatccgttttgtatcagagcatcaaaagccctttccagtaggcatcgttctcctatcttaaggaggcatttgggcgttgtatcggtcagcgggcgtaagcgtgacgctattcctgcggctaatattactgctttcatttggaggcgatttctttaattgtatctataacgatccggttttgctctgggcgtcccaatgtgatacgcaaatgagtgttgatatccggctcattcataaacttcactttataactctgttcggcaaaagccttttgtaaagcttcttttagctctatcgggtatttgattaaaatgaaattggcaaccgattcatatactttgaatccgggtaacgcgccgatttccttttcgtaacgctcacggtcttcgttcatcagtttggcgatgttgcggtagtgtgcgtccgatttaagagctgcaatggcgatatcttcggatattcggttgtatcccagatatttattgctgtatctgctgaatttttccagttccttactcataaatccgaaccccatacgtaaaccgggcaatccataaaacttggataaagtacgggaaataatcaaattcggatatttattaaccagctttttgatataactggtatcagttgaaacaaaagaagcgtatgcctcgtctatcagtaccactgtttggctgggtacttctgcaagcagttcatccagttctttcggagttaaaccgttgccggtagggttattgggagaagccagtaaaagaatcttcggattctctttctgaatcatatctttcagcgtctcaaagtcatatttaaaggtgtttccgtcttcgtaaagaggatattgcaaagtatgaccattcacctcatctgcaattgacttataataccaccatgagaacttgggaatcaacatcgttttgtttccatcttcttgagtcaagaagtaatgaacggcttgcttcaggatatcttctccgccgtatcccaataaaacttgagtttcatctatatcgtatagttcggacaagaaaacggataatatacttttctttccttcgtcgtaaatgcgggtataaaaacaaagtttatttatatcgaagttttttaaagcttctactacttcttttgatggactgtagttaaattcgtttcgatctaaaaagttcaaattcttttccatattagttttgtatgattcctttatcgcaccaggttagtttcctgactttcgtttcgttcaaaatactgcggttgttgctcaaattatccgttccatgtagttcgtgatggaggtggaacacaattcccgcaaatttgatggtacgcttgcgtacaccgttattgatgaggcggcatactaattcatgatcttcgcttccccatccggtaatagcttcattatatccattaacttttaataagtcctctttccagaaagccatattacatcctctggaatatgaaatatcccattgtcgataatgttgaagtagcggactcaaccaaggtaaatgcactccgttgattgtgtttttagtacctttgtcgtgaatggaaattatgcagtttttttccgctaacattttttttgttaaaccttcccggattaatacacggctaccggttacgaaactacctttttgggcaaaacgtgcatgatctttgacgaaatctttgtgtaagacgatatctccgtcgatttgtataatatattctttagatgctttcgcaatagctttgttgcggatggaggctagtctgaagcctagatcctcatgccagacatgaataatgggaacttcggaggaagcagccaattgatgaattagctctcttgtgtcttctttagaaccatcatcagcaatgataatttcatcaggaaggagagattgacgtagcacgcttttaacgcataattctaacgcgtcgcttctattataggtggatataatcagcgatgtacttatgttgctcgccattggtttattcatataattattactaagttagttaaatagttaagggggcttgcactaaaattctacaaatgtatacattttatttggttgtgacaagcattgagagctttttcaaggtagctgcatcagattttatgattctttttttctgttctggaattaataagtatacatacaagttcgttatctttgtatcccaggcgagtcaccttttcattataaccattggatttgtataaatcttctttccaaaaggccgtattacattctattatatgtaaaatatcattggcaatacttctcttgtaaatgactaagaataaaggggggcttctctcgtgtttttaggaagtattgaactggaaattttgtaaatggaaatgatattttctaagaaacttatagtgtactatttgttaatagttttttccgcttaagctctgctctttttgtatttatgacttttaattagatattgaatgttaaagggcagttttaggaataaaaaacgttttatagatttgaatgttagtcgagtttctaaaataggagggagacagttttgagagagtcttgctaatccttttattaagtcaacccttttaatgttcgagtacatcgctggtaggtatcgatgataaatttcaaataaataatataagtttatttctttttgaagatgtttgctaaggttgttgtctgcttgtatcaatctcctgatttcactaaaaactatggtaagatcatttagatgcttcaaggtgtagccttgttccatatttgtaatagagtcttctctcttgcaattataaagataagttgtttggttggttaaggtaaatgatctggtatttaaagcgagcatggcatgcattactatgtcttcgtggtacacgtgttccaaaaaatgaatatgaaattcttttaaaaaagaaagattatataatttattccatgtagttacccatatatcatttttttcttcataaaagtattgagccatacataatttaccctttcgtgttatattagggtaattagtaattttgagtgaattttcattctcatcaatttgattgattccggctgctacaaagtctactttctcttgtgaaataatattatataaagtttcaatgcagtcaggaacaatagcatcgtcgctatccataaagtatagatatttcccttgagcagattcaattgctgtgtttctcgttcctcccaaaccgagattttttttatgtgtaattatacggatacagttacctctaggatgtgtgcttttaagttggtggactatattcatgctgttatcatgccctaaatcgtctactatcaaaatctctaagttttgataggtttggtttaatgcggataataaggcgcgttcaatgtattgttctacattataaataggcattgagagagttattaggcacatacttttctttaatcattataacaaaataatattagttgattacaaagttactttaatatttgtaatggtgaaagttatttcgttttttattgatttcttatcccgagcttgctctatatagaaaagaatagtttcattagaataaaactttgaattattttcattacctttgttcaaaatattatgtttgtctaaataatgagactggtgtaaattcggcaattcctctattgtttaagactattgttatttaatttaaattttg

SEQ ID NO: 8190 - DNA, 7334 bp, Unknown
  gut microbiota DNA sequence
agtgctcgggatcattatatattccactattaaaagttggtaaggttcaccacagattacacagattcacacagatttcaaatgataaaaaagatattccataaaaagaatgaagagtaagtggagttatcaaacaaaatctgaatattaaaaatcacccacgttatagctatctataacgtgggtgaaattatttataaagggctgttatacagcttcatcagcaatctgtgtgaatcggtgtaatctgtggtagaatatcaagctttcttgatataatcaacaatccactgtcctacttctttcgttccgtatttagcaccgtcagccacctggatttccggtgtacgtacattctcatccaaagaagcgtctactgctttacgaatcagcgcaccctcttctttgcaatcgaaatactcaaataacatagctacggaaagaatttgtgccaacggattagcaatattcaatcctttagcctgcggccatgaaccgtgaatcggttcaaacaccggagtactctcgcctgtggaagcagaaggaagcaagcccatagaaccactaattacagaaccttcgtcagtcagaatatcaccgaaggtgttttccgttaccatcacatcgaagaaagcaggttcctgaatcatcttcattgcagcattgtccacaaacatataatctgttgtcacttccggatagttcggagccatttcctgcgcaatctgacgccacagacgggaagaagccaacacgtttgccttatctaccaccgtcaggtgttttctgcgcttcatcgcatattcaaaagccactttcaagatacgttcgatttccgggcgagtataatagttggtatcatacgctttgtcattatcctgatacttttcaccgaaatacatacctccggtcaactcacggatacagataaaatctgcgttctctaccagttccgcacgcaacggagatttgtgaatcaggcatttgaatgtctgcaccggacggatattggcaaaaagtcccagtttcttacgcatcgccaacaaaccttgttccggacgtaccttagcagtagggtcgttatcaaatttcggatcgcctacggcagagaataaaacagcatccgcatctttacaaacctgataggttgcttccggaaacggatcgcctactttatcaatcgcatcagctccacagattgcatattcgtaacttactttgtggccaaacttctcgcaaacggcactcatcacatctacaccttgcacagagatctccggtccgatgccgtcgcctgctaatacagcaattttaaaatccataatcgtttattcttctatttatatattcttataaaaaacattctttgggcaagttatctctcacttgctcttctcgtattcatcttcgatgaggttcaacatcttcatagtagctttgatggcagcttccgtctgatcggcatcaagtccgcgggtacggaacacctgctcgtcataactccatgtgattactgtctgcacaaatgcatccgtacgcccaccgggagggattgtcactgcataattggtcagcatcgggaatttgcgtcccaatgtcaccttatatatcttacgcaatgcacgaacaaaagcatcatactggccatcaccgcctgaactctcttcgtactcttttccattgatttctatcttcaacgtagccatcggtttcaatccatgagccagattcacaaaatagctcttcagtttgaccttctcaccaatcgctccatgcttcaacacatcagaaacgatgtacggcaaatcttcctgtgtcaccaattctttcttgtcgcccagttcgatgatacgctccgtcaccttgcgcatagcatcttcatccagctccagtccgaggtcttcgagatttttgcggatattggctttgccacttgttttgcccaacgcatattcacgtttacggccaaagcgctcgggaagcaaatcattacagtaaagattatttttgttatcgccgtcggcatgcacacctgccacttgcgtaaagacattctcacctacaatcggtttgttggcaggtatcataatacccgaataagactccactacccggctgacatcattcaaacggctctcgtcgatattggtcgccgcattgaaatgatctttcaggatggcttgtacacttgcgaggggagcatttcctgcccgttcgcccaatccgttgatggtagtatgcagtccttttacaccgcttaatacagctgcaagcacattgctcactgccaaatcatagtcattgtgcgcatggaaatcgagatgagtattcggataacgtttcttcatcttccgcatatactctatcacttgcaagggattcaagatacccagcgtgtcaggcaacatataacgcttgacactcgtctcttgcaatccatccatcaactggaatacatattcaggagaatctttgataccgttactccaatcttccagataaacattgacggttatatcctgttcgtcggcataatgcaccacattaatgatatctgccagatgttcttccggtgtctttttcagttgttgcgtacaatgcttcagtgaacctttacaaaggaggttaatcacacggcaaccggtacgctgaatccaatcgacagaagtatgcccgtcaacaaagccgagcacttccactttatggagcagattgcgacgggccgcccagtcgcaaatcatcttcacggcttcaaactcaccgtccgacacacgcgccgaagcaacctccacccggtctacctttaaatcttctaacagcaaacgggcgatcattagtttctcatgaggcacgaaagatactccgctggtttgttcaccatcacggagcgttgtgtccatgatttctattttcacgccttcttttcccattcttctattttatctttattgcttaacaagaaatcgatatcgtccaatccgttcatcaaacaaagtttcttgtaagcattgatttcaaaatgttcacttttacctgtcgccttgttggtgatggtctgttcgggaagattcacttccacttccatcttcgggtctgcttctatcgaatcgaacaattcttgcagaaactcctcggttacaaccaccggaagcacaaagttgttcaactcattattcttatgaatatcggcaaaaaaactggataccaccacacggaaaccatagccggcaattgcccaggctgcgtgttcacggctggaacccgaaccgaagttcttacctgccaccaatatctgtccgctgtaagtaggattgttcaacacaaaatccttgttcaaagaaccgtctgcattgtaacgccagtcacgaaaaaggttatcaccgaagaatttttcttcacgagtggttgctttcaagaaacgtgccggaataatctggtcggtatctacgttttctaaaggaagaggtacacaagtacttgtgattatattaaattttgtcttagccatctttttatttacgatttaacgatttactatttacgattgaaattacatcagttctctcggatcggtaatcacacctgtcaccgcagcagcagcagccaccagcggactagccaacaaagtgcgtgctccaggtccctgacgtccttcgaagttacggttgctggtagataccgaatatttcccggcaggaatcttatcatcgttcattgccagacaagcagaacatcccggctgacgaatagcaaatccggcttccgtcaaaatcttgtcgattccttccttacggatctgtgcgtctaccatccatgaacccggaaccagccatgcaattacattttccgctttcttgcgacctttcacgatggaagcaaatgcacggaaatcttcgatacgaccgtttgtacaagcaccgaggaatacataatcaatctttttgcccaacaaagattctcccggttggaatcccatgtagtccattgatttcttgaatgaaacctgtgcagcttcgctcattccttccatcgtaggaatgtgttgtgtgatgcccatacccatacccggattcgttccgtaagtaatcatcggctcaatatcagcagcttcaaaacggacttccttgtcgaatacggcatcgtcatcactcttcaatgtcttccaatatgccaaagccttgtcccatgcttcaccttgcggagcactttcacgtcccttgatatattcaaaagtcacttcgtccggagcaaccataccaccacgtgcacccatttcgatagaaaggttacagagggtaagacgtccctccattgtcagattgcggatagccgaacctgcatattctacgaagtaaccggtagcaccgctggtagtcatcttggacatcatatacagagctacatcttttgcagtcacccctttgcccagttcgccgtctacggtgatacgcattgttttcggtcttgactgaagaatacattgcgaagccaataccatttccacttcacttgttccgataccgaaagcgattgctcccatcgcaccatgagtagaagtgtgagagtcaccgcagacaatcgtcattcccggcaaagtcaaaccacgttcgggacctaccacatggataattccattcttcggatgcatcataccgtagtgtgtcaaaccaaaatccttcgcattcttagtcaatgtgtcgacctgcgttttagaaatcggatcttcaatctccttatcctgatcgtgtgtcggtgtgttatggtcgggcatacaaaataccttttccggacgcaacactccgattccacgttcacgcaatccggcaaaagcttgcggactagtcacttcatgacaatataagcgatcaatataaagctgtgtaggaccatcttccacagtagtcaccacgtgggcatcccatatcttatcaaataatgtattcatctgtttatttactattttactaattactatttactattttagtcaatctctacaatgccgatacgactgtcagtctcttttttatgatttgaatttattaatacagtcaatataagcttctacggaagcggcaataatatctgtattagctccaaaaccataataaatctggttatcgtattctacctgcatgtgtactttacctacatcatcacttcccttgctgatagcctgaatagtaaactctttcaaagtcatgtggcgttctacaatcttcttcaatgccttgatagctgcatctaccggaccgttaccgctggcacaagcctcaaacttctcaccggcaatgttcaatcccaaactagctaccgaacgaacgccgacaccactcgtcacctgcaaataatccagtttgatgcgatgattctggctacggtctgcacctgccaatactaaaatatcgtcatcattaatatctttcttcttatcagccaacttcaagaactcatcatataccttatccagcttttcctgctccaggtcaactcccaaaatagaaagacgatttttcaatgcggcacgtccgctacgggctgtcaatacgatagagttatcatcaatacccacatcatgcggatcaataatctcatacgtctgtacattcttcaacacaccgtcctgatggatacctgaagaatgtgcgaaagcattacgtccaacgatcgctttattcggctgtaccggcatattcatcaggctggataccatgcgactggtcggataaatcttctgtgtattgatattggtctgaatatctatttcgtggtgactcttgataatcatggcgatttcttcgagggcagtatttcctgcacgctcgccgataccgttgatggtaacttccacctgacgcgcgccgttcaaaacaccggctatcgtattggcagtagccatacccaagtcgttgtgacagtgagtagaaagtatcgcattatcgatgccgtctacatggtcgatcaggtattttatcttagcaccatattctgaaggcaagcaataacccgttgtatcaggaatattcactacggtagctcctgctttgataacagcttccaccacacgtgccagatattcgttatccgtacggccagcgtcttctgcataaaactctacatcgtccacaaaacggcgggcgtatttcacggcagctaccgcacgttcgataatctcctcacgattcgaattgaatttatatttaatgtgcgaatcagaagtaccgataccggtatgaatacgtttatgtttagcaaatttcagtgcatctacagcaacatcaatatctttttgaactgcacgtgtcaaagcacagatagtaggccaagtcaccgcttttgaaatctcaatcactgaattaaaatctcccgggctcgaaatggggaatccggcttcaatcacgtctactcccagcgcttccaatgcctttgctacctgaatcttctctactgtattcaactggcatcccggaacctgttcaccatctctaagagtggtatcaaaaataaataacctattgtccatattcaatgtatattatataattattagcattaaaaaaagcctttcacacttggaagtgagaaaggctttcgtatattttcatttatacacatttacgcgcagcactcacttccactaacctttgatagtagaataataataccgcatagtagaatatgtataaacatctggttcatttcttgtctcttttatagtttgacggtgcaaaggtatggattatttcttttccaccaaataatacgttacttttttatcgaaaaaaatatcatttcataagttaaagccgatttttaccaaaaatatatcacgaatacaggtctatatttcattaaaagaaaagagggagcagaatgtttttcagcattctctccctcttcttctttattgttctaaatcaatagattacttcttatcgcaacattctttcttttctgcgcaatcagcttttttgtcgcaagcagtagcacaagaatctttagcctggcagcaagaatcagattcaacaacagcttctacagtttctacggttgtttcttcaccttcagaagcagcgttagtagttttgttaccagcacaagacatcattgcaaaagaaaatgttactgctacagcagccaaaaataatttcgttttcatacctttcaaatttgctttaaacgtttaataaaataattgtcggtcgcaaatataacactttttttgcaaagtaccaaacaacagaaagccccttgattcgctgttgaatcaaggggcttctctaaaaacggcggctacctactctcccactgttacgcagtaccatcggcgtgac

SEQ ID NO: 8191 - DNA, 76051 bp, Unknown
  gut microbiota DNA sequence
tatatgtttaaagttagaattgatcgtatcaatcacttcttgtgaacggccgttgattaacaacttatacattgactgcgcaaagcccaccatttgcccgaattcaattttaggaggcatggctagtgcgttcggatcggtcatgatattaacaagtaccggaccatccagttcgaatgcattcaataaggtagtcaacacttcttccggatcgctgacattaaacccggtcattcccattgcttcggccacttgggcgaagtcaggattcaacatattcgtttgccagtccggcaatccgtctacttccatttccaacttcaccattcccaatgaacggttgttgaatacgatgattttaatcggcaacttatattgtacaacggtttccaagtctcctaaagtcatcgataatccgccatctccgcaaagcgcaaccacctgacgatccggataagccaacgcggcaccgatagcttgcggcaacgcatttgccatcgaaccatgattgaaagaacccagcatgtggcgtttgcccgttgcttgcagataacgtgctccccatacacaagtcattcccgtatctaccgtaaacacagcatcgtccgaacttagtttgtctatttcagacatcacatattcgggatgaatcttatttacgccccctttatcttctgtgtaagcggccaaatccttctttactccctcgtatcttttgagttgtttcagtaagaaagaatcatccgttttcggattcagcatgcgcaataaagactggatgctaagtttgacgtctccacaaagtccgatatccacctttgcacgacgtcccagacgttcgggctttatatcaatctgggctatcttgatgtcatccggcaggaaagcagaatatggaaagtcagtgccgagcatgagaagcacttcagcttcatgcatactgtaatatcccgaaggcattcccaacaatcccgtcatacccacttcatacggattctcatattgcacctccatctttcctttgaaagtatataccaccggagcattcagcttctcggaaagcgcgattacttcctcgtgagctccccggcaaccgatgccgcagaaaagagtgatacgcgtatgtttgtttagcaagtcggccaattgagccaaatcttcttccgacgggcaaacttccggtggggcaggatagttccggactgacgagtcgacagcaacggcagaagcctttgccaagtctcccggtagcccgatgacggacacccctttacgggtgacagccgtttgtatggccgattggagcatacgtggaaattgcctggtagtagtggctacttcattataataactgcaatcgttaaaaagtttgattgtattcgtctcctgaaaatattccgtaccgaattctccggtaggaatcgtagaagcgatggcgattaccggtgccccggaacggtgcgcgtcatacaaaccgttgataagatgaacgtgtcccggtccgctacttcccgcgcagcatcccggacggccggtcagttgtgcttctgcagcagcggcatacgctcctgtttcttcatggcgcacatgtatccattttatttgatcgttttttctgactgcttcgtttacctcattcagactgtcgcctgttacggcgtaaatgcgttcaactccggatttaaccaaagtatctatcagttgttctgctattttttttgccatagctgtaattggtttaggattgatttttatgtaataacagatgtctgcaaggaaaagttctaatttaacatatgctaataacgcctttgtgtcgggacacatcaccgcttttatgttaaaaataattctgtaacaactttttagtaaagacgtataaacaaatgcaatatccttttgttatctttataggcgaaatcttaacctaatgtattaaacctcttaattactctagaaaaatgaatagaaatgaaatcggtgtaaatgccggtaaggtttggcaactgcttagcaataacgaaaagtggagctacggacttctgaagagaaaatccgggttgaaagataaagagctgggtgccgctttagggtggttgtcaagagagaacaagattgagttcgatcagtgtgatgaagaactctatgtatatctctgtgtgaatgtttatattggctaaaagaatttggcactttaacgaaaacagcagaatctccggagggatgacagcccgatcagtccttcggagattctcgttttttatcctttttccttttaatgtatcttcctttcaattgatttccggaaataattctgttactttgcaccacgaattaaaatgcaagaaacaatgagaagttttgcctctgacaataattccggtgtgcatccgttggtaatggaagccttgaaccgggccaatatagaccattctttaggatatggcgatgacaaatggacagaagaagccgtagcgaagattaaagaaaccttcaccccgaactgtgtccctttgtttgtattcaacggaacaggcagcaatgtggtagcattgcaactgatgacccgcccgtatcattctatcttttgtgcggaaactgctcatatctatgtcgatgagtgtggctctcctgtgaaaatgacaggttgtcagattcgcccgattgctactcctgacggtaaacttaccccggaattgatgcaaccttacctgcacggtttcggcgaccaacaccattcgcaacctagagctctctacatctcccaatgtacggaacttggcaccatctacactcccgaagagttgaaacgcctgactgactttgcccatctgaatggtatgtatgtacacatggacggagccagaatagccaatgcctgtgccgccctgaatctttcccttaaagaactgacggtggattgcggagtcgatattcttagtttcggcggaacgaagaacggactgatgatgggagagtgcgtgattgtatttaataaagacctgcaaccggaagcccgtttcatccgtaagcaatccgcccagctcgcttcgaagatgcgttacctctcttgccagtttacggcatacctcactgacgacctttggctgaagaatgccagccacgccaatgcgatggctgccaaacttcgtgtggaattagagaaactgcccgaagtcacttttactcaaaaagccgagagcaaccaactattcctcatcctgccccgcccggttatcgaccggatgctggagtcttatttcttttatttctggaacgaagagaaggatgaaatccgcttggtaacttcttttgatacaacagaagaagatgtggacgagtttataggacttttgaaacgttaaaaaggaaattcaggacaacaaaagcctctgaaactctgttgtaataagaagtttgaaactaactttgtccgcaaagttttctacttcttatgattatgaatactagacagaacaggctaatcatattcgcgcttttgttgttgacacaaaccccgttgggcgcacagctgcattctactaaaattgaactgccggaggattctgtatctgtaaccatggaagattctgttccggcaaagcgcagcttctttaaaaagtttcttgattacttcaatgacgccaataaggaaaaaaagaataaaaagtttgatttcagtgtgataggcggtccccactattccagtgacaccaagttcgggctcggactggtggcagccggactatatcgcaccgatcggaacgattcgcttcttcctccctccaatgtctctctttacggagatgtgtcgacggtcggcttctatctgttgggaatccgtgggaaccatctgtttccgcaagacaaataccgcttgaattacaatctctatttctattctttccccagcctgtattggggacggggatatgacaatggagccaactctgataatgaaagcgactataaacgttttcaagcacaggtgaaagtcgattttatgttccggctggcaaagaacttctacatcggcccgatggccatattcgattatatcgacgggcggaactttgataaaccggaactatgggaagggatggcggcacggaccaccaataccagcctgggactttctctcctttacgattcacgtgatttcctgacaaatgcatctcacggctattacttgcggatagaccagcgattcagcccggcttttctcggcaataaatatgcgtttagcagcaccgaactgactaccagctattatcagcccgtatggaaaggcggagtgctggcaggacaattccacacattgcttacctatggcgataccccgtggggattgatggcaacgttgggaagctcttactccatgcgcggatattacgaaggacgctatcgggacaaaggagcaatggatgcgcaaatagaactccggcaacacgtctggaaacggaatggagtggctgtatgggcaggagcgggaacgatttttccacgactctccgagtttactccgaagcatattctgcctaattatggtttcggttatcgttgggagtttaagaagagagtaaatgtacgtttggatttagggtttggcaaacaccagaccggatttatttttaatatcaatgaagctttttaagaatataaagaattggttggagaatcaggaacatttgttttatctgttcctcttcatcttgatagtacccaaccttgtgctctgtttgacagagcctttaccgttgatggcaaaggtgtgtaatgtgcttttgcctttcggctgctattatctgttgatgactttgtcgagaaactgtggcaagatgctttggattttattcctgttcctgtttttcggagcctttcagattgtattgctttatttgttcggccagtccattatcgctgtcgatatgtttctgaacctggtgactaccaattcgagtgaagccctcgaattgcttgataatctcacacctgccattattgctgtcatcatactctacgtacctgccctgatattagggaccatttcaattgtacgtaagcggaaactcacggcagaatttatacgcagagaacggaagagagcctccatagtctttgggatttccctccttagccttgtcggagcatatatgcaggacccgggatatgagttgaagtccgatttatatccgctgaacgtgtgttataacgtaggtcttgccttccaacgaaccgccttggcgcagaattatcaccgtacttcgaaggactttactttccatgccctgcctacgcatccgaaagagaaacgggaagtatacgtaatggtcgtaggagaaacctcccgtgccctgaactggcaactgtatggttacgaacgtgaaacaaacccgctcttatcccggcaatcgggtctgattgctttcccgaaagtactgacagagtcgaatacgacacataaaagtgtccccatgttgatgtcggacgctaccgcttgcaactacgactctatctatcatcagaaaggaatcatcaccgctttcaaagaggcaggtttccggacagcctttttctccaaccaacgttacaaccattcgtttatcgatttcttcggaatggaagccgatacgtacgattttataaaagaagattctgtcagttcctcctacaatccttctgacgacgaacttctgaaattggtggagcaggaactggctaaaggtgcgacgaaacaatttatcgtgctccacacttacggttctcactttaactaccgcgaacgttacccgtcggaaagtgctttctttacgcccgattatccgatggaagcagaaagaaaataccgggataacctggtcaatgcctatgacaactccatccgttatacggacggtttcttgtcacgccttatccacatgttggaaaaacagcagatagatgccgccatgctctacacttccgatcatggtgaggatattttcgacgattcccgccatctgttcctccacgcttctcccgtaccttcttattatcaacttcacgtgccgttcctcatctggatgtccgacaactaccttgaaacctatcccgaacattggaaaaatgctgtggataataaggataagaatatttcttccagcagctctttcttcccgaccatgttgtctttagccggaatagaaactccttaccgggatgattcgcaatctgtaacggctccgcactacgtcctaaaaccgagagtttatctgaacgatcacaacgaaccccgtccgctggatgatttgggtatgaagaagcaagacttccggatgctggaaaagaggaatatcaagtattaagtattaggtattaatccttgttaaatcttgcatccaaaagtgggattggcgtgttatttgccgtatgatgtatgaacgattaaattcataaaacatggcctatatagattattacaagattcttggagtagacaaaagtgcttcgcagaatgatatcaaaaaggcttttcgtaagttggcccgaaagtatcatcctgacttgaatcctaatgacccgagtgcaaaggataagtttcaggaaatcaatgaagccaatgaagtactaagtgatccagagaaacgtaaaaagtatgatgagtacggagaacattggaaacatgccgatgaattcgaagcgcagaaacgtgcacagcaacaagccggaggctatggcggtgcgggaggtttcggcggattcggtggtgcgggtcagggtttctccgacggtaacggaacctattggtatagttccgatggagaaggattttccggtggcaacgctagtggattttccgatttcttcgaatccatgttcggacatcggggaggaagaggacaaggctctgcgggattccgcggacaggactttaatgccgaacttcatctttcccttcgtgatgctgctcaaacgcataagcagatattgactgtaaatggtaaacaagtgcgtatcaccatccctgccggtgtagccgacggacaggtaatcaaactgaaaggctacggagccgaaggtgtcaacggaggacctgcgggcgacttgtacattacgttcgtgatagccgaagacccggtgttcaaacgcctgggcgacgacctgtacgtagatgtggaagtagacctttactctgctgtattgggaggtgagaaagtgatcgacacgctggacggtaaagtgaaactgaagataaaaccggaaacgcagaacggtacgaaagtccgactgaaaggtaaaggattcccggtttataagaaggaaggacaattcggtgacttgattgtgacctattccgtcaagattcctacgaacttgaccgacaaacagaaagagttgttccgtcaattacagagtatgaactaaaatgaatgagcactatgcagaccgaattaattattgtcagtgaatactgtcacaaatgtcatattgagccttcattcatcgacttgttggaagagggcggtttgattaacgtacataccgaaggcggcgaacattatctgcttttgtcggaactcccgaacgtggagcgttacagcagaatgtactacgacttatccatcaacatggaaggtatcgatgccattcatcatttactggaaaagatggaagatatgagacgcgaaatgagttcgcttcgcaaacaacttctgctgtaccgggaacgggaaatagaagatatggactggtaaaaaaatagagcctctgtttgacctgaacagaggctctatttatagtaaacagaggctctgattcactcaatcagagcctctgttttttcaggacgtttgcatggttgtcaacttatccaatatacgtacaaatctcttccagatagcgtgcgtcgatggtgtcgaaactatctagttcatcactgtcaatatccagcactccaatgacttcactctgttggaggatcggtactactatttccgatttcgagtccgaactacaagcaatgtgtccgggaaactgttctacgtcaggaacaatcagtgtccgggcctctttccaagctgtgccgcaaactcctctgccgaggcggatgcgggtgcaggcaatgggaccctgaaacggacccagtacgagttcatcctctttcacaaggtaaaagcctacccaaaagaaaccgaaagtctgtttgagcgctgctgcaacgttggcaagattggctatgagatccgtttccgtacttactaaagcgtgcagttgcggaagtaactcccggtatttctcttccttatttcctgtgccgatgattaaattctctgccatctcttttctatttaatttggttcaggatgctcgggtcttttatcttatcgtcttctgcaaagaagataatcttagtcagtatctcggctgtcttcggatcttcatctacaaaaggcaggaacaggcgtccgcgattttgcgaatgtaccggaagaacggcaatttgcgcgccgccttcctgatggattacgccgctgcccagatggatattgtacttacccagtttgccttcgatgtgagcgaaacttccttttatcgtcacgttcttgaaatggaacaacggcattgtcagttccactaacatgctgcgcatctcgatggtagagtggctggtttccggatcgacgcttccggcatgggctatacttactgccaagtctacgtccctcatcacttccgagaagatgacaggaggaatctccgagattttcatcagcttgtagtccttgcggttgtggaagcagacatattctaacgtcggagcttcgatgtcggcaggagagaaccagtctgccatcgcatagatggtggcgatgatgttctctttgtaatagatcttttggagaccgtcttcgtagtcggctacccagcgacggcctttcagtacggcaaccgttttctgcggttggatctgattgccggcgtaacggcgggattgagtggcttccacttcttctggagtcggaacatagagctcacggaacacctgtttgaaaggctggcggattgctttatcgaacaggaatttctgataagcatgccagtcaccgcttgcgtacaagtctgtgggatgggcgatgcgtaactcgtctttcggttttaacggtaggcaaacggcattcacagtcaccagcaatccgtcggtgtagaagcccgtctgtccgttacagataaagacaagatgtctcaacaatggccagatgacagggttctgcatcaacttgcgcaattcgttttcttcaaaacgggtacagtcttccatcgcctgttccagcatcacgcgggagcgggtgtactggtctttcagctttttgtgtaccgctttcagttcttctatatacggatgctttttcagtttggcaggcatactgttgagctctttgccgtctttgatttgtttaatctccgatttgccttcctcgttgatttgcacgtacacttctacaccgtctatctctttgggagacaggtaggggagaagttctttgattagttccgtttccatgctccaggtcagacgggtaacgtctccgtaaccggagttgcgtgccaggttttgcagggcgatgtttaccgctttcttttcgctttcctgcctttgagcaccgaattccttactctctttcaggaacttttgcaggtattgataacgatccagcagttctttgtccggtttccgtcccaatgggatgaggccgtagctcatcaataagtctttgttgcgtttggcaactatttctttctttacatctgccgctttcaccgcgccgttggtggcatcggcaaacttgcgggcacgggtatggctattgctgcatgagatatatttggcggcattgtagaccacttcgaagcgtcgtttgccaattgtcttaaatgcatccctgaaccagtcgatatcaaaagcaccttcccgcaagtcttccacgtcgataggggtgtagcgggcgatgattgcttttttcttgtcgtcacatgtttcattggtatgggcgtggaaataataggcggcacttgtcagtcctttccagcctattgccttttcggtcagttcaatccattgcggagcgaacatggcggcttctaccagtcgttcgtcactgatttcggcttgcttcgccagtttcttcagattttcgctggtatctgtcggtaggggatggcaagcatggagcaagctactcaatacacctcgtttggtactgccccagttgtagctgtcgcgtatgaacgtatctttgccgaatgcttgcagaatgtggataaatgtgtccgctccataaatataacttaattcctctgcaaggttggtgacttgtgtctcggagtctccccgtttcagttcgatttcaagaatccggtctactatcttctgtgcaagagaacggaagagagagaaatcgacgtttttgatgtcggcgtatctttctttttccttattgaaacgaacgttgtcgttcaataccgtggtaattgccttgatctgggcgggcgagctgatgcgtcccatcatttcgcggtatacttcttctgtcgggatgattccgagcatccatgcacgggcgaagtccgtggcatgaaggtaagaatctgtttcttccagttcgggggtgtgttccatgtagttggtgagcttgtaaagttgatagcgcaccgtgaagtagcggataaacagatcatcactcatgggcttttgaggcatttcaagccagaaattcacgaacttgttgttgtgtatcgggtaaacgatctccttttctccatattccagtttgtcccgaagccatgcatgcttgttggtgtactggcggaaaatgtttttagtattcagcaaaggcaacagttggagcagcatattgacagccaatcgttggtagactgcttcgtctttatactcgtatgacaatgcttcgataatatcactcatctgttcgtagtacggcatcttgcggagttccttctgcaatccgcggtaagtgatgccggcatacatccggttaacaagcggctcgaaagtgttgcttgatttttggtctgccttgatgtcttcttcatcctcttcatcgtagtcgtcatcgtcttttggggcacctgtcgatgcaagcatgaaactcatcatcagtaatttgtcatagcttccgatttcttcttcgtagaaggccttccacagttccgggaaaccgagtccgctcaatcctccgtagttactccagtttatcaggacactgttgcctaccaggcgtgcttctccgtacccattcttgaactcttcattcttatagatttcgatgtatttgcttagttttttaaatacaagtttagcccttccgaaacaaatgaattcgaatgcttttttcacgttgaatcctttatcctgggtaatctccggcagattgacttcaagagccgggtcgtacagaccgaagccgttatctttggtatagtgctgtgcggtgttcttttccgttccgtcgccgatcagagattctatcaacactttttctttcgcgttcggtttctgaatttctttgacggcagggattagttcctgataggtatcttgcaggaattctatattgtgaatagtcttcatcatatccaatccggccaggcggcgttcagcaaccttgtctgttagtaagcggcggatactgccggacaattgttctttcggctgtttcatcaatagattgatggcgttgatacgcatctcactatatttgaagcgcagcaactcttctactttctgattctgttcgggcgacaaggtcatctcggacaagactttgtaggcttcgtcacgaacgtcctgcgaacggtcgcccagtgattgcagcacatattcttcctgtaaatggctggtcgggggatttaatacgacaccgatatagcctgcccgcatataggtatccaaagaaggcagagaggtgcaaagatcgtctttcaatgcagagtcgttggtcatccaggtgatatacgccatcttgagaacgatttccgaacgggtgagctctgcactttcccaggggaatacgtatggagaataaatctctttggcagagatggactgatagacgttcttcagatagtcataatgacggatcgcttcttctttgctatcaaaataatcatggagtgacggggcgtccttatgtcctccgtaccggctaagatagagcccggatagatacaacggtaggatagccgccaccaccgacggttcgttataccatttttcaaaagcatctttactgatacggtggttcatgccggagtattgcgtacagcgtaaaaagtaaagtaaggtctgcacctgatatttggcaccgtctttaattattcccggaacgagtgcctggatttcttccgtattatagaatccgatactccatagagccagataaagttcgaccgtatctttgctttggagggctttgcgtgcttcttcccggtcgttcagaaaacggcggatcagttccacatatttgttggtgatacgctcgctgctgtcttgttctccgatacccgtacagactgcaatgccgcgtttcacggaggcaaatcgttgcaggccgttgtcgcagatcaccgagaaaagatggagataactttcggggcatccttcgtccatcgtttccacgatagcttgacggagaccttcctgcagtttggctgccagcagtaacttcccttccagttccagcaacgggcggtaaccgcttacggcgatagcctggagatgtccctggttgaggcggttggcattattctcgctggtcaatacgttgttgaggtattcaatgacagtttggttgccttctgctatttgggcggccatccagttttggcagtttatcgcatccttgtatgtctctatttcttccggagtgtttcctccgttcagtatggcttgttcgctgaatccggtggcacgtagttttagaaattccgtcagcgcatctatgatgtgactgaaatgcagaaggggattcgccgaccgctgtgaccggcgcgaatatccatgagtgtacggacaccgtgctttgagcttcagataggtgtggaacaggttagcatattcgtctcccaatagataacggagcactttgttcaactttccgtcgaaaagattggcaacactctttatcttctcttcctgaataatatgtatgatgcaaggctctagtttatcgctgtatgtgccataccgggtatccatgttgaagtattgcataaatacatccaacagtgtcattgtctctttgtctaaactggttctctttttcgttaacctttccaggtacggagcaatccgtttgtttaatgcgtcattataaatgagtctcatgattattttcgttttaagtgtgtttataagaaaatgattaccaaagtcttcccgacagcatagccaatcggatgaaggtgatggtagattcttctttgagtccggtgggagaggataagtcttcagtttccgtatcgtcaatgaagatacggaaaattccgtcctcgtaagattgcagggcattggtgattgcttcgacttctgcggcaggtttgccgttatagtttactgcaaacccaaccttgccggaagttgctttattttccacttcttcctgtgtgaggtatttcagtacttcgctttgttgcaagcgttcattatattcacagacttgccaactgacgatggcttcaatcaacccctgtacatcgacaggcggaacaggaaagtcgacaggaatcttttcgatattgcactttcgctttcctaactgtttgacttggacatatactctcatattctctttattgggtgatctgaatacttgatgtaatagcattcagatcggtttcggcttcttcgtcatagacaagcataacaatggtaaaagttcgcttcttgctttcttggaaatagtgtaatacaatttgttgtatgtcttctcccggttcatcaggagctccgatgtgcagagggtttgtagttcttgtcatggatagcccgttgatgttgacattgctctgcttatagtcttccgctggttctccttgtgcatttcgcgggagagtgagcgataacttctttatatgttcaaactctttttgtgtatcgtaggtcagagcggtaaccgtcagttggttggcgccgttgacgagcctaagcaacggaggttctgcgctgggagtcaatcctttcgctcctgttattttcctccagttggtaggatattggcaactgaaatttgtttctgcatcgtaataagaaagccatgtatcgttattacctaccggaacgtatggaggatattgactggtagaagaactgttggcagtttccctgcctgattggttaccgttttcgttttcttcttccagttcaccattcagataggcttctacaataccgctttcccattcgccgcgtatgtcctgataaagagggggaacgttcttgcaaagcatcaagaagctgaacaggaaaatgcaaaagataccaagctccccaaggattgaaacggtgcgttgtgcatcagctttttcaaatttatagctgcatacatagatgattcccaataggaaaccgcttaataacccgccaatatgtgcggcgttatcaatcccggctttcatgccataaaccaggttgtaaccgacaaaaataaggatactggtcaataatgctttccgttgttcctttgcgatgcgatggaagaacaggaaggcgaggaatataccgtagagtccgaagatggctccggaggctccggcactgattgtctcgccgtgcatataaagactgaataccgccgagcataatccggtcagtaaataagacatgaacatccgacggcttcctatcagtccttccagtagaagtcctacgtacatgaaagcgtacatattcattagtagatgaaaagcaccgatatgtatgaagttgcaggttactgcacgccaccagtcgcctgtaagggtcagcggtccgaagtcggctccccatttcagcagtgataaggtggaaggagacatgattcccactcccgatgcaatcatcacaataaatacaaggaggttgaggtctatcaggataggtgttgccataaaacctttgcggggaataaagaacgaccagaaagagttccttttcttttcttcttccagataggctttctcttcttctgtgagcggacggttacactcttcctcgaaatcttttgccttttgggttagctcttccggggtaagggatgtttttatttcttccatcgtctcgcgtagcttttgtatattttttctgttctttccatagtctacaaattgtacggaagaggattggctgcgcacagctacttctccgtcgcttcccggttctatggtgaaggttatttcctctccatgagaatacatattgaacgggacttcgaatcgtgctccttccggagtcacttcctcgatattccactccagcttttgcgaagcttcgagagccagtataaggatttctgtttttgataaacccggtaaatgcagtttgtcgttatatgaaggtttgagtgccatatttctattcttatatagagtcgtcgattaaaaattacttatctcactgacaaatgtatagaataataatgaaaaataatagaatgtgacaaataaaaaagcatccacttcctaagaagggatgcttttatgagatttgatagagtatttattactttttgtagaatgccaagtcttctttatcgaagttttcgatgaagtttgagtgcttttctacttccgcttctgcatagttcaaatatacatgtgcagatttggagaacagttcggaagccttgctggcatcttgaatcagcaggtgacacatgataatgtcagcagccatttccaccagtttgcgagcggtgaagtcaagcaattcctggtcttgtacttctttcactgcattggtgcttgcttcgaatttgtcagccatctttttcagacgagacatcagcggttccatttccggtgagcaaggaatggtttcgaactcgcggatggtagcgatgtacgaaccattggttacgtaacggatagcggctactgtctgcaactgggtagttccttcgtagatgctggtgatacgtgcgtcgcgatagatgcgttggcaagcatattccatcatgaaacctgaaccgccgtgaatctgaatacagtcgtaagcgttttggttcgcatattcagagttcatacctttagccagcggagtaaagctgtctgctaatttagcatatttcttctgttcctggcgttcttccggagtcagtttacgttcgcgggcgatgtcgtccaatgctttgtagatgtctacgtagcgagaggtttgatacagtaaagcacgtccggcatccagtttgcctttcatgatagccagcatgtcatacacagccgggaattcgataattgcttttccgaactgcttacggtctttagcgtatgccaaaccttcattgtaagctgcctggctcaatcctacagattgtgcggcaatacccagacgggcaccgttcatcagagccattacgtatttaatcaaaccgagtttgcggtcaccgcaaagttcagcttttgcattcttatataccaattcgcaggtaggagaaccgtggataccgagtttgttttcgatacgacgtacgttcacgccaccctgacgcttgtcatagatgaacatagacaaaccacggccgtctctcgttccttcttccgaacgtgccagtacgaggtgaatatccgcgtcaccatttgtgatgaaacgtttcacaccgttcagtaaccagcatccgtctttttcgctgtaagtagctttcagcataacagattgaaggtcggaaccagcatccggttctgtcaagtccattgacatggtttcaccttggcagatgcgtgggataaagcggctgtgttggtcgggattgccaaactcataaagagtttcgatacagtcttgcaatgaccagatgtttccgaaacctgcgtcggcagcagccacgatttctgcacacatggtgtacggggtgatcgggaagttcagaccgccgaacttacgtggcatggtcataccgttcaagccggcttttaccattgcgtccaggttctgtttggttcctgatgcatattctacgcgaccattggcacagtgaggaccttcttcgtctacaccttctgcgttaggggcaatgatttctcctgtgatttctccggtaatctccaacactttgtcataagagtctacagcatcttcgaagtccagcggagcatagtcgaattcatctttatctctgtaattgcgttctttgagttcgcaaatacgtttcatcatcggattgttcaagtgaaacttgagttccggtatgtctgtataataattagccatctttccttacttgctattttgtttataatacttaatcatcttcggcacaacttcttcgatagttccgttgattacgtaatcggcaatcgtgttgatcggagcatccgggtcgttgttgatggagatgatgataccactttcctgcataccggcgatatgctgaatctgtccggagataccgcaagcgatgtagagtttcggacgaaccgttacacctgtctgaccgatttggcggtcgtgatctgcaaaacctgcgtcaacagcagcacggctggcacctacttctgcgtgaagttctttagcaaggtcgaacaacaggtcgaagttttctttcgaacctacaccgtatccgccggctatgatgatcggagagcctttcaggttgttctttgctttttctacgtggcgttcgattactttcactacatagtccgtatcggctacgtatttttttacatcgtgacggatcacttctccctgatagttcggagagaggatttctttcttcatcacaccttcgcgaacggttgccatctgcgggcggtgttccgggttcacaatcgtagcaacgatgttaccgccgaaagccggacggatctgatacaaaaggttcttgtaagtcttgccttctttcttgtcttcgtggtcaccgatttcaagtgaagtacagtcggcagtcaatccgctggtcaaagcagaagaaacgcgcggaccgaggtcacgaccgattacagtagcacccatcagacagatttgtggctgctcttctttgaaaaggttcaccaggatagctgtgtgaggaagtgaagtataagggtaaagtccttcgccgtcgaaaacgtgaagtttgtctactccgtaaggaaggatttgtttttcaatatctttgaggccggttccggcaaccactgcttcgagctgacagttcaactggttggctaacgaacgacctttggtcagaagttcgaggctaacgtctaaaacgttaccttcttctatttcgcaatatacaaataagttattcatgattatccgatggtgtggttagctaatagttcaacaatcaggtcttccacgtcacggtcgctgccgctgatggttttgctctctttagcctggaacacgatgttctggatggctttcacttttgtcggcgaaccggacagaccgcattgtgcgaggtcaccgtttatgtcggctacgctccattctgccagattcagataatcgcgcttgtcgtacaggtctgtatagtcaagattgccttgctgtttttcagtcacagtcttggcatgcttgtatttctgaaccaatttagcgttacgcggacggcaaggagctgcagaaccgttgacagtaatcacgataggcagcgggccttctacagtttcaacaccaccgtcgatgtgacgtttcaccttaatcttaccatcgcctacttccagaatttcttctgcgtatgtgatttgcgtcaatcccagcttttctgctacctgcggacctacctgtgccgtgtcaccgtcgattgcctgacggccaccgataataatgtcatactcaccgattttgcggatggcagtggcaagtgcgtaagacgtagccagtgtgtctgcaccagcgaaagcacggtcagttaataagtaaccgttatctgcaccacggaaaagtccttcacgaataatgtcggctgcccgtcccggtcccattgtcagaacggttacggtagagcctggatgagcatctttcaatcggagagcttgctcgagagcattcaggtcttcggggttgaagatggcggggagtgccgcacggttaatcgttccgtcggctttcatggcatctttcccaacgttacgtgtgtcgggaacttgttttgccaatacaacaattttcaaactcatgctataaattttagtattagtatttctacaagttagcagccagtagtcaagtagtaatctcttgctatccaaactatccggttaactatcagcgtgcaaatttactcaaacgcttggttctgacaagaaatccgagtaaaaaatgcacaggtttaagaattttgagcaaaataggagggtttttatagggttcttaaaatggcggaatagaaatggaagttacaaatataacatccttttattccttcagcagaacttcgatggcttcaataaagtcagttgctttaggcagcaattcgtctatttcttcctcacttgaataggcaaaatcatcataatcactactatgccgacgttcgaaaagtaaggaaaaacaacgtcccaattcacgtgacatacgaccggtagcgacgaaatgcaatcctatcatctgtttgacacctgcatgggtaccaggatttatctcgtgtttaataagcagagcgactgctgcataataacaggcataataaagacggtttacagctgtattataatagccttgttgttttagatagggtatttctttcagcgtttctttagcacgtagaaaacggtaagctgacagtgcctcaatattttccctgtttaattgttctttcatagtacgatcccctctttcattacattcatagcaaaaggtgtctgaaaaggacggttttcccaaatctttttcagcaagacacgtgcatttatttgcactcccgtttctatttctatatcgtagagcggagtgatgatacggtcttcttctttgacggtcaatttattaccgtcaaccaatatcaataaatcaatatcgctatcaggacgggcatccccacgtgcctcactaccatataaaatagcttgcgcttccggtgccacctgtgttaaagccttccgtattcgttctacaatttgtggacgtttcatatttattgctttttatttacgaacaaagttatataaattattcgagaagccaagagatacagctatttattctctttaagtgttaaaatgacagttacttattttattgtataccgatttcggccagtcctattggctccccgtcatgtatcatccgtgttgctttcagttggacatagcgggcgttaaccggagtaaagtaaaccgattgcaaaatcggattgctctttatattggaaaattcatctttggctactagctggttgacagcattgctgtccgtacctacagatatttcgtaggccgcaattacccctttattatattcactttggtcggggagataatggaaggaggtaattgtgtgttcttctcccaaatcaattaataatgtatttccgttgatgaagcaggtggtctgattgtttttatccatacatttttgtgcttcctccgcatctactccaacgagcgtgaacggataactcttcaactcttctgcttttgcggtatatgtatcggaagtctctcctgcataataggcttctatgttattgatacagaggcaagctcgcgaatctgtaaaacggacacgaatcttatctgtggtgactgtctcgaaacgaagaaggcgtttatatccgatagtggtagtctcttcattcaattttaccggaagccattcgccttcctggttgtattctacaacgaatgatttgacacgttgccccagaggtatatattcttgtaacatcatacggttgatcttttccgtttgaggcaggtcaaactcgattgtggcagagttgacaccgttattggtagcccaataagtatcatactcaccatcggtcaccgcttttgcagagaatgttttttcccgttcgtccgatgctttgggagaaagtccggccaataggttgtgtgccagttgcttttgtacgttctggtggaagtttacggcgttggcagagtctgtcggatgaatcagtccgtcacgatcgaccggaaagttgagtaacaatgttgcgttatgacctacgctacggtaatacaggtcggtcaatgcatctgctgttttcacacggtcgtcttcttccggatgatagaaccatcccggacggatggatacgtcacattctgcggctacccattggttgccgtcggcatggccatattgcaattcacgatatttggggtaacccggataaacctctccggcacggagaaaagaccagttggtagctcctgcaaatccgttttcgttacctacccaacggcagcccggacctccatccgagaagataacagcctgtggctgcaactcgtcgatcaacttataggctcgcggataatcgtaataagttttgcggtcgatagtacggctgtcttttgctccgccataccagccgtctccgccattggcaccgtcaaaccagatttcaaaaacatcaccgtagttggttaataactcgttgagttgtttatagaagtattctacgtattcgggagaaccatagttggcttgatgcctgtcccagggagacagataaacagcgaatttaatgccgtacttcttgcaggcatccgatagttcgcgaacgatgtcgccttttccgtctttatacggggtgttacggatgcaatattctgtcagttgagtgggccacaggcagaatccgtcgtgatgtttggctgtcaggatcactcctttcatgccggatttcacaaaggtctgtacccattgctcgcaatccagtcgggtaggattgaatgttttaggatcggaatcaccgtatccccattcgcggtcgttgaatgtgttaagtccgaagtgtacgaaagcgtacgtttccattttttgccattctacctgcttggcttcgggaatgggcaggatagcttccggtgctttgaccgaattacaggcacttaatagaaggaggcctgctccgaaaataagaaagtgttttttcatgggggtaatttattagttaataattgagtgtaagaatcatctacaacgtaattccgaatacaaaataaagttgctcttcataggggttggctattagttttccgaatatgggcagagagaagctggacgttattttgatttctttcgttgcggataatccgatattgactacattgaatttgtcggagtacatactttcccaaggggtaaaaccagcttcgacactcatgtttacatctttcacgctgaacggataactcaattcgcaatagctggaccaggcacgttttccgttttcacggtagtcgtttccggcaaaggtggtgtaccagctgactgataatggaaatttctcactaagcatatacccggctcctacttcaaaagtatgtccggtggaatgtgaattgtaattgaagtatttgaaaggttcttcttctgtttgggtaaaatagttgttggcgtagagagtcaggtttttgtattcgtactccagtgacaagtctatctcattattcttttcgcgaaattcggtagaaccccatgcatagacggtcaggcctttccagttgaggccgagcgagggttgtacacttgcattgccgctgtccataccacgccagatgtagctacttacaaaatctgcggttacaaaaacttcttgtgcctgtgcaaaggctgtacataataagatagcaataagtaggatttgttttttcattttatcgactgttttttctcgttttcgcggggtaaagatacgcaatatatagataaatgatgacagatgcggaaaaaaagaaagcgactgcatcgtgcagccgcttctgaatcggttgtaaattctaaaagttatttagaaggtaatatccatcttaacaacaaacgtgcgtggagcggcaaccgccatcgggcggtagctgtattctttatttaacaagttgttgaccataaactgaaaagctacctctttggacgcttttactccaaggcgcatatccacagtggcgtagtccgtattatgttttttccaataagtagctaaagtctctcctttagaataaccgaaagcgatgtcgcgaacgtaatccatcaagtcgagttgtgctttcggacgttcatccatcatcaggtaatccactgcgaggattttactcttccaggcaacgttcgcacccagattgatacgtttccactggaaatctaccatcgctttaaaactgtgtttcggacgatacttcaggtactttccggtgttcgatttttctttcatttgaagaggatcggtataaagatcttccgcatcattgcgttccttataatccgcatcacggggttcggtgtatacataccctaaattatagaacaactttgtgttcttattgaagttataaacaccgtttgtcgatatttctactccgtagatttgtgctttcgatacgttatgaaactgtgctccgattccgaaaccttgaccaccggttatcatccggatggcatcactgatgctgttaatcatcgtatagtccgcattattgaatagtccgaactggaattcgaccatatccttatattgtgtatagaatcctgcaacatctacaaatccctggaaattgccaatcttatacccttgcttgaatcccaattccgcattaaaccctttttctggtttgatatccagattcgggtaaacgccgactcctccaatatccttgcgcaggtatttttcgttgatggacgggttacggtaaccttgtccgaagctggcacggataaaactgtaatcagccaactgatagttcaatccggcacggaacacggggcggaatggaactttagttccgaatatctttgtttctgcttcacgatggtgattgtttacacgatagtattcggcacgcacaccggcagatacgcttagacggtcccagaaacgttggtcgtactggaagaaagcagctatgttatcgcttttgtagacttcgtccatgatggccgaattataccgtacatgctcataagtggctccggtagtgatttgtgcgccactgtcccatttcttgttgaactgataatcgagataatagttagtgcttttatcagtctgcgtcttaggagtgtttcgtgaaggattgagtacgtcggacacccagggaatcaggtcaccaggcaattgtccgtttgtcagtcctcccaaatcactgggtagcccgttgtccatcacccaggaaatcagatcacaataatcggcagtcgtcgcgttagggaagatattgcctaatgaagtgaatactccattcatggcgtcttccagattaccattgattagtcctgaaccgattcccaccaatgccgggtagagcgaactgtaatcaccgcctgcaatattctgtatcgtttgggcatctgtccccatattgcccagaatatccatgatggatgctccctgggtaggacgtacgatattgtcggcactataatagaaacgtcccttgatcttatgtgacgtaccgttttccggattcacgtagttgacaaacgggtcgatatggaaattattatcttccctgcccatgttggtgaaaggagagggcttgtacacctctgtcggtgaacgccagataaaaaagtcaccatattgattagacaggaaatcgatattaaaaccatagttcaacagtttcattcccatgtccggttggtgataggttaggttacctcccatgcggaaacgtttgttatatccttgctggcggtatccttcatcggtgaaaagattgaggctgccactgacgtcgaaattaccgatacgacgggcgtgggagagatcgaatccttcgtaaatcggattacgcacaccactaagaagatttccgcgtagaattggtttgaccgaatatttatcttctttccagaaattcttgtcactccattggtattcgtcattctccgcatcaccatagataccgagatatgcgctgaaacgtgttttcggagctaaccccggacgtgcggtgcggatattgatgataccattcaaagccgatgaaccatataaaacagaagaggctcctttgattacttcaatctgctcgatattctccaaaggtacggtgttccagttgatttcgcctgtcttgggattcagggtactcataccatccaccagaatctgactacgtgcacctactccgtatgtccatccgctaccaccacgtatggaaggttgtttgtctacaatatccactcccggaagagtgcggagggtagacgatatatctgttggtgcctggcgggcaatgtcaccggctttcactacatccatggaaacagtgacattactcaatttctgttcaaagcgtccggcgctgaccacgacttcctccaatagtttggtgctttctttcatgtagacgtttttggtgattacctcacgcctgtcgattacgatcggcatcagtacatcttcgtagcctacataactgaatacgagatcgacacccccttcgggcagcttgatttcataagccccatggatgtcggacactactccctggttaccctgtaacttatacgcaacagctgctcccaacaatggctcattggtatttgcatcatatatatgtcctttcagcgtttgggcaaaactactcccaaggctggtgaagcatagtagcaaagttagaatatatattttcttcattgttttcttttttgatattcatagttgatgtttattcttgtggcagaagatccaatcctaagtcaatagtattggctgcattccataaaaccggcagaccgttttcgtcatttcccatgagaagtccgagcaggtttttaaatacagtattgttagccatgctttccggcaacattccttccactatcggttgcagtccgggcaataattgaatgaaagcagttgtcgactctttggttaagtaaagatgggtatgtccgtcttcctcttctatatgaaagataattccttcagtcagtaagtagaatacctgttggaagctcgccgtatccatactggttatgataccgagcaatggattgtcgatcatggagtttacgattccgagcaacagtttcagttgcacaggattggattgggcaagagcttccataattccggaaaccagtcctgaatcgataggagtttcaccgtccttggttgccagactgataattgccggtaagttcaggtttattttaagtttaccgttctcctctgtccaagtgattagattaataggtgaagcggtccatgtacggtctgttaatgcattattgatatctttttctgtcagtaagccgatcataaacttggtgacaaatgttgcgatggtaccgacatctttatccggatctatgttattgatcggtacgctgccgatgtagaccggactcgtcgtataattggctacaaggttaccgtcgggctgtagggtgattgtctgaagaagttgcggtatgaaatagcaaagtgcattttgaatcagtttcatccttaaaaacagtgtactgcccgctttggttagttccacgtcatccagatggacatagaatcctccggttaagatttcattcgtttctttccatatatactgccctccgctgtaggtgacagtcattttctttcctttagtgaaattggatatgccataacttttctcccatttactttgcggcattaccacgtccaggtccagtttcattgtttttggagtgatggcaccgctgtatgtcacggttgctcctcccatcgtgacgtttttgccgctaaatgtataagagtcttcctgttcgcacagactgattggaagaggagtttgtttctctcccgggataatatcattcagtgtcaaggttcctttttcactgtcttctgttttaaagtcgacagtttttccaacgagtttctccccgctgtaggtcaggttcaaggtagccggtttgatgtatgagccatactcctggcagagttcacccggccagaatagcttgtcattataggtttcctcgcaagatgtaaggaggaaagccgtacaagctacataaaaaagtctttttaaagttctcattctcttctaggttttatttcaacatatttattaaaacgatgcaaagtacggctaataggtgactgctgtcaagctccattcttgggattcaatattctatatttgctattttcttaaatacaatcctaataaagaagaaaataatgttctatttgtaggatataatatactatttttgaacttgttgcccggaatccggatgaaatggatatttttggtaaattaaaaaagaactgacgatgacaacgaacgaatcctttcctaaatttgaccttccggttgattttatagcagatgacagtatcaccggagatatcttaaactactatggtaatttcccctgcaaaataaaagccggtgtctttgtgctttgtacggaagggatggtcagagctaccattaatttgttggagattgtcattcgtaagaatgatttcatcgttgttcttcctaattcattcattcagatacacgaagtttcgtctgatacccgtatttcttttgccggtttctcgtccgattttatgctttcgggcaattatgtggaaatcctgctggactttatgcctatgatattgaacagtccggtcatttctctgcaagaggatgttgccggcttataccggaatgtatatcttttactgattcgtgcttatacactcccacattctacaatcgccaaatcaaaaaattcccaaccgaaaaacaaaatgtgtcattgaaacacatcttaacataaaacaaaatgtgattttgggtgcaaatttaaagcctgtttaattgagtttaaacaggctttaaatttaatcaatgatcatgtaaacggataaatcaggattagcaacaagcggaagaacatcttcgtcatcaagaacgctcattgcatatctatgaatactcttctttatcatttccaatgttggtttttctaagaatgtagaactggcaaacgttaccagttcgtttccttcactatcagttctaccgattgattgtattgcatatcgaattatccatgttccgtcggattgttgttcgataggcttagcagatttcaggggtaagatatttcttcgcattgccttttcttatttgtttttttagttgtttcttaaaattaaattcgctctttattacaaagacttcccaatgtccttcgacatatatatattgccaccattccggagcaataagtttccctattttgcgtcttagattgtacgtattgaaatgtctcatcaatccatagtaactgttcatcgtagccacgaaagtctcaatatgggcttcgcagaagccttcctttgcgatcttgttatacttgctgactgcatcatatatatttcccacgacacgatttgaaatatagattctaccggggagaataaatgcgccaacaaacaggacaccttttgaatagtgttgtatatatatctttttagggtgaagttctaggagtaactgttctttcaggtaatcgttgagcaaaggaacatacttcaggatgtcctctttaaaacgcatgacaaagccaaagtcatcgacaaagcgtacataatgcttaattccgcatatttcagacacataatagtcaaacactgatcctatgaaattagcgaatttttgggatggaagattaccaatggcgacaccgcgttccggatcgctataaaacaggcttttgtctttaggcagtttatcccacaagtataagggtgatttcctgtggcacttgttttgtggctggtgaaatatgacaacccgaatcaggtacaacaggcattcgatgtcatctcctttgtaattgtcacgaacaaatatatcaatcatttcccataacaagggttttgacatggacataaaaaagctttttaaatcgcctttaaagatgtatgcgtcctgtgtatagtttccactgacttctttaatcatttcgtccatacgcatgactgcagacaggcatccttcacctatacggcagttcttggaaacatttccctgtgactgaaagcgttcttccaaaatcgggtcaagacggaggtcgatccagtgatgtacgacacggtcgatataggcggcagcaaatacttcacgcaaaacaggtttcttgcgcataaagcattgtgagaagtccggctcatagtgaccgtatctgatactttcccatacagcgactagctctgtgtcataattgaaggaaaactcaatacagtcgccagtattgcgcttttgcctgcaacagtcatcgtatgcttcaataattgaagataagggtatgtcatagatcggtttatctgttgcggaaacgggacgaaccctgcctgcgttagtcttgttgttcgtgttcacgttgccgttgttcatgttcacgtaccaactgttcgaggattcagcattcactgtcttagtctttcccggttcatcaccgggggaatgcccaatagataaattagattgctcgctcatgctcaccttgatgaacatgaccccggctttacggaagctgctttttcttcttgggaagcggtgaaatttcgccaccctagaatttgtttttcaacagaagtcaccatttcaatgatgtcggctgtcgtttgaatatttatcagtttccggtctcgacatacccttagtaagagcttcaatgtatcaaatttaacaaggaattcattcaggtactccacacgacgcggaaggcttgaatttgcatagcgaatcaactcacagcaacggattgcagacatcataagttccgtaccgaattcgtaacgataccctttggggaacttgtcccttgcgtcgagtatcaacatcgttaaccgatacatgcactgataaactggtctgtcttctgcttttcccatgttaatttttgatatttttaaaatttttcttttgctccgcaaagttaatgattgtcaaactattaacactcattttttcaaaattttaaaacttaaaaagcccctaccggggctaattaaacgtaactatctaagagataaagagttaaagagataaagaatctattgcggaaacgggacgaaccctgcctgcgctagtcttgctggtcgtgttcacgaggccgttgtacatggtcacggaccaactggtcgaggagtcgtattcggtgctgctccaataccagtcggttgtaattatattttgattacttgatacagatgacaataactcgttgatttcagtcttatacttggcgatggtgatgagttctccttcgctgggaagataccattcagttttgtcttcaagtccgtcctgttcaagtgtacaagccttgtagttcttcgctgcttctgcggctggcgcaccgacaacaccgccattatctttgatccctgcggtggcttctatgatagcgtcggtattttgttttccgtctgccgtttcataaagcccctgattaccgcttccgtagttcttaactccacggatatctgttccgtatgccccccacttaaagtttctgccaccgatatcgtcaacacagtcacttttggcaataacgaactggcgacgatccgcgcgaatacggacacctatacgaagatatttggaacggttatttgcgctaagagagttccactcttcagccgtaaagaacacgttagcaccgtcttcaatgcggattgtggcaaaggaaagatcaagcagtccgcccgcccacctgatatattttgcaatgtcactggcaggcgtattttcatttacactggtaaaccctatctcctgcagaaccgccacctgttcctgtttgttcacgcgcaaaagcaatgcgctttcattattcttatctgtcataaatatactgttttaatagttagtcttctgctattgcccttacatgaaacaggtttgtatttttattctgtacaaccatgtgtccagtgtttacattacacgtccatgcgttagtcgtatcataattggtactcgtccaataatatttgtcagtcagcagcatactgtcgctgctccaaaatgcgcgcaacatctcgttaatctggtcgcggtaacggtacaaaatcatcatgtgtccggaagaaggcaagaaccattccgtagtatcttccaagccgtcaccgtcaagggtgaaggctttatatgcaacggcagcttctgcagccggagcaccttccacaccgtttgagactgtccctttcaaggcatcaagaatcagttgcgtatcttctttcccggtgaagcaggtgtacatcttacccagcaacttttgtgaaagtccgtcgattgttttaccaagaccaccccaatagaaactggtagacagtccttccgcatagcattcctgtgccgcgatgacaaaagactgtgaatgcgcccgaatacacagaccacgacggatgaatttcaatttattggcaggagtcaacgagctccattcttcacgggtgaaataccattttgagttatcggaaatccggttacatgcgacacgcatgtccagcaatccggtagcccacttaatccggttaggaaactcgctggcacgcgagctttccgtaatgtcggcaaagcctacagcctgcaatgcttttacctgttcctgtttattgagacgcagcagggttgcgctctgttcttttgtactcatcttatttgctatttactatgtcgttaatatccatattttcttccacaaaccgttgaaggtattcttcataggtttcgccattatagtagtctatgatttcagccacattgtcaagggtcacctcctcataataaggttcgccaccgtaggactcgttattgaaccagtcaatgattttgatatatgcgtcgatgactgttttaacggtcagaccttcaaagccacttcggatcatttcgatatccgaactttctatcacttcatccagcagatagtttccggtaagtacgggcttctctacctgatttccgttttcgtccagtcccccgataccgagttgcaggatttccagcacttccgaaccgttcccgatgaaatcacggttggtgatacggatatggcggaatacgacattaccttcctgcgaatcgattatatcgcggatcatctttacaacgtcgataagagggcagttttccacgcgcagtgtggtgatgttcggcatggattcaacaacgatgcctgtgtccgcattcagccccttatagctcaacttatcgaggttcatcaacttgaactgtgtcatggtggtcggcaattccgcatattgaaccggacagccacccacgaagttgacgatttgaagggaactgccgtatgccagcagacgcaaaaggcgcgttgctccggtcaggtcaagagataccagctttttgaagttctctacgttcaggagtctcatatacggcttttcaccaagcggaaggtctgtgacgctattgttagcatatccttcgcgcttactgccgaacaccagttcctcgacgcggatcagcgtagtgaagtcctttgcctgtgtaccgtcaatattgacagtactcaaatcacccaaagacttgatttttgatgcaccgatgatatagatcgcactggatgaatttgaaccgtcaaagtggaatgtcacctttgaaccgtcttcttccgcccacgctccctgttgtgcggctggtgtgttgaatcccgcccatagtttccattgctcgctcgctgtgacttcgatattgatgttctcaccgatagcacggaacatgcacatattatccgctttcaggattgtactgacaccgaaataagcgtcaaggaaatcataacgggcagacacatagtaatggcggtaagggatacccataccggagatcacattgaatgcctgaccgcccggattggtgatgtacttcgccacggaatcacggcaggcaacgattgcgggtatcatcaggtggtctttttcttccgactcacgcagtacggcttcgtaggagaatgcggactcaccacccggaaggcgcgatgtacggattttttctgcggtcgctgcaagcccgacctgatcgtaacgccacatgccttgccatacgacgctcatacgtccggcaaacacgttttccccctccatgacgctgtcaagcatcacgttatacggaagtttgaagataccggagttattcttgccgttcgtactgtccgagtcataatcatggttcatataccagcgatagacaccatccgggcaaaggtacaaagcccacatgctgtttttcgataactggtcgacgcctgaatgatacaggatacggactaggtatgcgcggaaagaagccacgctacaatacttgtccatttcttcaaccagcttccggtatcggttttcaagcgtgtcgctgacctgtaccccgttgatactgattttgccgcctgccatacggttcttcgggttacaggaatatacccattcgcagaactgtttccagcggtatggtgtcttctttccgagcgcataagcaagactcatatcatcatcgtccggtgtacggaattcaaagaacatcgtccatttcggaacaaggctttccgttgacagttccgcaccgtacaagcctttcacccacttgctgtgcgtcgactgcatggtcatgaagttgtctatgtcatcgaagatgcacatgccttcataatcaagcatttcaacacattcaaccggattcaggacacgcccggtaacgaccgttttcttgccgttgaaagagactgtcccggtggtgttcttccatgctccgtcgacgtattccataaacttgtacgaagcgtccgtcgatttggaaagcatgtatattgtatcctgatcgtagtcgccagtatgggacatgaaataggattccgtcacgtccggaaggtcggtgaagtcgccataactcaaacagtcggcattgtaaccgggaacatctttgaaaccgaaagtcggtggatttcccttgtcaatgttccagtcaccgcgacaccaaaagtacgcgtcattgatatttccggtatccgacttgaagacaagcacgctgttaccgtcaatacttgtacgcaagtccagcgtgttgttttcgtccgcatagtacgcgttttgcgctggtgtcatgtaatcctcgcccaaagctttctgcatatcgttattgatacgggaaatcggtgtgttcaccttgtcgggtgatgcataattcaccttcaggcagaccttgtcgaatgggatagtcttgccacgcaggatgattttcttgtttgcaatcgcatcaagcaaagcctgcggagctagttccggatacattgcacggatgattgcctttttcagcttgtatttcctattcttataggtcggatagaaggcggatgtcgtaccctgattggtcgtttccacgttctcgataataaggctcatacctttgtccttgcagaacgggtacaggtctgtatatatcttggtggacgtatccgttacgttgtcaagcgtttcaagtttataatccccgtgcggcatttccaccagacagtcacacatttcaagtgctttgttcaggtcgattttattatcggttaggatatcgttctttttgttcaaagcgatcatttcgtccgtgtcagatttaccgattacaaattcatcgttaatctgttcgtccgccatttccttttcccaggaaagcaggcggtacatgtacagttccccggctgttccggagaagctgatttgttcggactgtttgatcgcgctttgtcctgccgtatatttggatgcgccaatcaggtcaccgtcacaatatagcttgatatagcctttgccgtcctcttccgcatttgccttttcaatgacgaaagcaaactcgtagatgtcgcccggcttgaaataccgttcaatcagttcagttccgagtgctttgaagtacacacattttgaagtgatacgccacccgatttggtttgcttcgtcccagcatgacacgacgttcgcgtcaggatcggcagcgttctgcgtttttatcttgatgatggtagtcgatccggtctgctcaatattggtacggttatagggacgataagtacacaatgcggtggcatcatccgagaccttgaacgccttcccctcggtcttgtcggtgacaaaggcattcgtggagtaattgaacccgttctgcttcatttcataaattccgtacagccatgacttgtcctgatccgaattgtccttgtctgccggattgaaataaaccgtatagccggaatcaccgttgatgtcaatgacggaactgttaacggagtactcaatcgtattgctttccccagcaccgcatttcccgtaaatacccaacgtattccgaatgttgtctgcaatcgtgaagccatcgacacgggtggacagattgaatgtgctgttacgtcctactgatacggtagtcagcaccgtgtcggtttcattattgtccccggtagaggtattggtaactttcgcgaccttgtgtatttcgacatgggcatcggtagcgacatggctgggatcataacacgccacctcgatattgaggtttgcatacttcctgaccgaccatgccgtttccgtttcttccgaatgtgccaacgagacaacgggcataaggctggacgggttgacgatcatcacgtcaaagaactggtagttcgaccacacacccgattccacgtcctgtgcgacgactttgatagtatatgcaccgtgtgtcaatcccaaagacgaaacgttgatttgcaagtcctgtgagcgtgtggaagccacactggtctgtgatatcagtttccattcttcacccactttgatatgtgccgtgaccgtggatttattggcggatgacagtttgaacacgtccgtcatggtgacaagtccggagccttgctgcaatgttttatacaaagcccatacgcgcgatagtttcaggtttacagccgtgacgctgattgttttctgtgcggtgtttcctccgtcatcggtggcaacaactacgaacttacggttcatcgcttcgctgaaatagctttttaccgggatggtgaaagagtagtccgtatcagatgcggagctttcccggttcacgttgaacgtttcaagcgtttcacccgttgacttgtctttcagttgcaaggtttcgatattgttgtatgaaaccatttcgcccgatccggtacgcgacaggattgcaagcctgattgtcaggtcgtcagttccgagtgcggcatacagggacgttttttgtggatagatgtacacgatagttccggcaacgtctccaccgcccccagttccgactgcaaaggtgaacccgtctcccagtggaagcccttccgcgttcttcatgtacacacgcaccgttccgtcttccgcctgttcaccgtccacgtcgacgggcatggtatcatagaccgcgccacccgctaccggattcacgctgtccttgatgatttcggagtctgtttcgacagttcccccggctgcagaaccaaagtcaatccatgccgccaagtcattataatcggcacgggacgcgcacagctgtttggactcgaacgtttcttttccggtgcggtagataataactacaccgggcttgatgcattctgtctcattcgctgtctcgtaggctgtcagggcattgatagcagtttgaagaatataatatccgtttgacagtggtgcaatttcatcaaccagcagcactgcgcctttgcccgtcatgtcaccgccaacaccaccgaaatccgtccagtttgcttctgtggcaaagccttcaagggatgatccggcaaattgcttggactcccattcaccttcagcgattttataggtcaaaacaatacccggtttacggtagatgatgttgtccatattttccctttccgtaatcgcggcaatagctgcaggcaaggaataaacagagccgccacaaactccgttgacgttaataacggacaaggctttgttagccagcgacaatgctgaagacgcggtagtctgtgcgtcttcagccgatttctttgccgcttttgccgccaagtccgcagacgcggctaactgcatcgcgtcggagtcggcagaaagcaaagccccggcaaagtagatgtatgtcttgttgccgaacaggtatattttattctcgtgcggggatgtccggtcagcgttcatgtagttgtcaacacccctccaacttggataatacttgttgtcaacgaagtaggcaaatttacctttgctagcaacaaatacaaccttaccgccttctgcggttgcgctggactgctcaagcacaatggaagcgtcagtcgctatttcgtcaaagcgttccgttgaatgatgaacgaaatctaccattaaagaagacacgtccttcgatgtactgtcggcatcgtcggaaaggcttttaagtttaccccataccgtcccgtcttcgctttctgatgcttcttccgtaccgacattatcggatagttttccgatgttttcatttgctttttttgcggattccgcagcttcgtcggctttcttttgtgcagcatcagccgtattctttgccgtttctacatcttctttttttgcatatacggaaaggttacctgtcgtgctgacaagtttccagccgggattctgaaaggcatagatgttgccgttgtcggctgcatcaggggtgctgtcatcatatactgtcacaatctgaccaaatttcaacggctttccgtcagagccagccggggaagtactgtccgcgttcatcttcgcgatggtcgtatatgtattacgaatacccagtcccacctgattcttttccgcttcattgatgacatctagcgtctcatcaatcaaaccgcccacttcgtcaggtgatatggatagggagtctttctttgcggaaagttcctgcgcccgtctttttaattcgtatattgttgccattatattatttctttactaaaaattgaacctgataggaaaacccttcgggaaagtctcttatagcttcctgtttggatatgtcatatatatatgctgccccatttacaagttggaaagtatgaattgcggcaaaattgtcattccttacaacaatttgaggtttgcggtctgcttcataatagtcataatatacccacggtgaagcagcacccgaaaaagccttcaaagccctaaaattaattttaacgatatcaaagccctgattgcttttgaatactttaaaagagactgaaagactatcttcagagataccgccacttactttggtacgaatctctttttcttcataaatcatcaggtaatcgttcatgttttttaccgaagaggcaaacacgtaaatatccgacgaggtaaccgtatcagtgagctccactttccggtattgatacacattgttttcggatgtgttttcatatatctctttttgcccctccgtactgactactttccagtataggctagcgttcatgccaccttcaaagctgccttcctctactctgtaaacttctccgttaatggctatataaccttcttcccagttataagtcgtcggacgtccggcaatagagatagggggtggcacattgcatccggaaagaatgacattaccgtatgtactgactattcctttcacagtatctgcaaatgcgctttgcataaagtccaaatcgtccaaataaaacggctgtccgccttctctaaataacagtttattcatattcgtatattttaaggacgtaggttcgtccggctggtttataatagtcaatcaaatttttaatttcaccctcatacgctgacaggaacgatggtatgttcaccatgtaatttcctgaatagtttccttcaccgcgctgctggatgtatttaatttccgccccttcgctccgtttatgcagataggacggtatttgctcttccctgcgatgatataagtacgactcctttcccgcaatatcagtgatgtatatttcccggtctttcaggaaaaacctgtcgttcagaactttctcgatatatatcacctgaccgtttatatttagcttatcaatagcctgtttacggtaacttttaaacagggtgtaaatgaagattaaagggagaagaaagattgatataattgcaaatatcttccttttcctcaatgacggacgaagcacatactgcgcgtatttgataatgtcaaaatcataccacataagtcagagaagtttcaaggctgttcaggatgaaacacccggctacagccgtatagttattatttttaattacattgtattccgtagctgatgacgctttcgcggcacattctccaagttcgacatctagtacgccttcaaccctctgtatcgcgtcaacaagctttgtcttattgaatttaccgccatactcaatgcctttcagataatcgtttatggcggcaagtactggcttactgccatccgtcaggcggacaccggaagcattgataaccatcgggtcgacttctatggtggcgttgatacggatgtcatccgctttcattgattgaatagagagaatcaccccggcaatcttaatcgaattcatatagcttttaaatgccgttagaacgtccccggtcaaaggacatggaagcccgccttcgtctccggacacgagtatctgaatacttcccccgcgatctttgaccgccacatacttgacaagctgtttggcttcgtcgatagcggaatactggaactggtatttttccggatcataaaccagcggatcaccatactggaaagccagcgcactgctatgataccagcgcaccgtcggtatgatattagcgtcaatccgttcttctacgtccgttttgaactggtcaaacatttgctctatgacgtgcgctgttgccgcaaaaatgtagaacagggtgctttctattgacacgggagaaaacaccgaatcaaagtcggcatcacctgtgataccatatatgtcccggataatgctgttagacatataggcgtccgtcatttctttctttatttctgcgattgttctagccattacttaaattgttcggtaaattgttcagtgaaaattctcaatcgtattgcatttgatgcagtttcagaagtagccgggcaaacagagttccgctggcagtaatcagccagttcgctgttatataccttttccggtatttcaatttcctgtccggcttgcagggtatccgttatgctcatatcgtttgcctttgcaagcataaataccgcttcgattgtaccatattcctgcacggctatatccagcagggtttgcccggcttgtactactgttttcatcttacatttttataaataaaaaatacaaatgcaataaagaaggctgctattacggcttttgcccacggaggaatgtacgcgaccttttcaacgacctttgtatcattcttctcctgtttttccagttgttccttcagtgtcagcagggtttcctgaatttcctgtatttgtacctgaatctgttcattataggtttctttctcctgtttggtagacgttcccgtcgctgtctccgtagaggtcgggtattgtttcccggtcgaatccggtggcgaatagttcgtcttttgccagttgaattccatttgctgcatcatctcgatcattcgttcaacgttcttgtttacgtcgacctgcgctttgtccgtagaaacttcttcctgttccgtctgcttctgctccgtgttatcctgatggacggtcgtgtccgttttggacgatcggcaggaacagacggacagcaccacgattgtgagtaaaaaaacgagtatctttttcattacggtcgaacgattacaggtggtaaaaatgaggtaaattcactctttacgtcgaagcagggacattctttcatccactcgcatttttcgacgatgccgttcccgttcttgtccggactggtatcgcgatgtccgaggatatcaataatgtcgtggcggtggcagatgtcctgaacgagctcgcgcatcgctttcttctgtgcgtccgtccgggtatcctttgccttgccgttcttgtccagtccgccctcatagcagataccgattgaacatcggttataactggttctctcaccgggaacgataaagttatcatgtgccccgatttcgttttccgcacgcatgggaatcacgcgaccgtctttccggatataatagtggtatccccattttccaaagccacgggctacgtgtgaatcattaatttgcttctctgtgaaatctttgtcctcgcgtgttgcagaacaatgaatgataatgtatgtaggtttattcatctttcttttcctccttattttctgtttcgtcttctccttgaatgtatttcttatacttgcatttatacctgtaatcaactccgaagagtgcgcctgcaaaagtcgaaacttcgccataggcgactaaaaccgagttgtcaatctgtcccgtaggtactacccaaaatccgcaaaacagcaggatcattccggatacggacaggaaaactgcgatccataactgtacgtgtagtcttttcatgatacatacttataaaatcaggcggaagactatccacaccagtaatatgaccgcatctgccaacaatgccccgcgtaccgtcgcccggatatctgtcgtgtccggatcatcgtctttcgattccttccatttaccagccagccatgcggagacagttcccaagaccatgccgcccaatacgctaaggaagctcaccccaaacaggaaaactgatgctaccacgcacaccgctaaaatgagcatcccaatcagtccgtgaatgattttatccactccgaactttttaatcaaatcgttacttgctttcattttcgttaatttaatcgttagtaatttcaatatttattttgtccaccagttccgaatagtcaatgcctgcccgtttcaggtggactttcatttgtttttcaatgactgttttattagcctttgaacgtatgtaccggatcaggtttgctccaagaaccgggtcttccttcaattctccctgattcagttccagcactattgccgcgttttgaatcagggtatcaccgactgcaaatccggtcagtttcccgtctgtcgctgtatgcggagcaatcctgatatcaccgtctttatcaagtaatagtcctttcattgtttcaccctttcgttttcaatatccttgacttgtgtttcctgcagggactccgtaaaataggcggacaatgctgttttcaaagccgatcccccgtcgttcggaacaggcgtccagccggacaatttctgtttcagcgaattgatgtccttttctatcaggttcagccgttccgtcagttcaccgactttaaccagtccgcccaatgtcccgccattcagcactatttcgtccacttcgtcagcggagatcaggaaggtgtcagtctcctgtccctcaatgatcccgaccagacaaatcgttcccggtttcgggtagatacatagtccccccattcccaactggacgttatagtattcaagctggtcaacgactcccgtcacgtccattgtcctgccagccttatcaaccgtgtcgactgttacccagcgcaattgcgcctgttttgcaccgtttatccgtctttcaaatgcgtcacgtagttgttcatccgttgtcattccgcacgccctcccagttctaatttttgcctgtacgtcgcatcgtcactgaaatcctttgtcactttctcaacataatagcatccgttcatttccggagtcacttcacttttaaggtcgattgtcattccgtgatggacgacaggtactccaaacagttcgacacctccgcgatacttctgttttttaaggctttcataaaagtcctttgcaaacttcttcaagtcctctaccttgatagactttcccttctcattgtaggtaaggttataaacctcacttccttctaccccggcttttgcttcaagtttcttgccgccagcaccgatgctgacgaccttgacctgaaactcaccgttcgtttcgttcaagtcctgactaacagcgtttttttccagtacgatcttcactttttcggtgtcgaccttttcggaatagacatttccgcaatacaggactttaccgatgaaatagcagtgaaggttagtctttttccgtatgtcgtcaaaaatttccgcaaccgttttggatgaataccgtactgctccaagttccgcgtcatagttcgttttcacttcataacctttggcaacatctgccagcagcttcttcagcgtgacattctttgcggaataggataccgtctttctttttagtttgtacatttcatcctcgcaccggatcgtcaccgggacaccccagccgattaatgaaatatacccctcaaattccgtgtacaggtcaccgtcatatccgagttcaattttcacctgatccccggcagacagcatttccttcaggtcttttcctgcaaagtatttgatacgcctgggaagtcttatttcagccgaatccgtcaacatcttccatgaactttcgatgtgaaccgacgatatcgcatgaatgaccagttcctcgcgtttttcgtttgccggaaatatgatccggctgcacatcatatagctcataatgtcaattcgtaagggttgtcacttgtcgcctctatcgtgaaggggactacgctgctgtttccctgaatcgggttgaacgaaaggttatcaatgacaatggaataaatatccttgttattgaagatacttcccgtcactccgatcgcttccgtcactttgcggaacttattaagagcgttcacctgttcggctaccgtcttataaccgtcccggcttttatcggctatgcaaaatccccggatgttgattttccagtcatcaagcccgtagatttctttcacagtcccgtgaacgcccaaaactttagtcttcgagcagttcatggagcgcgaaaaatcaacgatagttgcatagggcatcggaaaactagccatgttcatcgtaccgcgtgagccgtccggattataggtgctgtattgcttgtttccgtcaagggtaaacgttccgatcaccggagtccccatccagctatacgcttcggcatcggcatccggaatggttgtcactccggtatattgtcccggatcgtaatcctgcagggtgcgtccccacggaagataaatcggggatgagattccgaaaacttccgtgaacaatgcaccaatatttaacgctgtatttcctgtcataactttatcctattgctggtactgtatcggttatcaccgctaaaatttcccgttttactttatctgcaatttcccgtacatccgcaccacccgcgacacggaaattattattgaatgtcacgttcatggtgatgtttttaacgctgcttccgccttttccgccaagaccggtcttcccatcagtagcctttgttcctccggttgccagtacggtttgcccgttgaccggagacaaaggggaattcaggttaaaactggtatctccttttttctctccgtctttagggtgtgacttttcccagtctgccatgccttctttccagccatctgaaaatgcgctgccaacctttttacccccttcaagtgcttgctgtgacagcctgtcccaaacatcgctgaaatggaaatcatcatcaaaccagtttgccgggtttatgacatcgacaatggctttcatcacgttaaaaatgaacttatagtattccgtgaagattacttttataaagttccacaaggcatagaagaaggcgcgtactcctgcaaacttattccagagaaaagcgaccagtgctgtaatggcagtgattgcaagtgctatccatccaataatcggaatactgtaaatagcggtggatatgagagccgaagacgttactgttgatacgaccatttttgccatgccagccagccatgcaatcgatgatttgatagagacaagagtcatgatttgcccgatagaccacgcgacagttccgagcgtcaccaatgccccgacaaggactcccagcacttcaagaactggcgcaataggctctacaaattcaaagaagctgattttcagatcatcaataaacgcttgcattcgtttctgcttttcggcataggtatccatttgtttgcctgccatatcgactgccgaagtagaaccctgtattgcttctgtccatgtatcgatttggtctacaccatcaatcaaagccattgccgaagcaaggttttcaccaccgaacaaggcggacatgattgtcgcattatgcataaccggagtcagggcacgcaggcggtcagtcagtgaaagggactggttttgcatcgtttcaatactaaccccggctgcttttaactgcttgaccgcatccgtagtcggagcctgtaatttgactatcgtattacgcaaggcaataccgccttcagaaccttttttccccgatttatcaagcagctggattacagcgttcgtttcagcgaattcaacaccgaatgtttttgcaacacttcccgtttgtttcagggcttcagctacttctttaatttcggcagaaccttcgacagttccagccgccatgatgttcatatagtccgtcatggtttgtgcagccttcatcggatcgtcgagcgaaaccttatactggttcatggcggtggacatggcggcagacgctccgggaacatcattctgcatcgtcttactaagcgtcattacgttattcgacatgatttcgagcgcgtctggtgcttttttcagttccggagtaatctttgaaagcaagtccttgtaaacgcccatagcgtttgccgcatcgacaccgaatacttttgccgtattccgggctttgtcagcaagagcgtccagttctttgccttccatattggtgataccggacatttcagcaacggcagtttcaaaacggatacctggttcgatagcgtcgttaaaggaatcacggatattgtcgacaccttcctttaactggttgagaaagaacattccttttcccagcccttccagtttcccggctgctttccccgacgtttctccaagacggtcgaccacttcttccgtgtcgtcgattacccgtgtagcttcctcggctgcatcggtcgcggcatgtaacggagaggtgatcctgtcaaccagttccaatatccattgagtcacttgcattgtcttttgagaataatcggtttactactttagcgactgcattatgcaccactatttcaaattcttccaactccgttttccgcaacatgcggtattcggcatagagccggagccattcatcttcgtccagtttgtccggaacgtcgacaccatatacttttttcaaaatggcatctattccctcgacaagactgaacgattttgaatattcctctatgctttgctgataaaagccgcctgaccagcgattaactgcccaatggcggtcaaaactgaagtatagacggcagaatcgtccaacgctttcatattaccagctgccacgcagttccggatcaggatgtcattcgcttcttcaaggtcgtcctttttcttcgccattgccaacaagatgtttttgctcggacggacaatcaggtagtcataacgttcgtcttcatccacctgtacggtgacatatttcagtcgtttcccgtatttcgttttcagttctgcgtgctcttcttccttgaagtcaacgattagagccttttcttccgctgtcagttcctcgtaaggctttccagccttgattttcttatcttccatttttaaaagtcttttaaacggttattaaactacattgctacgttccagtcgatgtggctgggaagaagggtgaattgtgtagcaatgcttttatcaccctgctttacgtctacgccattgtctacaaattcgacgttccggattacgtcttttacaataagtcctttatactcatacatgaccggaatatcaaatggttctatatccgtgagacgctttccgaaaccgagtgctaactgcaaggcgttcacctcttctttcagaagggtgatcgatgcttcagccttataattcccctcaccgcgaccgacgggaaattcaccagcaccgtaaatgttctctttctctttgctgtccttgtaggaaagggctgtaataccttctacctgacgaccgagcatgacaaccttgacgctgttccatccggctattttcccgaatttgttgattaatgttcctaacaatcccatattttcagattttattcgtgaaacccaaatcaatctcaaactcatgtacaataccgtctgcaaccagtcttactttgatgttaaaagccttgtcactgacagccatctgtttggggttgatgtaaatatcgaagtccgcaatattctccgaattgaccatgctttccagtgcggatttgacaagcgcgtcccaactgctgatcgtggtgttactgatatatccggttgacggatcagccttcaccttgcttcttacacgaggcaaaagagtcgtgcggatgatgcgtgcagccttgttccaaacagcgttatattctatgtaagcatagtcgctgtcggcttccgtacaagtacatgaattgctgaagaagaacccggcatacccttgaaagctaccgacaaagttataccctttgcctgtcagatttttctggtcggatacgctcaactgcgagaagggtttgccattgctcaaagccgcgtccagccaaagcccgttcagtttgttagtcaatggatagtcctttgttccctttgctgtccgtgggtggttttcaatatcgacgctgcccatgttttcatgtacatagcggacagataacattccgagtgcgctgccgacggcagcatgtgtcctgtacgcttcgtcctttgctgcctgtgccggatcttgtcctatcacgacagcgacattttcagagtccagcttccgaagatcgacagcatcattaatggcattgatatacttaccgaccccttccaatactaccacatcgatatacaggtggtcttccctgaatttattgaccatcttctgtgtctcttgtacggctacagtgattgtctcgtccgcagtcagtgagcagataccaatggtatttactccgttgatggtacgcaccgcattgacaaaatcttctttcgtcagcaggcttgacaccttttcagacttcggaactagcataagatacagtgaacgttccggagacaggcggaagacttcgctggtatgataatgcaccagttccttgttttcaaggtcgatggtatcgtcccatcccaacgcttccaaatcagtgatatcgttcagggcttccggcttgtaatactcaagctttccgatctccgatccaccgaccacgagcaaaatgacgcggtcgctggtatcggtatcccgtaccagcccgccattcactttgttaattgatactcctgtaaagtttcccatgataattgttattatacagattttgctgatagaatcgcaccaacaccaaagtcttcgatccggtcaacgataccgtaggtttgagtacgatactcactcgtcgggcttttactacgtgtgtcggttgtctccggacgatacaatgatttcacgctttcaaggtgataatacgtattcggagcatagaaaaaggtactcgcttggaagtccgtttcagcagacactttgactccttcagctacttttttcgcgttgtccgcattatagaaaggacagtcgttgttctcaaagaacttaatacccataaaacctttcggtttcatagtaaccgggtcaatatagaatgttctgtcatagaaatactttgatgcatctttatcgagcattaggtcacccatgtgtagtggagaaagcaccatatacagggcatcggtaatagggagattccacgtcttgaccagtgttgcaaaatcaaccaagtctttataacacagtctcacacgtccatgaatgtccttttcacctgatgtccggattacgggcattgcttctttggtatcatcttccggagcaagtttatgtaatacgtggttacggataccgacttggaaagcctcattgtgttttacacgaatagacgcacgcttgtcaaatgcaagataacggatttcgtcatctgtacatgatgtcggttctgtatcgtaaatctcccagggaactatgatattttgtcctgtcatagctttgggagtaaagtcttccgtgttattcacgcgaaagcctacattgttaattaacttatttctgcgtacaccgtctgctgctaaagctgcggcagggacagaacccaaaacttgcataaagtcagctttgtaattacgacgttcgatcagcaattgtggatcgacgtacttgttcaaataaaaaccgtctactggttgtgccatattcttttttttaaatggttagtattttattttccgttacgctttacgtagtcattcaaaagacgttcgtattcagccggatttttctccatgatatttttcaaagcctccggatcgttttgaaggtcttcgaactttttgtttgtggtatccgtcaggctgggggcatgaacttccggcatttccacaggtttgatggcatcaagcagcttctttgcggtatcgaagttgctggtcaggttcgctttccagtcatcgcgcacgtccgcggtgattcttttttctttgatagccttgttcaggacattttcgatctcctgttccttgcgttcctcttcctgtctttcgagcatctcaacgcggtcagccttacgtttccacacgtctacctgcgcaataaattgtgcttccgtggagtttgcgtccatcccgaagcgggtagtcaacattgttaaatccatgtcattttttgatttttcgttattaatagagtcagtaatctcaattttacctgtgtagccgcagttggtgatcatttgtgccgtagccttatcaacctttgccttgcccgttacttccgtcacaaagccattttcctttgcttcctgtgcactcatccaatagtcaccattatcccatgcgtctttgatttttttcttgtcggtacactttgaaagaaaagcgttcaggtagtgttcattcagtttgcgcatgacctccaaagtggattcaatatcagcgactttcccgcatgctcccccgctgacttgatggatcatgaaaagcccgttagcaggcatagaaaatgatgtgcagttaatagcgatgtatgttgccgcactagctaccagtgcaccaccttcgcctgtgattttgccgggaaacctcttgatcacgttcacgatctcgttagcttcgaagcattcaccacccggactgttgatatagatgtgcacgtccttgacccctgatttgatcagttcctcaactttggaagtgaattccgcttccgtttccctccattttgatatcgtgcctttgagttcaatccgggcacgtccgttttccgctgttgcagtcagattcattttcgcgatatttaaaatttcatgctgcaaaattggaaaaggaaaggcgggtacggaaaaagcgttttcatcttggaaaaaaaacagtgttaacaaggacgtattttttccaacttggaaagaatacgttccaacatgaaaagccattttccataggtgatgatgaaatatgacctttgcttgcgtaaacgaaaggaagcgatatgccaagtaaagagtactaccgtaaattaaaaaaagaagcgcatgacctttatgtaagggatggaatgatgtgcaaggagatttccgaacgtatcaacgtgtcggaaaggtctgtgtctaattggatcaatgaaaatgacgcactttggaaaaaagaacggcaggcatctgttatttcgtcacaaaaacagggtgacaacctgaagcagattatcaacattcttgcggatcagaaactggagctgttgcgcatgattgacgaagccattgcagaaggtgagagtgacaaggtgctggaactgcggaaacaagcggctacgcttgataacagcgtggcgcaatggggtaaccagctcaaagaggtagacaaaaagaaccggataacactggctatttacattgatgttatgagccggatattcgatgctatgaaagtatacgatgccgacctctatttcaaaacattggactttcaggagaaccacctttatgaagccgcaaaaacgctgggataatgaaagtagaagatagcaaagccctcaaagagtatcaggagaaattaaagcgtgcccgatgtacaggcagcctgattgatccggacgaatccttaacggttcggatgaaccgcattcagcgtgcaaaacgggatgtcaaataccttgtcgaaacttatcttccccattatgcgaccgcggactgtgcagactttcaaatagcgcatgccaataaagtgatgaacgaccctatttacaaaggctatgcggaatggggacgcggacttgcaaaatctgtatggaacgacgtgatcattcctctatggttatggatcaacggtgagacacattatatgtgtatcgtttccgatacgtttgaccgtgcgtgtgacctgttggaagatttacgtgcagagttcgaagcaaacgagcttttgaagcatgactttggcgagcagtataatccgggatattgggaaaagggaaatttcgtcacgatgaacgggtttatttgcaaggcgttcggtgcgaagcagaaggttcgcggacttcgtaagggtgcacaccgtcccgacttgtgggtagtcgatgacttggagacaccgcaaacaattaaaaataaccggatgcaggatgattatgcggactggattgaagcggacgtactggcaaccatgacgggaaaacgcagacgtctgataggtgcaaacaatcgttttgcgtcccgtatggtacaaaccattcttaaacaacggcatcccgattgggactggcacttggtaagagcctacgatccggtaacgtatgagcctgcgtggaagtcaatgtattccgcacaattctatcggcaacaggaaaaggatatgggtattcttgcggcacatgcggagtacaatcatgttccacttgtcaagggtaaaatattcaagccggaaatggtgaaatgggggaagctccccgacctgcacacaatgaatgcaattgtggcacattgggatattgcgtatgccggaacagataccagtgactttaatgcctgcaagatttggggacgacacaagaatgatttttggctgatagacggattcgtaaagcagtcaaaaatgaaactctgtgtacagtggatgtgtatgaaacaggctgaattcaaggcaaaggacattatttgcttttggcagtatgagtcccaattttggaacgatgaagttaaacgtatcataggggaagcagaggcggaaacaggcgtagagctgaacctagtcccggtacagactcccaaaacaacgaacaagatacttcgtatgataagcatgcatccatattatcaaaattcccggatgcatgtgaatgaggaactgaagtcaaatccggacgtcgcagtcggtttgaaacagttgtacgctgttgaacccggaatgacggaacacgatgacagcccggacgcggacgaacaggctgtgaaaaagctggagatatacactgatcctccgcaatcagaagatgaacctgcaacacgaccgtggaaagcaggaaggtataaacgtaaatacacttggtaactatgaagtatatcaacatggatgacctgacaaccgtcatacagaatcggttgctggttgaaagtatcgaaaaagatgaagaggttttgaatagaattgaagacctcgtcatcagtgaagttgccgcttacataagcggtcgttatgacgtgaaaaagatatttggtgttccaccaatccggacgggattgttaacccgggttatatcatgtattaccgcctttcgtgcagtaaaccggaatgcagcccgcaaaacgggaaataacccgttatcagacatgaatgattgggctgaccttatgcttaccaagttgcgcgacggaattatgtcgctgcctcctgaaatacctttgataacagacgaggaaggcaatgttgaatctcccattctgtttggtcacacacggaacaatggatggtttctttaaatagtttttaaaccgcttttaaaaggtatgttatgtacaaaaagttaagagaaatattcaactggtttcaaatgaaggctatccgacgaatgaatgtcaggaacgtaatcaatgaatattattatcggatggatagcagtggaacaacattgtcgggtgctgcttataaaaggcaggctgttgtctatcgggaaaagaccattgatgactggatcatgtcagtgacttcggctaccgatccggatgatccgcgacgtggcttgctttataggttttatcaatcgttatataacgatgagcatctacaaacgacaatcgacaatcgtgtgctaccagtacaacaggcggaattcaaccttgtcgatgacaatgataatgaggacgaggaagcgaagaagctgctgaatcgtccgtggtatcaccaattaatccggatatgtttcctacaccagctacaaggcgtatcgttagccgatatttcacaccttgatgaaaatttagaaattagccatgtggaagaagttcctatgtccaactatatcccgcaacagatgattatcgtaaaagaagagtctgacaaaacaggatggtcatataaagatggtgcgcttgaaccgtattatgtacaattcgggtcaccgtgggcactaggtatgctcaatgaactggcaattatcattcttgcaaaaaaacttgggatgggatcatggatgaaccatatagaaaagtatggtattccgcccgttttcgttacttcggacaggcaggataaaaagcggctggacgaactgtttgagatgatgcaggatttccgaaataatttctttgctgtacttagcggaaacgaaaaggtcgaatacggcaaggaatccggaggaaatgcggtaaatgcatacttacccttagaagaacgatgtgacaatcaaattagtaagcgtttgcttggtcaaactggaacgaccactaatggagcatgggaaggaacggcagaagtgcatgaacgtgttgaaaagtcccgccatgaatatgacaagatgcttttccagttctattttaactatattatcattcctaaactggtaaagataagtccggtatataaaccgcttgaaaggctgaaattaaagtgggacgacacggaaagtttatctatcacagaatatatcgaagcgattaacaaactggcttatacctttgattttgattgggaactggttgccaagaaaacaggacttccgatcattggtcaaaagaaaaatcccggtggtgagcagcagggaggaacactaccgaatcagcccaaaacagaccctcaaaaaaaaaagaccgaaccggacgatgaagcggtaacgtcacccgtcatggaagccggggagtatgatttcagcggcatcatcggcagggtgatgaaacaagtttatgagcgcaaggtcaaaacgggagatatcgacgaggaattattcaggaagacatacgaggaactgaataagaaggcggctgaaggatggggaaaagatgactatgatgatccggaacaggcagaagaacctcaacggatacgtgacaacttgttcaagttctccggagcgaagacgtatcaggaaattaaggagatgaatgacgctctttacgacgaaaatggcaaaaaactatcttataaagatttccgggaaaaagcactggcgatcaataaggactacaatgaaaactatcttcggacggaatttgaaacggcagaaacaagtggcagacgcgccagtgagtggcaagagttcaaagcgaacgcggatatcatgcctaatctgaaatatgtaactgcgggggatgaaagggtacgagagtcacataggatactggatggcgtcgtaaagcctattaacgactcgttttggctgcggaactacccgcccaacgggtatcggtgcaggtgttatgtcgagcaaacggatgagcctgaaacccctgccacccctgtcgtgacgataccggatgcctttgcaaataatgtagggcaatccggtgaaatattcactgtcgctcacccgtatttttcaatgcctgacgaacacttggaaaaaatcaggaaagagacggaaagaagcaaattatacgctccttatcacaatgatccggaatcgaaagtgctgatcagcgactttgccgatccgaaagacttagtgaaaaatgtcgaaagcgcacgggtgatttcaaaagagctaaagatgaaagttaaaatccgcccacatatcaacgaggacggggtaaagaacccggaatatttgattaacgaaaagctggcagacctgaagaacattcagggactaggcggtatcaaaaacgggctggacagttcacgtaagcagcaatgtgagtacacggtttttaaccttgatgcatttgaaagtctcaagcccgaaatggtgcagaacaagttaaatgggatatataagctatatggggacaagttctccggacagcagatgatattcatttatagtgggaaggctgtgaaggtatcgtggaaagacgtgaaagccggaaaggttaccaagctcttaaaagaacttcaggagtgacagccgaaactgacactcctgaagggagttcttgacctgttacagccgcgaacattgcaaatatacaattttattttgaaatacaaatggaaaggactgaattacctgattttttcaaagaattatccacgctggtagaagatgcgcaccgctatgcgaaagttgcgggtgtgaacttcttcaagcagaattttcgcaggcaggggtttcttgacacatcactgacaccgtgggcaaagagatcgatcactattggttcggatcgcggtgtattgatacaaagcggaaaacttcgcgacagtatccatgcagtcagtcgaggaatagaccgcattacttttcagactgatccgctgtcgtatgccaagattcacaatgaaggcgggtatattgtcgtaacggagcgaatgaagcgttatttttggtttttgtacatgaaatcgaccggaactatgcaaaagaagaaaaacggtgaattacggcaaaataaagccaatgcgcggctgtctacaatggcttccttttacaaaggtatggcactcaaaaaggcgggcagtaaaataaggattccaaaacgtcagtacatgggtgaatctgccacatttatgaagcagctggacgcatggataacatcggagattgacaaacgattctcaaatatttaatcaatataattatgatttggacagactgttacaaagaactggttgaaataatccggggcaaaaatgagttcctggcatctatcccggatgagtattccgagctaagggaacagatggaaaatacaccagagattgaacatattgacatgtggcatgagcaggtcagttttctcgatgaggagcatccgttcccgtctccggctgtattcattgaatttaatacactgggcatcgaggacgaagggttactcgttcaacggcttcacacacagattgatttccggctattttacgaaaccttttccgatacctgtgaaggtgcggcaatgcaggaagaggcgttgtccttccttgatctgttgacattgctggggatgatgctacacgggaaatcggggaagaacttcggcacgctccgacgtacccatgtcggacgggaagagtcggggggtgcaggaaacttgtaccggatcagctttgaatgtgaaattatggattataccacaatggaacttgcaagccatgccgatatgaaagaccgtgaaatgaaaattagcaacgggggcttaccggagaaggcggaagacgaagaaccgctgtaccatctatgatacaacgcctaaaagctaaggcttagttgacttatatcatccttttttgaatcaggctttttgccctcttttaattgctcgtaatatgataaattctccgatatataaaagattcgtttatagatgtagttctgatcaaggaagaacaggtcatgactcatacgcaaaagaacatcctctaagcggatgcgctttttatcataaagaagatagaaagtctctaccatcttccggtcacgtattttggtcatttcaggattccgcataaaaaaacattattatagcgcaaatatacggatttccaatgatttgtcaaaattgaatataagcctgcgggggaaaggctataaaaagcccccagcctgttagtaaagacgccaatcacatactaacaaaatgcgagtagacgcacagccgggggcaaagacccttgctgcgtctactcgcatttttgctttatgtgattggcattgcaaagataatcaaatttgtattatgaaggtcatagagatactaaactttaatcgggagctcctgaaaaaattgcaggatgccggaatacggcttgaggattgtcgctatatcgatctgtatgcggattatatgaaactgttaggacatggtgagaaagtgtcttatatagtcgcagcattatctgacaagtaccttgtcagtgagagaaaggtatatagtcttatcaaacgtttccaaagtgactgcaaaacgtttgcagtgtaaacggcttcatgtatcgtgccggattgacagccccggagtacttttgtcccgaactcaaaattattagttatgggaaaatatacgtataaaccgcaatatggcgttatcgtcatttgcacagatgaaaaggaacagcaggctatttatgaacgcctgaaagctgaaggtttaactttaaaggtagtaagtgtatgagagtagaagtacgacaccattgcagcgattttgacagctatcgcgctgcaagggtaaagagccttttcaatgcggaaaaaggctgtgattgggaaaaggtagctgaattgcccatcgaggacaaggaatggcaaataggtttgatagtcggaccgtcaggaagtggaaaaaccagtatcggaagcaaaatctttaacgagccgatttatgacctttactccggttgggacagcaataaacctattattgactgcatcgctccggacggggattttaatacagtcactggaatgctttcggctgtaggtttgggtgatgttccggcatggttaagacctttcaatgtactgtcgaacggtgagaaattccgcgctggtttagctcgcttggcttgcgaacgtccggagcgtgcagtcgttgatgaatttacgtccgtgattgatcgtcagatcgcgaaagtgggtgcagcagcattctcaaaaacttggagacgtggcaaaggtaagattgtccttctgtcctgtcattatgatattattgaatggttgcagccggattgggtgtacgatactgcggaggcacgcttttacgagcgtgactgtcttcggcaacgtccaaaactcgaacttcaaatttataaagtcaggggaagtgtattcccaagactgtttaaacagcattattatttagacttgccgttgcccgttgctgcggaatatttcgtaggtttcattgggaacgagcctgtctgtcatttggcagtagctcctctttttacagctggcgcatatcgctcaactcgcttggtggtgatgcccgaatggcaaggcatcggggttggtactaaatttttagctgcagtatgcgaataccacctgaaggggaatggacgttgcgggaaaaagctacctgtatttttccacacttcacacccccagttatgcggagctttgcggcactcaaagaaatgggtacaaacgggagccagcctttatggttcaaataaggcgagaagtgcaagttcgatggcaaagtccatgcagagaaaaggaaagtccgataaatgttctaccggatacggaggtcatttcagggcagtacaggcatttaaatacattggggaatatgatcatcaagatattaggaaataaggactcacaggcttacaaaatagcggaagcctgtgtacgtgagaaaggtcaccgcgtttggaacgaaagcaccggagtgtatgatctagccattgccccgcttctgacggaaaaggtgtcggtggaagtgttgaaagaaccgctttacgggacattgatatttcacccgtcaccactgccgtatggacgtggcgcgtcttcaatcaaatgggcttataaacggcaagagccaatcactgccgcgacatggttttgggcagataacggactcgatacgggtgatatatgcgaacaggaaataatcaaaatagattattcagcccgtccgcgtgatttttacgagtgtgatattttgcccgctatggaaaggacgctggtacgttgcttggataacattgaaattgggtatatacggaaaataccacaggtggaaaactattcaagctatgacaagcggttataaacattcatccaaaaagagtatgagtatgttaaaagaggaaattacaagcacaactgccggatatacagtaaatgcaccacaatgggtgactacatccacgcaagcaccagagtttaagtccttttataagaccgtctctggaaatgaagggaataaatgtaattatccgacacgtttagacctttacggctgtggatgctttcacgactgttcttattgctatgcaaagtcgcttcttaatttcaggggattgtggcatcctgataacccgtccgtttcccggacggacaaggtagagagaaaaatctgcaaattagagcggggaacagttgtgcgtttgggtggaatgactgactgttttcaaccctgtgaagcggtttacagagagacttataaggctattcagaatcttaaccgtcaaggggtgcattacctcattgtgacaaaatcatcaatggtggcagatgacaaatatatccggttgatggataagagactggcacatatacaaatatctgtgacttccacggatgacacactttcacgtacatttgaaaaggcgtgtctaccatctgcacggattaaagctattgagaagctgcaggagcaagggtttgatgtgtctatcaggttatccccatttatccctcaatttattgattttagggttctgaatagtatcaaatgtgataagattctggtggagttcttgcgggtaaacacatgggtgaagcaatggtttgatattgactattccgaatacaccctgaagcatgccgggtataatcatttgcagctggagcgaaaaatcgaatatctaaataagatttcagggttcagggagatttcggtttgcgaggacgtggatagtcattttcagtattggaaagagaatgtaaaccacagcccgaatgattgctgtaatttgagactataaagttaagccgcgcaaagttctttttcttgcgcggcttttttcgaatagataatcatttgtagaatatgtatttttcttcgcaataaatacaatgattttccttgcaatacttctcaactgctttgcgcgttttaaagtcttttatttttccatcttttgattgaatatgttccacattaaagtccttgtctatctttagaggaacaaaccttgtttgagtattaaatcgattcatgtttttagttatgattttatttctttttccattaatcttaaaatcctgttgaactcactacgactcatattggtaggcacaaaagatgcttttacctgttcaaacggacgaagataatgtttcaatgtctcttgagcttcctcccttgccttttgggcacacttttcaatatattcttcatctgtcatattataatcagtaacagtgtctatcaccgttgagaatcggcataaaagcccatttttttgtctcgctataaagcccatatcaatttagtttttattcaaattgactaaagttcataaaggcatacatcccagcattacataatactgcaataatcagttctctatccccaacggcaggtgataaattcaagctatcacttttgccagttccaattgtcactatctcttccgtacctaccaagcaaaatccagctgaaacaggttttgcaccatctatttttattgtagaatgggttatgtggtcgggaaagataataggcattttagaacctgtattcatttcttgaaatacaatatacttcatattaactcctttctaatttgttatccgttatacaatccaatactatcacgtttgcttcttatcacaacttttgctatctcatcaatattaatacataagagttcaaagaattttcttgtacatatatcctgttcttcatgcgtcatttgtctatcaataacaaaacctattgtttcatccatgcggtctgtaatatgatgcgctatccaatcatgtacatcaaatgttcctttagggtattcatcatctaaccctctaatagtccataaaccgccatccataagtatataatgacacaatattttgctcatgtataaatgtaaatcagccctttcgccacatccacgcccgggcatattgataaggatgtatctactgattgttttattcagtatcatccacaaaagatgtttctctctttcagtcatatttagctcctttctatcttgtattgaggattattcggtagcctttttgattgcatcacataatacatcataggcaggttcttctacacaaacatactttagagcttcttggcacgcttttaataattcaggagcagcagctataagttttgccctttcacgctgtcttttagttccatttttgtgccctccaagagaaaaggctacaacagctagaggaaactctacggatgtatcttcttttataaggattgcaccatcaggaaaattcgtagtaattgtttcgactgttttccattttactaaatcgtcttttttattcatatttcattgaacttgattttatttttggtataacttcgctcctgttttctcttttaccctccataggaagtccgcactctcatcactttctaccgtcaatattactgcggctaatcccggtgttttcggtttgcagaaaagtaagtcacagggcttgtcgtagtaattccagtaataaataagctccgagagtcggtcttcatctatttggataatgaatttaataggggggacgtttcattttcttttaaagaagtcttataggcttcttccatgcgttcaatctcttccacacattgcaaccatccgggaaagcctccgatatttttgtcatcgatataacaatgagcatatattttttttccgccatctccatacttcgctacatttttaggatcatggtcatttacccggtcaaatggaattttgcgttctagcagccagttgatagcgttcaataactgctcaccagtacggcatgtccaaataatgattttatgtccttggtcatgtaattttcggagtgattcaccagcgtatggctgctccccatcaatagccgggaactttccccggctaatagttccatcaaaatctacagcgataatcataaacgacagaatgaaggttcaatacgacgccagactccattttcgtcacgcttatgaaaatagtagttggtggctgttttatatacgacattactttccttaaatagttgcatgatagaggcatattcttcatcgaaacgtgattccagttcatacaacttgctaatagacttatagtccaaatcaccctgtcggttacgttcaagaagcgtcattgccatttgatacatcggatcatcgacccctttttctgaatgattaatatagttcttcagataatctatcaatcgttcggctgcaagatcagcacgctcgtcaaagcttttgaccttattgctttttacttccagtttgaaatttccgtctactactgaaaaggtggcagtttcttcaccttgacgaaggcgaagttgaccgtattcacgcattacgttacggaaagctttgctttcacccacaatccaatcataaaagccctgaacattattcactactggcatgagtttgctttccacatcgaacatgaattgatgtcttagtgcttcataggtttctctacggctgattaaatcgaccttttcctcttccttcaatttacggagcaattccgctttttcttcttttgacaatttactaatatccatattattaagttttaaatgattaattacaatttgattttatatacttctttcagttctcgttccttattttccgcttcaatgataagcgatgatctccggtctactaacttcgcaaactcgttacgatccatatttccggcaaacagtttctcatgtatagcatccagttcaccgggaatcctgtcaagtcgatccagtaactcgttaatccggttgatccggtgttgttccgcactaatatccgccatcttctttcttttttaatattgattccagctttgggatcagcaggagaagttcttccccatccagttcgcgaaatttctttcctgctatccgggtatcaaggcagaacgcatttacagccccccaatctgttgtatcgaccccgatctgctgcactctcttcaggacagccgacctgcgtcttcttatttcccgttcggtgatggtcaaatcccggttttcttttttcgcaccgttcaaatacccacagagatacattgcttcgctgtatgtcaactcttttgtggtatttgtccgtccgtccgttaggtctagcaggatagcccgcttttgttcgtcatcaatgccttgtgcgctgtatatgatatgcaggcgtttgataaggcttttactgataggtttcttcgttttctgttccatcattatcgcttttaatattttcaatccaatgtttttgatacccttccgcccatactatgtaatatccgcgtgaacctcctttgccacgtccgataaatgttgccttgaaatgttccacgtaaattcttttaaaactgtcacgtttcacgtcataggctgtttttccttccacctcgcgcccgtccacatgcgagataaagacaaatatctttcgtggatacttcttgcgcaggcggattatttcgggggctttcgcgcccccttgctgctcgaagtattgtatggaatctatcattatcacgtccgggctgcgttgctttgacaagtattcgtccaattctgtgatggtggcttcatccgaatagattatattatttgttttactatgaatgccgacactaagaacggaatttacgaagtcgtcacacgcacccatctccagtgttaaataaagaacccgaagtcccatttcatcaaatttgcgtgccagttgtagagcgaaagaactttttccttgtcccgactttccgtaaatgatccagcaaccggatctttccggacgaccgaatgccagataccattcaccatcaaaatctatatattcatgtcggatgtcttctaggttcttctgactccaaactttcatgccagttctccacgttcgatttgttgcttgataatacggtcttcgatcattcctgacagttcgcgcaaatcatcggtaaaccaaacaaactttcccggtacaggctcttttttctctttgttcagctttccccaaatggtctcctgttcttccatatcgttgatcccgtttgccgcacaaatagctttaacgtctttctttgtcgctccaagcaatgtgatatagttccggcaaaatctaccgtcgatttcgtcatatccttctatacgaccaacataacgcttgatattacgttccagcgtctctgtcccggctacgatagcccccatacggtgcaaagtgtcatcatataacggtatcaatgtacaaagggcactgtgcgccaatttcccggcatcatcaaggattaacaaaggtgatttacccgccatgcgattgaagtgggaaacgattaagtccattaaatcgtcgttatccatgtaacgtgttaccgtttcccccatacatgttgctaacttggtcagaaatttacgtgctgtccacttccgacatttcagatagaccaccgagttatctgcactcatgttataaaggtctatgagagattgtgtctttccacttccggatcgggaggatatacacatccatttatgattcttcttggctgctacaaccgcggtacgtacctgctggtaactggtgacgctttccaccacattccaagcgttctcgtaataattaagaccggaagcaatcttttcagcgatagagtcttcattcgccccatatttcccgcttctgaattgagacatggcagtatccgatatcccacatttccgtgccaattccgttgcagatgatccacggttgattaacttccctatgtacgtttttaatgcttgattatccatattgtatatctttttaaattgtttttaaatcatcttgaaaaattcatgtccagcgggttataatcgtaatcgtcatcatctccagtggaaaccattacgctttgttgggtaatacgctgggttacttccgtaaagtccgcgtccgtggcatcatccctcatttttgaccggacgtccttatgctgccctaaactgtcagtaatcaagtatcggtcaagaactgttgccgcagctatttcagggatacgctgacaaatggtagtgattcgtctgtctacgtctttcactttctcttttactgtttccaccatttcattgttgaacctgtcgacacgtgtccggtattcaaaatgttccggtttctgatcagccaaagccatcggaactttaatatcacgttgcagcacgtattgcaatgtcccaatctccttgtcaacacgaccggacttcaggcgttttgcgttcgatacaagcacctgactcatatcgtccgggtcaaagcgcactacccagtcttcgttgtaatggtcgcgaagagaaaggtcgaagctgtcgaagcagattcgttcacccatgaactcgataaacatgcccgaaccagtaatcttatttgtgcgtccggtagtttcccccataagcatcaaatattcctcaatgccgaaaggcattttacgtgcttcttcggtgcgttcccacgctgcgcggtaagcgtctatcttctttgcccgttcttgcgctataatagcctctaattgccctataacggtggcttcgtcaggaatgaacttgtgattttgatttaagacttccaaattaggctgattatccttgtcagaagtgataccaaagcctgaccagttcgcctgtttttggcagtattccacattcaggtgtttgaaatagggttctactactttagactttgcatttcccaacgcggctggtgtatagtatttagtcatagcttcatagaaaggaaccatcaccttcttttgataattgtcgctttgtagctgtaagggcttatagcgttctccaaatagttccttagtatgttgcactgcgtttcgtaatgcttcacgaataagagcaggtgattcatgatcgccaatggcataccctaccggatatttttcacatgcgtcaagtacgactaccatcgttttccggttggtataagtggtgtacatatatctcttttcctcaccgtttttctttaccgttttgggagtctttttctgatagaacagttccgcatcccatccgtccagcgtccagtaagtaagtgcttgtgtcggggcttcgcggtgtatctgcttcatgcgtgtgttcttcagggctttgtctcccttgtttcccgccattgttgtgagggcaaatttttgtctccagttctcaacggtggtaggactgtcaatcggtttccaatccatcagggaagccaccttattgtattcttccatgatttgaacattattcagattgttatgcatactgattaacttatgcatcaccgcctttgcgtcctcattcattacgactgccgcgtatttgttgccatacgatttgtgaatgacactgcgatagccttcttcctcactgatccgtcgtgctgcttcatattgctcgcatttacgtttcaaagatttccagttctttggtaggttatgaggaaaaatatcacgcccgttcgggtctttcaatgttagtaaatcattgctcaatttgcaaagtttttcccaaacattgattcgtgtacttcccccacctatcgagttaactttacgaccatcgcgaagggaaaggagcgcattcattatgcgcacattaagggtatattcgtcaaccttcgcaggcggaagtttcttatcaccatcatagcggtatttcacactgaaaaactcataggcagcgttaccgtagacaatagcatcttccagtatagacttctgtgttttagtagcaatttccgcacgagggtcacccttacgtacaatgtactctttctttacgtcctttctcatggtttcaaaatctactagggcaggacatccgggaataccacgacgaagtacgataagttgtccgttcctcgccatcgaatagtatgttccttcaggaatgaatccgtcttcactcccaactttcgttttaggattaaagatgattaattcatttgcaaacacgcaaatccgattattaaatatctcagccattatattaatattattatttgtgcaagttccggcactgccccggaattgtagctacttccaaatctttctgccattacctattgaaatacatggcaaattcaaattaatagttgttatcctgaaggaagctctattcttgcgttccgttattggttattcgaccttagttctcgttctatgacaataattacagaaagtattgttattacagtagccgcccacatgtttgatggctcaacctctatccggtcaactaatgcgatagcagtgactataccgactcctaccatcacgttttgaataaatctaatagttctcatatcgcagataaattattgattaataatgtttgtaacatttccacgagagtctaaaaccttcactttggatggttcattgccttcggtatatttaatacctccattttcttgtgccattttgcgaattgcttctgcattctttccattccgtttgaaacggagtatttgactaaggtttgcgagagatattccaaatgtttctgcaatcatctttcgttttttggtgtctcttaattcaattatttgtttcatacctttttatttttgagttattattcatacatttgagcgctgttaatctgtaacacgctgcaaatataatagagatatttcaattatgaaagaaaatacgagagatttttcagtattaaaacagagaatcctgcaatatttagattttaaggggatcacaaagtatgaatgttataaaaatacgggcataaccaatggtgtattaagtcaaccaaatggaatgtctgaagataatctattgaaatttctctcatattatagtgatatctctacggattggttgcttgctggatgtggatcaatgctacgcgatgacaatcaaacgaaaatctctaaaatagttccaatagagtcggaatttgagccaatccctatcgttgatatatcagtagctgcaggttatggatgtgaaaatcccgattttatagaagttgtggaaactatcagccttccttacaatatgctacataggaataaaaaatatttttgtgttaaagtacggggggaaagtatgtctccgacattattagactgttcatatctcatattaagattattggatcgaagtgaatggaatgaaattaaagacaatcatgtatatgtggtaagcgacagaggtggacgcgcttacgtgaaacgcataaaaaatagacttcgtgaacatggttttatagtttgtacctctgataatgtcgataaagctaattacccaaactttaatttgatggaagatgagattaataccgtcctatatgcggagtggtatttaagcgcaaagatgcctaatattaacgcaacatattatgataaagtaaaccatttagaagacgatgtggatgctttgaaaaatcagatgtctctacttataaaaaggttaacttaatatctagtattatttttttagcgtaaatgtatatattacagcgcattaactaatgttgtgtatatccaaaagatgtattaaagggtataactcaaggtgcatactagtattatagggtaaaactcgacaatagaaataccttttttctaatgggtgtttaatgggtgatattcacattttgtttttattttctaatgggtgtttaaagggtgatggcatgggtatacgctattttaacaataaattaaaccttttccataagtctgtatttatcacggaataaataaagaaaacattttatattctttgtttatttcgtatatttgcaattagaaaaacttccatatagttattatatggaagttttcagtattacaaacatctaaaagtaaggtcatggctaaagagactaaggttatacatgttcatctcattttcaaaaaaacaagccgtttttttggttctatatcagcaatctattctgaatttactgctgaagagataggtattacggaagaaaccctacgccataaggggttgtctgatggtgtttccttcgctactaaaaaagcgatcatacaacaaggagtacttattcgaagcgcgcgaaaatagtgttttaagctgccgtaacgtatttctatacctaaatcaacaaaggctatataccccatctaaatggagtgtatagcctttgttttaagcctaaaacagaagtaacatacaacctttccttcatcttttcattccgtctcttattgttttccctatttacagcgcagttcaccggaatgaatatagaagcaacggaagcaaaatagaaggaacggaactttttgttttctccccaaatatatcgcgagatattcgtcaatcaccgatatacaggcggtttcacgtacttcgccctacacatcgttcatgccacattttgtattgagccccgtaattcattagaaaataaagagatcatacgttccgtactggctatttttttgcagggaacgaaagaattgtataaacgctatggcaagaaactcgatgaacctttgagaagagaacaggagttgtacaggcagtttatacagttgttgatggctcattataccaaagagcatgaagtggcgttttatgcggagaagtgtggggttactgcggcacatttctcaagtgccatccgtcgggcaagcggatacagtccgttggcaatcattacagaaattattattatgaatgcgaaggcccaattgaaaaccacccggttgtcggtgaaagaaatagctttctcgttaggctttaacaatcattcttttttcaataaatactttcgtaaaaaggtgaagatgactccgctggaatatcgcgagaaataaatctgcgtctgcttaaaattggactatacataaaaatgggatgttttatacattctccctgctgtcaatcagagccggtatgcaagaggttgataaaaaatcgcttaaatatgtatcggggaaatgcgaaaagacagcgctttgctgatggaagatccttttggtacttatttgctttcagagtcggagtaaatgattgattcttttcctattatatagctatttgctatataaagaatcaatggattctgaagtgaattaacttagaaatggctcttctttcagcccaaaaatcctttctcaccgatgaacgctggcttggtcggtgagcaaggatgcgtttctcaccgaccaagcctgcgtttcattaaaagcaagggtgcatttataccataaagaccgtctgtttttccttgtatttatgcataataaggggctgtatgtgtataatcttgcattaatttatgcattttattctctgcttgatttgattcatagccactgtcaaacggtagaatcttaaaaatagaacaaaactgtttactgttgaaatccgttctttggtcgattctatttggaggaaaaaagctgcagtcttacttttgtttcgataacatggagtaatcccggaaaataactgcttaaaaaagcctcagaagctattcgtagctaatgaggctttttatttataaaggacgggtactcgtttatttgattcccagttttttagcaatctctttaggcagtgcgtctttgtgtacaagaatattcatagtcttgtaagcaacgaatgctttggaagcataccagataccattgtatttgcctgatttaccccaagaattcttcaccatgaagtattcttttccgttttggtctttagcgataccgtagattaccattccgtggtcgtccgtagtttcccaattgtcgaaagcaacttggcgcatttcttgagtgacatcgatttccgggtatggtttggttgtcatcatttgacgtttgttagcagcagtcaggccggtccagcgagccatatccgaaccggaaagttcagattctttgtttacatccggcataacggcgataccgtcacgtgtgaatccctgttcgctgacgtcgctaccccatgcaaaagtataacctttctttacagcattgtccattacagccatcagctcttcgataggcaggttgtaggataaaccattgcgccaattatcctgaatctcgattgcgaattgagaatagaatggatgatgtgtataagaagtcagtgatacatagtcgtcacagttcaatcccagtgattcagaaaaagtcttcggagtatattctttgcctttgtatgtgaatttctccgggcatgctcccagataagtatcataaatagcgcttagtccgtttttccataccggagtcagtttgctcaacttacctttcgcaatagcattgatgtaaccggaagcaacagcatccagctcgttatgcaccggcaacgtgtcaccgtacatgatacccggcatcacctcttgaggaacaataccataattcttgatgcagtacattacatcataaaaacttccgcccggggagaaagaactgtcaccatgatagcgtacatagtttactccgcgatcctgcatcgttttgtgtacgacaaacatttcagacaggtcatactcgcctttacctaagcgaagcaattctgattcaatgaatccgagagttgagaaactccagcaagtgctcgaacgattttgattcttgatagaagtaatcgggttttctttcactgtcgtgaaaacaaaaccttcttcaggttttgcatcttgtgccatgatgtttaggctgaacaagcctaaagcagcaataaggattgtctttttcattcctatgaaattaatattaaattgttttggctacaaatataggaaagtttcaccacagattacacagatttacacagattatttcaccacagaggacgcagaggacacagaggaagataaaggaaaattgagattaggacagactgcaggaagcagttaccgctctaactactggatttacgaccctttgacagacctgtgggatggggaggatttgaccgatttcgaaggaagcacacgctcgaaagctgtatgtttttctaccggaaaacggggaattatagctacaggaggatcttccacttattattacgatgatacctgggagttgaaaccatacgaatatgaagagaaataaaaaagtaataggtgttagttgctttgtcttactgcttttagtgggaatcatgtatgtgtatgtgcatccggtaaatagataccgtttggaagtgacccgggttggaggtagtgggtacggctataaaatttatgagagagagcgtttgataattgttcaaccttttttattggcacaatcatgccaccttactggcacgactgtgtcaatatggtggcactggagtgccaatacgatggcacaaggtaaagcattaagtacagattatttgttctcttcttctttgggtgctactacataatcttctttgataaactcatcatacacacgcttgggatgatcgaatggagcggttccattcttctgttcattgaagttttccctgcggaattgtttcagtttcaggttatcttctgcatactctctcaatttcttatgctcatttccgtagagcgaactttcagtcacgtcagaattgagcaggttttctttaggagtaatagtaggtaggagcacttgttccaacagaccacgataggcaccgttatattcgcaccatacaatatcgttggttacaaatatacgataggagtactttgaccatgcggttttgatttcaatagatgtagcataaatttcaatggtagcttctgaaccatacgcttggtcacggatcacaacggtcgtccgaccgctcagttcttccttcacggaagtttgccacttatcagagtgtaagatttcttcgataatttccggcaaattttctttaatctcaaactgtattctcatggtgcttgcctgcgggcaggacttttttgattttttcctccttaaacaattaagctagcctaaagttacatagattgaagcaaaaaaacaagattttgtttgagaatttgttattttcgccaaactatctgcctttttcgtttgtttttaccataaatatgcacaaatcgtaaaaataaagtttatgcggaacagggcccggaagaattatgtcatttatgtactgatgttactcctgtttggagggttgatttatgttgctattgaagagggtgaccggttttcgcactatgcggtaaatgcgcagaacatagtacaggggaatccattcactatgtttctccagtttatacaggataatcttcatcatccgctcactaccttgttgattcagattatagccgtactgctgatggtgcgtctttttggctatttgttcagtctgatcgggcaaccaggagtgattggagagattgttgccggtattgtgttaggaccttccgtactcggctttttctttccggatgcttttcatttcctttttccggcacactcgcttaccaatcttgaactgttgagtcaggtgggactgatcctttttatgtttgtcatcggtatggagctggatttcagtgtactgaaaaataaaatcaatgaaacgctggtgattagccatgccggaatcctagtacccttcttcctgggcatcttgtcttcttactgggtgtacgaagaatatgcagctgcccaaactccgtttcttccatttgctttgtttataggtatttctatgagtatcaccgcttttccggtattggcgcgcatcattcaggagcggaatatgacgaagactcctttagggacgctgaccattgcttccgctgccaatgatgatgtgacagcctggtgtctgttggcagtggtgattgctatctccaaagcaggaagttttgccagtgcactttattcagtggggctggcagttgtctatattgcggtcatgtttttggttgttcgaccgtttctgaagaaagtgggagaagtatatgccaaccgggaagcaatcaataaaacattcgtggcatttattctgctcattcttattatttcttcttgcctgaccgagattattggtattcatgcactgttcggagcctttatggcaggggtagtgatgccgtccaatctgggtttccggaaggtgatgatggaaaaggtggaggatatttcattagtattctttttacctctgttctttgccttcaccggattgcgcacggaaatcggtttgataaacagtccggagttgtggatggtatgtttactgttggtgacggttgctgttgtcggcaaactgggtggatgtgccattgccgcccgtttggtgggtgagtcgtggaaggatagtctgacgatagggacattgatgaatacacggggattgatggagcttgtcgctttgaatatcggttatgaaatgggagttcttcctccctctatattcgtaattttggtcattatggcgctagttacgacctttatgactactcctttgcttcatttggtggaacatattttcgtacgtcgggaagaaaaattatctttgaagcacaaattgatattttgtttcgggcgtccggaatccgggcgtgtgttgctgtccatttatgatttgttatttggaaagcaattgaagaaaaatcatttgattgcagcacactatacggtgggcacggatctgaatccgttgaatgccgaacattatgccagcgagagttttgctttgctcaatcaacaggcggcgaaattgaatatccaggtagataaccattatcgggtgacagacaaacttgtacaggaaatcatccattttgtccgtaacgaacatcctgatatgctacttttgggagccgggagtcattatcgttcggatatgccgggaactccgggagcaattttatggttaacgctcttccgggataagattgatgagattatggagcaggtg

SEQ ID NO: 8192 - DNA, 8199 bp, Unknown
  gut microbiota DNA sequence
agccatgcttttattgttggcactaccaatcggattcaatgttatggcacaagaaaccaaaaagccgacactggaagaattgattccgggtggcgaaagttaccgctatgcagacaacctgtacggactgcaatggtggggtgacgaatgtatcaagccgggtgtagataccctttattctatccaccccaaaacgggaaaggaaacaatggttatcactcgtgaacagatcaacaaagtgcttgaagagaacaaagcaggaaagttatcacacctgtattccgtcagtttcccatgggccgataagccacaaatgctattcaagatagcaggaaagttcattgtatatgatttcaagagcaatcaagttgtcagcactctcaaacccaaagacggagcagataatgaagactattgcgcagccagtggaaacgtggcatacacgataggtaacaatctgtatgtaaacgagaaagcggtaaccaatgaacccgaaggcatcgtttgcggacagactgtacaccggaatgaatttggtatcaacaaaggcactttctggagcccgaaaggtaacctgctcgctttctaccgtatggacgagagcatggtgacacaatacccgcttgtagacatcactgcacgcgtaggcgaagtgaacaatgtacgttatccgatggcaggcatgacgagccatcaggtaaaagtaggcatttacaaccctgctaccggtaaaagcatttatctgaacgcaggtgatcccacagaccgttatttcaccaatatcagctggtcaccggatgaaaaaagcctctacctgattgaagtaaaccgtgaccagaaccacgccaaactttgccggtacaacgcagaaacaggagagccgatgggcgttctctacgaagaaatgcatcctaaatacgtggagccacaaaacgcaatcatatttttgccgtgggaccctaccaaattcatctatcaaagtcagcgtgacggctacaaccatctttatctctttgatgccgatgcagccaacatgaaaggtgaaacttataacagtgccaacggtggtacttatttccaggccggcaaagtcaaacaactgaccaaaggcaactggctggtcagcgacgtcctaggattcaacacaaagcgtaaagaagtcatcttcacagccgtagaaggcttgagaagcggacatttcgctgtaaacgtgagcaatggaaagataagccaaccgttcgagaactgcaaagaaagcgaacatagcggcatgcttaacgcttccggcacttatcttatcgaccgttattcaacaaaagaccagcctcgcatcatcaacctggtagacaccaaaaacttcaaagaaacagccaatctgctgactgctgaaagcccttacgaaggctaccaaatgccaagcatcgaaaccggaacaatcaaagcggcagacggcaccaccgacctgcattatcgcctgatgaaaccggccaactttgacccggccaagaaatatcccgtcatcgtatacgtctacggaggtcctcacgcgcaatgcgtcaccggaggatggcaaaacggcgcacgcggatgggacacatacatggcaggtaaaggctatatcatgttcaccatcgataaccgtggcagcagcaaccgtggactggcatttgaaaatgccaccttccgccgtcttggcatcgaagaaggtaaagaccaggtaaaaggcgttgaattcctgaaatccctctcctacgtagacagcgaacgcatcggcgtacacggatggagcttcggaggacacatgactaccgccctgatgcttcgttacccggaaatattcaaagtaggcgttgccggaggcccggtaatcgactggggctattatgaagtgatgtacggcgaacgctatatggatacaccggaaagcaatccggaaggctacaaagaatgtaatctgaaaaaccttgccggccaactgaaaggtcacctattgattattcacgacgaccacgacgacacctgcgtgccacagcacaccctgtcgttcatgaaagcctgtgtagatgcccgcacttatcccgacctgtttatctacccgtgccacaagcacaacgtagcaggacgcgaccgtgtacatctgcatgagaaaatcacccggtactttgagcagaacttataaaactgacaaagacaccaccgtatccatacaaatcatagataacagtataaatccataacaatacaaagatgaagatattattactaggctcgggcggccgcgaacatgcactggcatggaaaattgcccaaagtccgaaagttgaaaaactatacattgctccgggaaatgccggaacaactgccgtaggcgagaatgtcaacatcaaagcaaccgattttgaagcaatcagtgcttttgctctaaaagagaacatccaaatgatagtagtaggtcccgaagatccgttggtaaaaggaatctacgattacttccaaaaccgtccggagctaaagcatattgccgtgatcggtccctcggctcaaggagcgcaactggaaggcagcaaggaatttgccaaaggcttcatgatgcgccacaacatcccgacagcccgctacaaaagcatcacttccaaaaacctcgaagagggcctcgctttcctcgaaacgttggaagctccctacgtactgaaggctgatggcctttgtgccgggaaaggagttctcatccttcctacgctggatgaagcgaagaaagaactgaaagaaatgctcggcggcatgttcggttccgcatcggcaaccgttgtgattgaagagttcttgagcggtatcgagtgctctgtattcgtactgacagacggagacaactacaaagtcctccctgtagcaaaagactacaaacgtatcggtgaaggtgacaaaggattgaatacaggcggcatgggtagcgtaactccggttccgtttgccgacgaagtatatatggagaaagtacgcacacgtatcatcgaaccgaccatcaatggtttgaaagaagaaaagatcacctacaaaggtttcatcttcctcggtcttatcaaggtgaaaggtgaaccgatggttatcgaatacaacgtccgcatgggcgacccggaaacagaaagcgtgatgttgcgcatccaaagcgacttcgtagagttgcttgaaggcacagcggcaggcaacctgaacgagaaaacactagtgatggacccacgttcggccggctgcgtcattcttgtcagcggcggttaccccgaagcctacgaaaaaggattccctatcagcggactggaacaggctgccgccaccgacagcatcatcttccatgccggaacagccatgaaagacggacaagtggtgacgaacggcggacgtgtgattgccgtttgctcttacggtgcaacgaaagaagaagcactggcacagagctacaaagtggcagacatgatcgacttcgacaagaagtatttccgccgcgacatcggatttgatttgtaagaaacaacctgtaatgatacgccacggcaggcataaatcccctatttgcacggcatatagatcctacaaagcgatgatatatgcccgccgggcagcaaaagaactgacagacaaatgagaaataaaagactacaaagtcaagtgacggcaggacggtggaccctgcctgccgttatctttatctgcgccctatgctgggtgttgacttactttttatttcccgactccatagcctcaacaacacccaaggagagctcttctttcttgcaatccacccgcgatctactgcttccgggatgggcagaacgaattgtcagctttctgatttacgcaatcatcggctattttctgatagaattgaacaaccagttcagtattatccgcatgagggcttccatgcagacagctatttatttcctgctagtcaccgtttgtccgggaatgcatttactatacataggagacattgtcgccctcggttctcttatttccatttattttctgtttaaaagctatcagcaagctcaagctgcgggctatctattctattccttcttctttatcggagcgggaagtattcttttcccacagctcaccatcctctcggtgctttggttgctcgaagcctaccgtttccagtcgctcactccgcgtagtttctgcggcgcgctgctcggatggatgctgccctactggatgctgttcggacacgccttcttctataatgagatggagttgttctaccgccctttcaaccagctattagctttcggagaagtctttaacttacaaatccttcaaccctgggaattggctatactgggctatctgctcgtgatgtttatcgtcagtgccgttcattgcatcgctgccggatttgaggataagatacgcacacgtgcctatctccagtttttgatagacctgacgctcttcctgttcctgctgattgccttgcaaccgatatattgcagtgccctgctgcctttgcttatcataagcaacagcatcctgatcggacatttctttgtactgaccaatagtaaaagttcgaatgtgttctttatcatttcattggtcggcctcatcctcttattcgcttttaatatatggacgcttttgtagattcaacgatacaactcctcatagaatggggacttccgggattattcatctcggctttattggctgggagcatcgtgcctttcagttccgaactggtactggtggcattggtgaagctcggcctgcccccgatagcctgtctgatagccgccactctgggcaatacagtgggcggaatgacttgttactacatgggacgtctgggtaaagttagctggattgagaaatacttcaaggtaaagaaagaaaaggtagacaaaatggtgaaattcctgcaagggaaaggggcattgatggcattcttcacctttcttcctgccattggagaggtgatcgccattgcactgggatttatgcgaagcaacacatggcttactattgtttccatgtttgtcggcaaactgatacgttatatccttctcctgtatgtgctcgaaagtgcctgggatgctatggcggggtagaggccttttttaagtattaagtattaggtattaagtattaaagattgagtgatggaaagaataattgagagaaccgatgacgggagcgctactctgtttgttccggaattgaatgaacattatcattcgacgaaaggggcacgcacggagtctcaacatattttcatcgatatggggctgaaagcctctcctgccgctactccacgtgttcttgaaatcggcttcgggacaggactaaacgcttggctcacccttgaagaagcggaaagaagcagacgaaatatacactatacagggttggaactctatccgctagactggcaaacagtagaacagctaggatatatctccagcgatgagcagcttaccatacatcggaagcaaacaacaaccgataagcaatttaccccgaatgaagaaaaagaacaacaaccggctatcgaattgtttaagcagcttcatacatcgccctgggaaaaagacgtgcagcttacaccgcacttcaccttacgaaaaatagaaacggacgtgaataagtggagagttgagaactctccatttaacctagtctatttcgacgccttcgccccggaaaagcaaccggaaatgtggtcgcaagaactattcaaccgtctctatgttttattagataaagacggaattctgactacctactgtgccaaaggtgtagtacgccgaatgttgcagacagccggattcacagtagaacgccttcccggacctccgggtggtaaacgggaaatattacgggcccggaaacaagagtagaaacaagataagattgaaaccccgaaacagaaaaaatcatgaaacaacaactaaaagatatgagaacacttttccttcttggtgcctgcctcctgatggcagcctgcacaggacgttcctcccaagcaagtagcgatgacgagacaaagccggtgataaccgtcacactggaaccgcaacgttatttcacggaggccattgccggagataaattcaaagtagtcagcatggtgcccaaaggttccagcccggagacatacgatcctatcccccagcaacttgtttctttaggagacagcaaagcctatttccgcatcgggtacatcggcttcgaacaaacctggatggaccgcctgatgaacaatactccccatatccaagtgttcgacacctcgaaaggaatcgacctcatactcaataatgatgaccatggtcatgcccacgaccacaacagtcacgacggccatatccacgccgtagagccacacgtatggaattctaccagtaatgctttaatcatcgccggaaacacctacaaggcccttagccaactggataaagcaaacgaaccatattatagaaaccgttacgattctctctgtcagcgcatccagcacaccgacagcctgattcgccggcaactctccacccccgaagcagccaaagccttcatgatttatcatccggccctctcctacttcgcccgcgactacggattgcatcagatttcgatcgaagaaggaggcaaagaaccctctcccgcccatctgaaagccctgatagacgtctgtcaggcggaaaatgtaggcgttatcttcgttcaaccggagtttgacaaacgcaatgcggaaaccatcgcgcagcaaaccggaacgaaagtggtccctatcaacccgttaagttatgactgggaggaagagatgctgaatgtagccaaagcccttgcgccgcaagctaccaccaaataaacgtataaagaaagaaccaatcaagccctttccaatgatgaaaccgataatcgaaataaagaatctttccgccggatatgacggtcgcactgttctccacgatgttaatctaagcatctacgaacgggattttctaggtattataggtccgaacggaggcggcaaaacaacgcttataaagtgcatcctcggtttgttgaaaccaaccggaggggaaattatattccatactcccgagaaggctcccataagaacatctacggaaggaacttcgacagaaacatctgccaaaaactcccaccaaagttcttccgcgaaatcccagcttttcctcggttacctaccgcaatacagcaccatagaccggaagttccctatttccgtggaagaagtgatcctatccggcttgagcatacagaagtcgcttacctcccggttcactcccgaacagagagagaaaggcaaacagattatcgcccgcatggggcttgaagggcttgaaagccgctctatcggacaattaagcggtggacaactgcaacgtgccctgttaggacgtgccatcatctcggaccctgcagtgttgattcttgatgagcccagcacgtatatcgacaagcgttttgaagcacgcctttatgagttattggctgaaatcaataaagaatgtgccattatccttgtcagtcacgacatcggcactgtattgcaacaggtaaaatccatcgcctgtgtcaacgaaacgctggattaccatccggacacgggcgtcactaccgaatggctggaaagaaacttcaactgccccatcgagctattgggacacggcacattgcctcatcgggttttaggggaacatcatcaccatcattaaagatgcaaatcagattcccctctcattatttaagtgttccaatgcagaatacaatatttaccaaagagccactttgcccaaagaaccaagttccaagcttgccgttttcacacccattgccttgaatgctcttacaatagtagaaaaggatatacttttcccactttctattttcgagatttgtgcccttttaacccccataagctcacctaattgttcttgggtaagattcttggcctctctcgcccgtttaatagcctcacctataagaaagttattaatatcagtctcatatttttcgcgtgctggagtaccttttgtacctatcactctatccagcatttcttcatgagtataaagtttcatttcttccatatcgttactttttagagttgaaatataattttcttaattcttccgctttcgcaatctcttttaacggtgtcttttgagtttt

SEQ ID NO: 8193 - DNA, 424 bp, Unknown
  gut microbiota DNA sequence
taagcggcacgtatggtttttccggatttaattgctataaattccaaaagagcctttgtcatcgtctccgaaatttaaaaacttatgcgagcctttaatgcctgtcgaccaattacccacgatattgttttcgttaagctcgatccagttatcatcatctttactacagctagttaagatcagaatagcaaaaagtgtaaataaaatgtttttcataataataataatttataagttgttttgttttagcttgtttagttgtttcttcgatggcttttggagtttttgaataaaaaagaaaacgctgatagccaagtttgcaacttaattatcagcgttttctttttcgtcggggtagcgggattcgaacccacgaccccctgctcccaaagcaggtgcgctaaccggactgcgctacaccccg

SEQ ID NO: 8194 - DNA, 23314 bp, Unknown
  gut microbiota DNA sequence
tcttttcaaaagcggtgcaaagatagggagtattttttaattaacaatagctaaacgaatgttttttatctattatttttcaatgccttgaatctcatagctttgcgtctttactttttttcttggcagagatcaaaagcatcatcggacgccgtaattcatctttcatgcccgggatggtatccagcaatctttcgtccggttgtggctctataagttcgcatatctcaaatccggtttgaaggagtccgtttatatacgtagtcagcgttttgtggtatttgacaacctcttcgcccagaaagattgctgtgcgcctgccttccgtaaaatagcgatctaccggccaatggataggcttcccgtcttggtcgtaatgccattcctgattgccataggctgtaaataccggatgttctacggagaagacgaaggcgcctcccggagtcaggcagttattgattttccggcatatatccgtaaaagattcgagataatggaaggttagcgaactgatgacaatgtcataagtatccggctggaaatcaaagtcttcgatagccatgcattggtattcaatgaatggagaaggattccttttccgggcttcttcgagcattttctccgaaatatcaattccggtaacgtgtgttgctccgtgttctatcgcatagacacaatgccaaccgaatccgcagcctaagtctaaaactcttttccctgcaaaatcggggagcattttctgcaatacatgccattctccggctcctttcaagccttccaccgagcgggacatttgagaatattgactgaagaaatcgctattgtcgtatttgttttctttcataatttaataagaggatgagttgaatgaaagcacaaatatatgatttaatttatatatttatagaaaaggtatacataaatcagggcaaccgtctcaaaagtttgtttcattagagcacagatttgaattaaatgctacatagtgaaaaacatctatcataagtatcattcattttaatagtattcttattatcaaaagaataagtatgatagatagctttaaaaaaatgtatctatcatacttttaccagcaaaaacaggttatctatcatcaatagaatagtcgaataaaggccctatatgcataagatagcttgtttttgttgcaatgaatccgtataaatccgatgatcacggcttaataatccaactttaatggcgataagtttatagcccacacctgtaaaccgtgcagcccgcatctgtaggctgtacggtttgcaggtgtgggctgtacagcctgcatacgtgggctatataaataccaccgttcccaatagattattaagctgtcaaatacaggttatcatcctataaaacgtgcatccctatgcctttaaatgggtaatctcacctaatactacactaaaaatagacaaagtataggcatgatagatagctgttttttgcaataaaagtatgatagataccttttttaaaaactatctatcatacttattcttttgataattagaattctattaaaatgaatgatagcatgatagatatttttttcactatgtagctattcaatttaaatcttgtatcggaatgaataagtccatagtgtggtatattgggggtgtggtttctttgtatatgaataatttgtgagtatgaactatctatcgatgttttctgttttataaataagaattttaaaatgaaaagccttatgaaaacaagaaaacaaaaagaaacaggtgaaaaagaagtccacttgttagagcaaaaaggatatgaaaaaatggtgaatgagattgttcccgttcaacaggcggaagtatatcgcaagccgactcataaagcagtcaaagaagctgtaaaggagctaaatccggatacaaatagtctgggcagcagaggatgatttatcctctactgcccagattaatccatcgtattaaaggatccggaagactttcggtggttctcatttagggaaagtaagaacaaaacagcttcctttccctaattctgattttacgttgatacttccgtcatgcaaagccatgatctgtttgcacaggctcaatccgatacccgaaccggatgttttggtagtgaagaaaggaacgaaaatcttatccaaaacagttggtagaattccctcaccattatcagatattgctaatgtcgggttgcctttagagaaaaactttatttgtatttctttatctgctttccgctcgcacgtttcgcgggcattttttaataagttgataagcacttgctctatctgtgcacggtctgcatataaatataaatcggatgcgggcatttcgaaatgaatatactcttccggaaataatttctttaagtccgtaaacaattcggcaacagatactttggtgcggacaggtgtcggaatacgtgtcagtcgccggtaattctccacaaatcccaataatcctttacttcttctgtgaatagtctgcatggcttgcaacatgatagaatactccttttctccgagtgattcggggattcctctttcacttaatgtttccgaaagagagataataggagtgatggaattcatgatctcatgtgtcaatacacgaatcagcttttgccaggcttccatttcatttcgttccagtacggaatggatattctttaaactaattagccgttgctttttgctttgtgtggcgaacgcaccttgtgtgacaaatgtggtgcaggaaattgccatttccagaacgatgccattttgctcgatgcgaataatggatatgtcattactggtagaagcctcctgaagaacttccggaagttgtgatagttgccccagatgagtgactgctgcctgattcatccattcgatatgcccggttacatcggttacgagtacggcggtatctactttattcaataaattctcgtaatattgatgcttgatttcttctgccaatagctttccccgaaagtcctttaatgcattagatagttcctgtgcccactcatccatcattttatttttaaaaggaggatgaagattctgcgttatatcgttgtatcggagtccatccgttaattgccgtaataaggcgatttgtttgaactgtattcggtagagatgtatgccgacgcctattagaaggagaatacagacggtagtactgaaccataactgcctttgatacagcagacaactgctaatggaaagtagaaagataactatgatgtgcagaattactttaaactcaaatcgtttcataagcctaatttttcaagtttgcgatataatgcaaaacgggtaattcctaaatattcggcagcacgggagatgtttccgttgctgattcggagtgctttctcaatggcctgtcgttctagttgttcgagattcagtaccacttcttcctcttttttctgtttggacgtggtgtgaaaaagaaagttttcaggtttcagcatggagccgtctcctaaaattacagcacgttctatcgtatgttgaagttcccttacatttccgggccatgcatatttcagcagtttgtttttggcttcccgggtcagtccgtgtattttctttttatatttacgggtataacggtccagaaagtgatctgcaagcaagatgatgtcattgccacgttcacggagtggaggtatatgtatttcaatcgtgttgatacgatataataagtcctgacggaaattcccgtcttccaccatctgacggatatcagcattagtggcgcagattaaacggacgtcaatgggaacggtttgcgtacttcccaaacgactgatttgccttttttcgatggcagtcagtaatttggattgcataggaagtgatagattgccaatttcatccagaaataaagtcccgttggttgctacttccattcgtccagctttcgatttcttggcatcggtgaaagcgcctttttcgaagccgaacagctcactttcaaacaattgttcggggatacttcccaggtcgatcgtgacaaaaggtttgccgtatcgtggagaacaacgatatattagtcgggcaatcacgtccttgcctgtaccgttttctccgagaattagtatattggcatctgtattacttagtttatttatcgtggtaaacacttcctgcataacagatgattctccaataatatcattttccgaagtattctgaccgctaagaacttccacttgttttttcaaaatgctgacttcctgttgtgactgacgcaatcgcattcctgaagtaagcgtagccagcaatttatccttttcccaaggcttgggaataaaatcagtagcaccagctttgatggcccgaacagctttgtctgtatctgcataggcagtcatgaaaataacaatagcctgtgggtcaatctgcaatatctgctttagactttcaaatccctcttgtccgctgatggcatcccgactgaaattcatgtctaataagataagatcaggatgaaaggtggtcatgaaatactcgatacggtcaggggtagtagctacttttattttttccgtataaggttctagtaacaggttgagagcaaagagcacgtcctcgttatcatctactataagtatctttcctaatttgttcacttcttccatatcttataatctattagattccgggagcaaagatatagataaatctcatgtgttgtgtgtgcgattgcgcactaattttgtgcgtatatgcacacacaatcaactgaagaaatactgataaattgttgaataatagtaatttatgcaaatggcacatcttttgaatgatgaataacaaataaagacaacgaatgaatctgaaattaatcttcatatatctcggactattgtcgacagaattattgattgctcaaaatcaaattacagagttgtcattgaagcaagtcatagaaatggcccgtatggaatctcccgatgcacaaacggcacgtcacagtttccgttctgcatattggaactataaatattatcgtgccaattatctaccgtctttaagtttgacattcgatccgaatctgaaccgtgccattaataagataacgatgggggacggttcggtaaagtttgtcgaacaaaatttattgaatacggatttaaccttgaatctttcacagaatttatcctggactggtggttctttctttcttgaaacctctgctcaacgtatggatttattcagcgaacataaatactcatggcagacttctcctattatgataggttatcgacagtctctttttggctacaatagcctgaaatgggatagacggatagaacctgtacgctatcaggaggcaaagaaaagctacgtagagacactcgaactcgtatcagccaatgcgattcataaattttttgccttggccactgcccaaagcgattacgatattgcttcctttaattatgccaatgccgataccctgtaccgttatgcacaaggccgttataatataggtaccatcacagaaaatgaaatgctacaactggaactcaaccgtttgacggaagagacgaatcgcatgaatgcccgtattgagatggataattgtatgcaggaactccgttcctatctcggtattcacgaagaccgggagctgcgtgttcttgtcagtccccaagttccggatttcagtgtgaacctgaatgaagcactggttttagcttacgaaaacagtccggacatacagacgatggaaagacgcaaactggaaagtgagagtgcagttgcgaaagcccgtgccaatgctggcctgaaagcagatatctatctccgtttcggattgacgcagactgctgacaaactgcccgaagcttatcgaaatttgttggaccagcaatacgtgagcatcggcatttctcttcctatcctggactgggggcgtggaaaaggacaggtacgagtagcccgttccaatcgtgatttggtgtacacacaagtagaacagagccggacagactttgaactgaacgtccgtaaactcgtcaaacaattcaatctgcaaacgcaacgtgtccgcatcgctgtccgtacagatgaaacagcccaacgaagaagcgaagtggcacgcaaactctacctattaggtaaatctactattcttgatttgaatgcctctatttcagagaaagacagtgctcgccgtaactatatttcggctttatataattattggagtttatattacacactccgtagcatgacactatatgattttgagcgaaatacgatgctgacagaagactatcatctgctgattgaatagagaacaacgaaaagtcagtaaagaatagaaattgaatcatagctagtagaaacttgtaaaacaccagataatttcatggatataaaattagaaaagaaaccgtggtacattcgttacagatactatctgataggagggatattgtttgtcgccttcctgatttatgtgattactttgtctttaggtcccagaaaactgcggatagatgccgaagatatacagattgcagaagtaaaagtgtctaatttcatggaatatgtggacgtggaagggctcattcagcctatactaaccatcaagatcaatacccgtgaagcaggaagtgtggaaagaattgtcggtgaagagggaagtttgcttcaacagggagacactattcttgttctttccaatcccgatttgcttcgtagtattgaagaccagcgcgacgagtgggaaaagcaaatgattacctatcaggagcaggagattgaaatggaacaaaaaagtctgaacctgaaacagcaagcccttaccaacaactacgaattggaacgcctgaaaaaaagcatcgctctcgaccgcgaagaattccagatgggcgtgaagagtaaggctcaattgcaggtagcagaagatgaatacggctacaaactgaaaaatgcagccctgcagcaagagagtctgcggcatgattctgccgttacgatgatacgcaaggaactgatccgtaacgaccgggagcgggaacggaagaagtatgaacgtacttgcgaacggttgaatagtttggtgattacagctcccttgaaaggccagcttagttttgtaaaggtcactccggggcaacaggtttcctctggtgaaagtattgctgaaataaaagtattagaccaatacaaaatccacacttcacttagtgaatattacattgacaggatcaccaccggattaccggctacagtgaattatcagggaaacaaatatccgctgaaaataacaaaagtggttcccgaagtgaaagaccgtatgtttgatgtcgatcttgtctttacaggagatatgcccgataatgtacgagttggcaagagcttccgtgtgcagattgaattgggacagccggagcaagcactcattattccgcgaggcaacttctaccagtctacaggcggacaatggatttacaaagtaaatacatcaaagacaaaagcagtccgtgtgccattgagtattggtcgccaaaatccgcagcaatatgaaatagtagaaggtttacagccgggagattgggtaattacaaccggatatgatacctttggggatgcagaagagttgattttgaaataaacacatataatttatgactttacattatataaaagtagcatttagaaacttgtggaagtacaaggcgcagaatataatctctgtcatcggattggcagtaggactactgtgtttcagcgtatgtatgtattgcagccgttttgtagaatccaccaatcattgttttgataattattcccgcatagcagaactaaatttttataatgaacagactggggattatttttccggtacacaagtagcgttatccgaagaacttcgtacttgggctatgggcgaagtggaagcgatttcctgtatggcatattcccgtgagcgttcttttctggttgaactatcttcggataaatcattgccatacgatcttgaaatcatggaagtagataccctatacgataaagtctttactccacaaatagtagttggtagctggcagacagcaagtcggatgccgaatgctgttattataagccggtccactgccataaagatatttggtcaggtggaaactgccattggcaaacacctgactctaacagaacggctttatacttctccggacagtaccccgaaggcaggaggtattgtgtacacagtgcaagcagtgatggaagatattccgctgaacaatggttttagttttatgtgtcatatcgatgcattggttatcaacgacagtgaaggactttttcagagtccgaaacgtaatgatataacgggggctcggacatacgttttgttatctccgcaggctggcattaccgatttcgaaaaacaattctccaagcgcgactatacttatatcttatataaccagacttataccgttattgcccgctatataggaaacctatcgcaggagaaaggtgcttatattttgggatgggtcaccggaatcgtcggtacattgatattgctggtcggattgattaatttctttcattttctcatcggctctttcttgaatcgcactaaggaatacgctataatgaaaatgcttggtgctgactggaaacggctgttctgcctgttattaatacaatctctgattgtcgtatttgcatcctcgtttctggttgtatggggtgtggagctgattggtgatagaatggatttttctttaccaggtctcacaatgaatttcccttctgaaacacttctaaagcatattctgcaatacattgttttgcttgtgttactttgtgtggcagtctgcttgctcgtctctgtccgtattcgcagattttccatacaaacaggtatatatggaggccaaaagcgtcgtgggaaacaatggggacgtaactttatgcttggcatccaatttttaatttgttgggtattcgtagcgctgaccgtcagcctgttcctacaatcgggaaagatgactgaaaccttattccatacgttaagtcaggaagataaagaagcgattcttagtataccgctggactattcattcctagagaataaagagaaactcgaaatggtggaacgtttcaggcagcatgccggtgtgaaagatattttgttatctgacatatcctatactcacggagtatccggaaacttattaatgacggagaagggaaatgataactcttggattgatatcaatgtaatgtgtgtaccattgaatttcttcaccttcatgaacattccgatgacggagggtaggacgatccggacaaaaaaggatctcgtaatggatgaagtttggcagaaaagacaaaagagagatatcatcggaatgaacttctacgactggaccagtgattttaccgtttgtggagtatgcgccccctttcagacagatgtacataataataatggcggatttgctttcacgctttatgattcttccgaatacgtagggcactgctatgtgaaatgttatcccgaacagcaaaaagaagtaattaaatggattgagactatccgtcgtgaagtgctgccggagaatattccctcccaagtacgtacatttcaggatgatttgtacgaagtgcaggcactggaatatatcctgaaagacatcatctcattttttgcaattgtaagtattatcattaccctgttgggagtgtattccagtattacgcttgatacagaacggcgccagaaagaagttgccattcgcaaagtgaacggagctggaatatgttctatcatctggttatttgcacgtttgtacctgattttgctggtagcgactgccgccatcgcttttccgctcatttacgtggtattgcaactgtggaaacaaatgtacaccgtattctttaatgatggaatattatactggggaagcatatttgggggagtaaccttattaacagtaatcaccattatttttaaaatactgaagattgcacgtatcaatcccgcagaagtaatcaaaaacgaataaaaatataattctaaaacaatacagttatgattaagaccattaacttacagaagattttcaaaacggaagaagtagaaacttgggcgttgaataacgtcagtatcgaagtgaaacaaggcgaatttgtagccatcatggggccctccggctgtggtaagtcaacattgctcaacattttggggctgctcgataacccgacaggaggggagtattacctgaatggaacggaagtctctcggtataccgaatcgcaacgtaccagtcttcgcaaaggtgtgatagggtttgtgtttcagagctttaatctgatagacgagttgaatgtatacgaaaacatcgaactacctttactctatatgggtatttccgcttccgaacggaaaaggagggtagaggcagctatggagagaatggctatcacccatcgtagcaagcattttccgcaacaactctccggtggtcagcagcaacgcgtcgctattgcccgtgccgtcgtggcaaaccctaaactgattctggctgatgaaccgaccggtaatctggactccaaaaacggtaaagaagtgatgggactgttgagcgaactgaataatgagggaaccaccatcgtcatggtgacccattcacaacatgatgccggttatgccgaccgtatcataaacctgtttgacggacaggtggtgactgaagttagtatgtaaacacaagctatcaataaagaatatatcatgataaaacactatctgaaagtagcctttcgcaatctgatgaaatacaagacacaaagccttgtcagtatcattggactggcagtcggcttcacctgttttgcgctatcggtattatggattcgttatgagatgacttatgatactttccataaaggggctgaacgtatttatatggtacgtgcacattatactgatattccggaacatatatccaattcaactccttaccctttggcagcctatcttcaggaaaaaatgccggaaatagaagcaaaggctactacttctatacatcagaatgtgaaaatccgcatggaaaatgatgagtatgaagtagtaatggctgcggcagattctgcttttatgaacttctttcatatacagttactgaaaggaactgtcaacttcttgaaagaaaataatcctgaaattgcagtaacggaagagtttgctaaaaagctttttggtagtgaggatgatgctttgggaaaagaaatggaggtaaacggacgttcccgtcaaataggggcaattgtgagtggatggtcccgccattccaatattccgtatagtgtattagtcgcagccaggcacagtcctcgatggaaaagtggtcctgaacaattatttattcgtgttcgtgcagggatggatatggatacattctggaaaaaaataagtaccatggatctttcagatattcaaaaagagagtgaactttcggatcttctgataacccggatttcagctttgcgttattctgattatgtttccaaaatcgatgttgtcatttccttcagctatattttctatttttccttagctggtggattagttatcatctgttcactattcaattacctgactctttatatcagccggctttatatgcgcagtcatgaaatggcacttcgtaaagtgaatggtgccagtaataacgctttgtccgttcaatttgccattgaactgttgatgattttgtgcatagctttggcgggtggattattgatgatagagataagcatgccttatttcttgaatttcactcaaatagaagctgattcgtattatggggaaatcattctatatcttctgattgtaatcattctgtctttcctgtttgcacaaataccattgtcttactttcgtcgccggacattgcaggaagcaataaaaggaaaggggggatctgcgagaccttacttgtttcgtaagacaggcattgtgatacagttaatagtcagccttgtttttatcttttgcacagtaatgattatgaagcaactttacttcctgaagaatactgatttaggtatggagcgtcataatataggtaacgttgccttatggaatggagacatcaaacaatgggaagagaaaataaaagctttacccatggtaacagaaacgttgcctccctcatatttcccgattattcctacaggtccgatgatgtatatcgaaataaataattgggatgatcttctcaaaatatcggaggaatctctcactatcggtatgatgcctgccaaagaagatttttttgaattttacggcttgaagttattggaaggtgagtttatatcagataagaatcaagggaatgatgtcgtgatagatgaaaatacatgccggagatttggttggaaacaggccttgggaaaaagtttctattatgagtggaacggtcagcgtagtgcctataaagttgtcggagtggtaaagaactttagttatcgctctcctacaagtaaaccggggcttattgcatttcaacatcccaaggcacaggagtatctgctgaatcgagccagtatcctttttaaatttagagaaggtgcctggaatgaatgccgtgaagcaatagagaaactgtataaagacgaatttccaaatgcttatatgcgattgtttaatgaagaaaaggaatatgataagtatctccgctccgaagatgcattgatgaaattattgagtatcgtatcattgacatgtgttatcatctccatattcggagtcttttcattggttactttatcgtgtgaacaacgtcaaaaggaaattgctatacgtaaagtgaacggagcacaggtctgtcatatcctgcgtatgtttttccaagagtatttgttgttgatgaccatatctgccgttgttgcatttccgataggatatgtggtgatgagtcattggatcgagagttatgtaagacggacaacaatggatggttggatatatataagtatttttgttgtcgtagcagtcatcattttactttgtatcattggacgagtgtggaaagcggcgcgacagaatccggcagaagtaatcaaaaacgaataataaaataacaatatcatgataaaacactatctaaaagtagcctttcgcaatctgatgaagtataagccacaaagttttgttagtattatcggattagcagttggctttacttgttttgcgctatcggtattatggattcattatgaaatgacttatgataattttcatgaaggagctgatcgcatttatttggcaggcagtagctttcatctttatggagacggatttacctataattcatctagttttttagctgattatttggcaaagaattgtccggagatagagaaagtatgtcgcatttattatgattgggatgaaaaaaaaattaagaatgaggatgccgagtttgtggtacgacgtatagaggtagattcaaactttatttcaatgttcaatattaaagtattggatggagataaccatctacagctaaaaaaggatgaaattgctataacagaaaatatggcaaagcgaatatttgggaaagaatctccgataggtaaacacttgattttagaagaaagtaacgaagagaaaataattatcgcagttgtaaagtcatgggaaggacactctttgttttcatttgatatattattgccatttcatgatgcaaaccctaattgggggaatcagcgatgccaaacgctttttcgtatttatcccaactgtgatatagaagcattgaaacagaggttgtcagaatatgaagtacaacaagatggtcataaatatccaaattctacgcttattgctccattatccacattgcggagtagtcatccgagggaagatgtgaatgtgaagttgaatcatattcgtctttttgcatgtattagtggtttggtgataatttgtggaatatgtaattatttaacaatgttgataactcgtatccggatgcgtaaacgtgagttagcgttgagaaaagttaatggttcatcaaatggaggtttactcactttgcttcttacagaacttgtcttattactaattctatcttcaggaataggactggtattgatagagcttatcctgcccactttcaaacgtttgtcacaaattgatgagggtacttcatctttttatatcgaagtatttgtttatatactatcattgattgccgtgacagttggttttgcatctctgcttatacgatacatcagcaggcgaactctacttagtaatataaacaagaaatccaatcttcatctctccggctggttttataagagtagcattttatttcagttgtttattggtatagcctttgttttttgtactttggtgatgatgaagcaacttaacttcttgttgaataccaaagaacttggaatagaacggcataatgtgggagctgttgtttattgctctgaaaatgttccttttaaagaaatattagaacagatgcccgatgttacaaagtatttgagtggctttcatacacctattcccaaaatgtatttttcaacattcaggataaaggagtgggaaggaaaggctactgatagtgagcaatatatagatatagaagatgagacgatcaatcaagagtatgccgatttctttggagttgaggtgctggacggaagcatgctggatgaaaaggatggaaaaaatatggttgttataaatgaagctgctgtgaaagctttcggatggacacaaccgattggaaagaaaattgataaattaggaaggcattatatagtgaaaggggttattaaaaatatttcatataatgccccaatacacccggtagcccctgctatgttttttttgccggataatataggcagaggaggcattattttcaaggtgaaggagggaacttggaatattgtttctgaaaagataaaagcggaagtgaataaagttaatccaaatgcagaattgatgttgtctaatattgaagaagtttacgacgcttacatgaaatcagagagaacattgtgcaaactgttgagtgtggtttctgctatttgtatattaattgcggtatttggtatattctcgttagtgactttatcctgtcagcaacgtcgtaaagaaatagctatacgcaaggtaaatggagccaatataggaataatcttgaatctattctttaaagaatatttatttttacttgtactttcatcgttctttgcttttccgctaggatatgctatgatgaagcattggcttgaaaattatataaagcaaacaccgatggaatggtggttatatgcagttatatttataggaatgggccttgtcattttcttaagcatcatctggcgcgtgtggaaagccgcccggcaaaatccagcagaagtactcaagagtgaataagataaaataaaagtccggcacattgatttgtgtcagacttttattttattcacccaataatgagtgacatatttttcgtagattataaaagatctaatgctttaaatgccttaactagcttttctacagcacggtctatttgatcttttgtatgagtagccattaatgctacgcgcaccaaagtatcttgcggtgcacatgccggcggaataaccggattgatgaatacaccttcatcaaaagctaatttggtaaccataaacgttttttccgtgtcacgtacgtaaagagggatgataggtgattctgttgcaccgatttcaaagccagcttcacggaaacgtttcaatgcatagttggtagcttcccacaatgcttcaagtctttccggttcattttggatgatgtggagagcttcgagagcagatgcagtagcagccggagtgttggatgcactgaaaatataagtacgtgcgttgtgacgtaaccagttgatgatagaagaatcagcagcgataaatccgccgatagaagccagtgacttgctgaaagtacccataatcaaatcaacttcgtgagtcagaccgaaatggtcgcagacgccacgtccttgttttccgaatacgcccaagccgtgagcttcgtctaccatgatagtagcgttgtatttatgtttcaagcgtacgatttcgggcaagtttgccaagtcaccttccatagagaacacaccgtccactatgattagtttcactgaatccggattgcacttttgaagttgcttttccagatctgccatatcgttatgcttatattttaattgttgagagaaggagagacgacggccatctacgatagatgcgtggtcgcggtcatcgcaaatgatataatcattgcggtctgtcaaagcaggaataactccggaattcaccgtaaaaccggttgagaagcagagtgcttcatctttgcctacaaaggcagccagttctttttccaactgaacgtgcaggtcaagcgtaccattcaagaagcgcgagcctgcgcaaccggaaccatatttatgcatggcgttgataccagcttcaatcactctttcatctcccgtaaggccagtgtatgcattggaaccgaacatcaacacttcgtgtccgcccatttctacctctgtaccctgctttccttctatctcacggaaatatgggtaaacgccctgtgccataaacttttgtggcaggtcgtacttagctaacttctcttgtaataatcccatgaattataatttattatactcatactcagatcgttcgctgacgatcttacatccttttatcttaacaagtgtttaaaaacagggggcaaagataacaaaatttgcttttatctgttctttttaagagaaaaaagttgctctcgtatgattagaaacctctaatagattaaaatttaagatatttatattacttttgtcgtctacaatcgacaagaatagcatgaacgaaagaatgaaaaaaataaaattcgtcgtcaatcctatttcgggaacacaaagtaaagaattgattcttaacttgctggacgaaaaaatagacaaggcgagatactcttgggaagtagtgtatacggaaagagccggtcatgcagtagaaatagctgccaaagctgccgaagagaaaacagatatagtagtggctattggtggggatggaacgatcaatgaaatagctcgttcgttggtgcatactgataccgcgctgggaattattccctgcggatcgggcaatggactggcgaggcatctgcatataccgatggaaccgaagagagcattggaagtgctgaacgaaggttgcatggatgtgatagattatggtaagatcaacggtacggattttttctgcacttgcggagtggggttcgacgcgtttgtcagtctgaagtttgcgcatgccggtaaacgggggctattgacttatctggagaaaaccctgcaggaaagtcttaaatatgagccggaaacgtacgaactggaaacggaaaacggagtctccaagtataaagccttcctgattgcctgcggaaacgcgtcgcaatatggaaacaatgcttatatcgcaccgcaagccactctgacagatggtttgctggatgtgactattctcgaaccgttcaccgtattggacgttccttcattggcctttcaattattcaataaaacaatcgatcagaatagccgtatcaagactttccgctgcaagcagttgtgcatccgccggactactccgggcgtcgtgcattttgatggtgaccccatggaaacggatgccaatgtaaatattcaactgattcaaagaggattgcgcgtggtagtgccacgagcaccggaaaaggacgcagccaatgtgctccaaagagcgcaggaatatatgaatggcatcaaattgatgaatgaagccatcgtcgacaatataacagatagaaacaagaaaatattgaaaaagctgacaaagaaagtctgataaaataacggattactgacaccgaattacaaattattgcgtacttttgcgcagttttggttcgatcaaaataaaaacgcgagtgataatcgtttaaataaaaaatatatgtttagaacgcacacatgtggagaacttagaatctctgatgtaaacaagcaagtcacgctgtccggatgggtacagcgcagccgtaagatgggagggatgactttcattgaccttcgcgaccgttacggaattacccaattggtttttaatgaagaaattaatgctgaactctgtgaacgtgctaataaattgggacgtgagttcgtcattcaagtgacaggaacggttaatgaacgtttcagcaagaatgcaaacattcctaccggagacattgaaatcattgtttccgaactgaacgtactaaatactgccatgactcctccgttcactatcgaagataacacggatgggggtgatgatatccgcatgaaataccgttatctggatttacgccgtaacgctgtacgttccaatttggaactgcgtcataaaatgacaattgaagttcgcaaatatctggatagtctgggtttcatcgaagtggaaacgcccgttttgatcggttctactcctgaaggcgcacgcgacttcgtggtgccgtcacgtatgaatccgggacagttctacgcacttccgcagtctccgcagaccttgaaacagttgttgatggtttctggtttcgaccgttatttccagattgcgaaatgtttccgcgacgaggacttacgtgccgatcgtcagccggaatttacacagatcgactgtgaaatgagcttcgttgagcaagaagatattatctctactttcgaaggaatggctaaacatttgtttaagactcttcgtggtgtggaactgaatgaaccattccaacgtatgtcttgggcggacgccatgaaatattatggtagcgataaaccggatttgcgtttcggcatgaaattcgtggaactgatggatatcatgaaaggtcacggattctctgtattcgataatgcggcttatgtgggtggtatctgtgccgaaggtgctgcgacttatacccgcaagcaactggatgcattgaccgaatttgtaaagaaaccgcagattggtgcgaaaggaatggtttatgcccgtgtggaagccgacggaacggtgaaatcgagtgtagataaattctatacgcaggaggtgctccagcaaatgaaagaagcattcggagctaaaccgggtgatttgattctgattctgtctggcgacgatgtaatgaaaacacgtaaacaactttgcgagcttcgtctggaaatgggggctcaactgggattgcgtgataagaataagtttgtttgcctttgggtgattgacttcccgatgttcgaatggagcgaggaggaaggacgcctgatggctatgcatcatccgtttactcatccgaaagaggaagacattccgatgttggacactgatccggcagctgtacgtgcagatgcatacgatatggtaatcaacggtgtggaagttggcggcggatctatccgtatccacgatgcgaaattgcaggcgaagatgttcgagattcttggattcactccggagaaggcagaggcacagtttggcttcctgatgaatgcctttaagtatggtgcgcctcctcacggtggtttggcatacggactcgaccgttgggtgtctttgtttgcaggattggattctatacgcgactgtattgcgttcccgaaaaataattccggacgtgatgtgatgttggacgcaccctctgcaatcgaccagagccagcttgatgaactgaatttgatcgtagatttgaaagagggcgagtgaaagaatctgtacgcatattccgttttatagtcatcggtacaatgaacgctttgattatggcgttggttgtatggttaatgatgaaagaaatgtcatttgacggcgactatatggtggctaatataacagcgtatctgatagctcaaatccataactttatctggtgcaaatactggatattccccgtagaaaataaaaagaatagtatctggaaacagatactgctcttttgttctgcttttgccgtggcttacaccgcacagtttttatttcttatcttattggtagaaggactggacatgaatgaatatctggctcaattcttgggattgtttatttatggaggagctaatttcctagccaacaagaaaataacttttcaatgaaatagttattaaatataatatatagaaagggcacagagttttaaatttagatttagactctgtgcccttcttattttcttactgcagcagggacgtttctcacataataaatataatagggactgtctgacaagtccctcattaataatttcacccacgctataactatctgtagcgtgggtgattttcaatatttagaattcgttagacagttcctttttggtattgtgatatttataaatattctctctcatttctttgggagtgaactttttagagaacttcagcattgaactttagtcgaggaagcgtttggtaagcccttcgtattcgtcaatccggcgatcacggaagaaaggccaccagcggcggacgttttccgagcgttccatatctatttccactaccatgttttccggatgatcgtttccggcttgtgccaggaattctccttgcggtcctgctacgaaactgtttccccaaaataggatgccgtttgtctgtccggaaggatcgggctcgtgtcctacacggttgacggagataacaggaagaccattggcgacggcatgagcacgctgcgaaataatccaggcgttgagttggcgggctttttcgtcgtccgtgtcactgctttcccagccgatggcagtaggataaattaaaagttccgcacctttcagtgccatcaggcgggcagcttccggataccattgatcccagcataccagtacgcccagctttcctaaagaggtttgaataggttcaaaaccgatgtctccgggagtgaaatagaatttttcgtagtaagccggatcatcgggaatatgcattttccggtatttacccacaatgcttccgtcgcgatcgaatacaacagcggtgttatgatatagtccgggggcacgtttctcaaaaagagaggtgacaaggactactttattggcggctgccaactcggaataaaagcctgtggatggtccgggaatgggttcagccagatcaaacaggttagtgttttctgtctggcagaaataaagtgagttgtgtagctcttgaagcacaatcagttgcgcaccgtgagcagcgcaagcctcgatgctctttgcgaggttcatcaggttgacccgaatatctgcggtattggattgttggatgattccgacttttatctttttcatgatgaataatttcttagttgatttatttgttattttataactcccaatgggtattgcatggtgacacaatgcagggaaccgtgttgcttaatcaaggcacggcagtctattccgattatttgatggtctgggaatgcttgttgtaacacttctcttgctttttggtcattcgctggctgatggtatgtcgggtagagaataacttcgttcataatcaggaagttggcgtaagttgcgggcaggcgttcgccgtcttcttcgatcttgttcgccatcggtaaggctaacaggcgatagggttctcctgctagggtgcggaatgttttcagctgttcctccattgcgagtaatgcttggtagtgttcgtcttctttgtcgtcgcattttacgtaagcaatggtgtcggtagaacagaaacgtgccaaagtgtcgatgtggctgtcagtgtcgtcgccggcaagatagccgtggtctaaccaaagaaccttttgcaggtggaaggttgatttcaggtattcttctatctctacctggttcagtcgcccgttccgctggggagaaagcagacattcggaggtagtgagcagtgtgcccattccgtcgctttcgatggagcctccttcgagaacgaagtcgaggcggtctatatactggccttttaaggctccggcttctaccgcttgtttggtgatttgattatccagttcggaagcaaatttcagtccccagccgttgaatgtaaagtcgagcagggaaggggtgccggtgtctatcatggtgatggctccgtggtcgcgtgcccatgtgtcattggtggcacattccagaaagcggacgttgttcatgttgacggtagcggctatctgttttttcacttcttccggttcgggggtgacaatcaatagtaactctcgcttcgctatttccctggctatgtttataaaacactcttgcacttctgccagcatgtatgcccagtctgtaccggcgtgtggccatgtcaactgtataccactctgcgtatgccattcggcgggcaaatgaggtgctctcatttctacctgcacagtcatgtttttgccgaaattcaactgcaaatctttctccgagccacttgggctgggaagtccaaccatgattcccattagactattatctattttagttatttataaaatcagtttattgtctgcgtcagtcgtcagtgtgcctgttacgcatcattacgtattattatgaattcgtttcttgctttggcttccggtcaaagaacggattcttagaagatgcacttacagggatggccattaccatcttgcagtctttcagccagttcagacgttgtgttgccagcccggcagagaacatcacacgtgtgtctacacgcaaatcggcggcagtagcgcaggcggaacctatggcgatacctacgtctatgctgttcaatgcgcagggaactccttcggtacgtccggcgcaggtggtgaagccgcaatgaccgcagtttaagccttgtgtctgctcgcgtgttcctatcaatacaacacattcggcacttaagatgttgtcggcatcacgaaggaaaaatttcattccgtgttcttctaccatagctatcatagtgtccgatagttgtttaatctcttcatccgtgattagggccacttcgataatatcgattccttttcctttcggagcagtacgcgcagccgtcatcatctggcgggctacttgtaatacatgctcatgacgggcatctctttcgttcagtatcataacttttcttgaattaattagtgaggcaaagataaatgaaaattggtaaaacggagcgaaatgatgaaagaaatagaggctgtaattctgtttatctaatcactccattatac

SEQ ID NO: 8195 - DNA, 4983 bp, Unknown
  gut microbiota DNA sequence
gttctttgatgattgttggaatccggagtcggcttatggcaagcaaccggaaccgaagacgggtgtacataattccggctgggtgcaggacccttcgtgtagtttgcgtaaagacacactgacgttgtatccttttctacaagagtatgtaaaagatattgtccgaacctatgctaacgatgaccggatattgatgtgggatttgtataatgagccggggaatagtaaacacgaggaaacttctttgcctttattgacgaatgtctttcgttgggtgcgcgattgtaaaccgtcacaaccgattactgccggtgtatgggactataattctccccggaagaatgttctgaatgcgtttgtgttgaatcattcggacatcatctcttaccataattacgataatgaggagcggcatggcgaatgtatcaaatttttaaagatgcttaaccgtccgttgatttgtaccgaatatatggcccgtcgcaatgacagccgcttttgtaatgttcttcctttgatgaaaaaagaaaaggtaggcgccatcaattggggatttgttgcaggaaagacaaatactatttttgcctgggatgacgttattccgtcgggtgaagaaccggaattatggtttcatgatatttatcgtcctaccggagtaccttatcagcaggaagaagtcgattgtattcaatccctgacaggaaaaagatagaattacgtattcttttttatctctgttttttagttttcatataggttgctatactatattattttatttttgtatcgttcttctataatttgataactactataattaaaaccatgaaaaaactgaagattttattattcttatgtattgtcgcatgtacgcttacggtacaggcgcaaaaacaatttactttgaactctccggatggaaagcttcaaacgacgattaccgtaggtgataagctgacttatgacatccactgtaacggacggcagatccttgctccttctccgatttcgatgacattggataacggagaagtctggggagagaaagctaagttgtccggcacttccgggaaaaaagtagatcagatgattccttctcctttctatcgtgccagtgaattgagagaccactataatgaactgactcttcggtttaaaaaagactggaatgtcgagtttcgtgcgtacaatgatggtattgcttaccgctttgtcagccgtgcgaagaaacctttcaacgtggtagatgaaacagtagattatcatttcccatccgatatggtagcttctgtaccttatgtaaaaacaggaaaggacggtgattataactctcaatatttcaattcattcgaaaatacttatactaccgatccattatcgaagctgaataaaaaacgtttgatgtttttgccattagtcgtggatgccggtgaaggcgttaaggtttgtatcacagaatccgatttggagaattatcccggcctctatttgtctgctattgaaggagaaaatcggttgacgggacgtttcgctccataccccaagaagatgatgcaaggcggacacaatcaacttcaaatgttggtgaaagagcatgaaacttacattgccaaagtagataaaccccggaatttcccgtggcgcatgagcattgttaccacttccgataaggatttggcagcaagcaacttgagctatttattggctgccccttcccgtttgacggatctttcatggatcaaacccggcaaagtagcatgggactggtggaatgactggaatttggatggcgttgattttgtgaccggagtcaataatccgacttataaagcctacattgattttgcttctgcaaacggcattgagtatgtgatacttgatgaaggctgggcggtaaatctgcaagcggatttgatgcaagtggtgaaagagattaatctgaaagaattggtagattatgcagcctccaaaaatgtgggtattattctttgggccggttattatgctttcgaacgtgatatggagaacgtttgccgtcattatgccgacatgggagtaaaaggttttaaggtcgattttatggatcgtgacgatcagcttatgactgcattcaattatcgggctgccgaaatgtgtgctaaatacaaactgatcctcgacttgcacggaacgcacaaaccggccggtttgaatcgtacttacccgaatgtattgaactttgaaggtgtcaatggtctggaacagatgaaatggagtccggcttcggtggatcaggtgaagtatgacgtgatgattcctttcactcgtcaagtatccggtccgatggactacactcaaggagcgatgcgcaatgcttcgaaaggtaactattatccttgcaattcagaaccgatgagtcagggaactcgttgccgccaacttgctctgtatgttgtatttgaatctcctttcaatatgttgtgtgatacgccgagcaactatatgcgcgaaccggaatcaacaggatttattgctgatgttccgacagtgtgggatgaaagtatcgtgcttgatggtaagatgggagagtatatcgtaacagcacgccggagtggaaatgtctggtatgtaggtggaatcaccgattggacggcacgtgacatcgaagtggattgctctttcctgggtggtaagacgtatgacgctacattgtttaaagacggagcaaatgctcaccggatcgggcgtgattataaatgtgaatccatccggataaaaaatgacagtaagttgaagattcatttggcacccggaggtgggtttgctttgaagattaagtaaacaaccactttatacactacattgtctattaaatcttgaaatagatttgatatatctgcaataggttggataagggtgcgtccccacccttataaacgaagaataaccctcgttacaactatctgtagcgagggctattacattaaaaagagagttctggcacattcctgtcagattcttataagcaagtcgattgggaggatcaccctgtaatgacgatgataggcagggaggtgtcaggataaagccgcaatacctgtccctatcaaattggcattattcatgcttttgatatcaacctctacatcttccaaaccaaacaaactgaaaagctcccgtaatttttccatgacaatcatgttatagttcttctcttttctgttcttgctccaaaaaaggctgccttcggcaaccaggcaaattttccgtatatccttgttgtatgacttcaacaacatgataagccctgtcagtgaagctgcaactaactgtgctgatctactatatatccactgtgctacttctacatacacctccttataaatatcgggataattcataatagaggtgagcttttgtgcatcaaacttttcttcgaactcttccaatgggaaagtggcttttagaatatctcccaggtacataccggatacagctttttcgaaacgttgttttcccggatttccggagattccatctactgtattatccactgcagtgaggaacggtgggtgaaaattgccggattccagattgacgggaatcaatccatctactttatgtgacggatttaattttttaattttgtcagccggaataaaagttgccatattggtgcctgttcctacaatcagacctatatacgcatcgtaactactgtcggtaagtccggcaaataaactggcaacagtgtcattgagcacttttatgtttgtaaacttgattttatttctttcattcagatagtcgagtaaaggttttccaacaacttctccgatcatctcttttatatcaactcctttggtccaacgcagcagtttagcatctccacctgggacggactctgtcggataagaaaaacaatatccaattggcatctctttttcccgttttattccggttatcatatctgccatttctttgaacaactcctctcgggtataaccgggagttttcataatcgacatgtcctttttccaaccattgttaggatgaatggtgggaggcattttgctgaagtcaacgattgctacccggtaattcgttcctcccaagtcgagtactaatgatttgccattgataccacttgctttcggagtgatgaaagtgggaatgcattgtatctctgcattttcagtgttcaaaccttcttctactttcgctttaaatgagcgagcaatttctttgagctgctcattatctaactgaaaaatatttttctccatgatattattttttattgtatagaatatgtttatgtatgaataacaactgaaaaggaattttgctcggtgggtatacagtatatggctccggccggatttctggatttatctctttctttttgctcttttcctttttgctctttcttaaaaaacgcaaaattcaggttacttacgcacactttctcctgtcgcctatttttcacttgcatttctcatattctcattgtttttcgataaacgaaagataatcaaatagatatattatgagaaatacttttcaaaacggcatttctcataatattaccagctttttatgctgaaaatagtgtatttctcatagactttttttttattctcatattccttttatgcattttctctatttcttgttttttgtggtcgtcattctgttcctcccagtctttttccggactgattgttattcttccttttttatataagtaactttttataaagcaattaccttgccttactttactgctttcctgtattaagttctccttatccctttatattttatcctaatcattgttgtgttttgctataagtatttgtatcgtttcactggagtgggcagatcattgcactctagtgaacggtactgtctactctagtgcacagacctttccactctagtggaacgatatggctgcttatacataaatatgctaatgtctactctttatactccgcatgt

SEQ ID NO: 8196 - DNA, 2447 bp, Unknown
  gut microbiota DNA sequence
atgaaaagttgcaaaagtaccctcaccaaccctcacctttttgcgtgcgaaggagacgaaatcttattcatatagcctgtttgatttcacctgttccgtatcaataatgaatacagtgtatcttctcccgttttttcccttatgaaattcgaagccgtgtttggacatcacttttcctagttgggctttggttccgtgagagtattgataccccgttcgttcgcgaatcaattccgcaatttcagtgaccgtcagataatgcaccttttcgaaacgttccggtttgcggatatgtgtcaacaccagttcttcttccggtgagtggaaaatgaaatcctcgttgttctcttcaatccgtgagttttccgactgggtgaaccaatactgataccccggcttgttgagcagatacttgatttgtgcatacaactgcgcgtagtttattttgataaactccatcgagttgacatgaaagcagagaaaacggcggttaccagtggtgtcgtgaagcacttcctgataattgcatgtgccggcaaaagaagccgtgtgaggaaagttctgtgaacgccgcgcgtatggcaggcggatgctgattactttgcgggtaaccaaatccttgaagatattcagttcccgtccgttcatcccttcaaactcatccagattgataagcatcgcctgcgctattttggccagatcatccttgttgttcgggttgataagaccggtagaaagataggcgcgcaattcgggcggcagcaggttgttgataaacgtagtctttccgatgttctgtatttcgctgcaaagcaacaaaacagtgtggttcaccacatcgtcttgcgtggcggcagcgcacattcccaccagataacgttccagacattctacccaaaatttctggtgactagtatgcacgctgttggcaaggataccgatataatccgttccgtcccattcaggcagcgagtctaaatactcgcgaataggatggtaggtgctgctgaagtcggagtagatcagattctgaatcgttttgacggtgcacgaatagcctagttcgttcatctccatccaaatgctgttttccatcatttcgtcgagaatatggaaaggttccggttgctccgtgtccgttttccttctgcgatattccatgatatgaagcacttcgttgtagcgtgtatcgtaattttctttgatatgttgctcaatctgtaatattcgcttctgcgtactattcagcttgcgggtgtcgaattcctcgttgtgtccgtaagcactcccgatcagtgcgtccatttcatccgcgggaagatcggtgaactggctcttgataaaagctgccgcctcttcctgggggacgccgtagcgattgtacatacaagccaggcaatgcaggtagttgttccggttgccggtgacgtacttttcggatttattgtgataatagttcagagtcaccattaaggaagcgtgcgaggaatggtagttgagtgccacttgttcggtgaggggattgttgtctggtgctgtcgtctttttctttttgccggatgcccttttcttcttttgagacttgaagaacatcggtggctgttccacgatgacagctgtggcatcgggattgaaataaatatccggatcgtaagagaacaggcaagtacggctgacatcttgtccggaagtgtcgacctcaactccgcagagctgggcataaaaggaagcgattttgtgataagcggcatgatggaaatcttcaatttcctgaatcgtttcgggcaatgtcccgtccgtccggcatacacgtaccacgattttcagtcccattcctttgggactgatgaaagcgatgcgggtgtgggcacacttttttgccagtgcgaggatgcgtgccaatgcttcctgtgtctgatggtcgatgtctaccacgatgtatcccagatacttgacgagagttgcgtttgaacgtcctccccggtagttggctgaaaaggtgatttccggtagttctattttcttttcgtttgctgctttctcgccttgttccgcgaagattcggcgcacgtcctccactgtttcccggtatgtgccgttgctgatggccgatacgatttcttcttctgtcatttcggctatgacgcggtaaaagtcttgaaagatggtaaaatgctccatgttggtttgttctttttaatttgcggttgcaaagaaatttgtttgtaaaataatagaatggaacttttcgtttttttgattaagttcctagggttctcccaaatagcgtatgatcgttgccacttgccggggagagagaaggcggttgcgggcacgatagccttcttgttcgagttcttgcaggagcggaaggttgtagacaatccaacgacgtagtatttgtaaggctactttaaggcatacgttggggttgtaaagatgagcta

SEQ ID NO: 8197 - DNA, 8176 bp, Unknown
  gut microbiota DNA sequence
ccgttatgaatgatatccacttccgtatatccgaaatcccagtcatttctatcatcttctacatctatttccatgattttggcattcggatatttttcattaatgaagtttctcattgcttcagtcaattgaacgggaagatgaccggtgttatcatcatcagtgtctacgatacttttaatcagagttccgtccgcagaataatataagtctatctcctggttctgattttcgacttcaattacgaaaatagtctcaacgcctgtccgctccaatttgtctacatcatcttgtttccacgaagcatattcactcttttcaaaagaagttttcacagcttgcggtaatgcattgtaaggaatgtccgtttccgtcatttgccattttccatcttgggtaaaccatgcagatgcttcatatccatcatagaaatctgctacataatatccgcacttagtttcccatttcacatttgcagcattagggtatttagatgcaaatgcgttttgaagttcggtaggaacagcaattgaattatcgtcgtcgttatcacaactttgtaggctccatgtaacgcaaagtgccagtaagagtgtataaatctttagtttcatctttgttctattttaaaaggtttagaagtcaatatcaatcaaattaaatttcaagtcgaatttcaattccgtacggttggacagttttacttcataatcttttttatccctctctattttcaggattttagcatcgggataattggtcgttacatatttttgaattgttgcagggataatagctgtaggtaccgcgctatatttgcaattcacttcttcccagtttcctttgttatcaaattctactttatcgccattagtgaaaatcacttcataacttttatagaagaaatcactttccattttggctaatgctactttgctgtcggcaaaatgctgtttgataaactgctgtgcctgttgtggcatttgagttacctgaataggtttgtcgtcatctgcacgagctactgtttgcaaagtaaaaaaacatactaataagaatactaactttttcataatcgttgttttttaaatattggtttttactactattattaatttcgcattgcaaagatgaaaggagaatctgaaaagatttgggaattttgagaattatcgaaaaaaatctcataaaaatatagtgacgctatcctgttaacatagcgtcactatctataaaggataccgtcaccatcccataaggatagcgtcactataatttcttcctgaaattagattctttaggattcttttaaaactactaatatacacatcgtttatttttgcacacacgaatttgacgatattcatattaaataaccataagaacttttttatgactatgagaacaaattattttttattattagctattctattgggggttattcccatgagttacacacacgccaatgattcaataccgaaaagcgtgattctgtacacaccttacacaaaaatctccgtatcgcccggagcgtcaattgattacagtattgatcttatcaacaacacggaccaattgacgaatgcgaatctttctgtcagcggattatccgccagttggaaacacgaaatgaaatccggtggctggagtcttagccagttgtcggtacttcccaaagagaaaaagacttttaatttaaaagtcgaagttccattaaaagtgaataaaggcaattatcattttgtggtatatgccggaagcgctaaacttcccttggatgtggtggttgctcaaaaaggaacgtaccaaaccgaatttactactgaccagcccaacatgcagggaaattcgaaatcaaccttcactttcagtgctactttaaagaatcagaccgccgatcagcaactatatgctttgatggctaatgcccccagagggtggaatgtcgtttttaaaccgaactacaaacaagccacttctgcacaagtagaggcaaacagtacacaaaatgtaagtatagatattacccctcctgccaatgtagaagccggtagctataaaattccggtacgtgctgctacaggtacaacttctgccgaattggaactggaagtagttgtcaccggttcttatcaaatggaactgactactcctcgcgggttattaagcacagatgtcacagctggtgatgtgaaaaaaatagagctggaagtaagaaacactggttcttcattactgaaagacattcagttgtctgccaataaacctgcagactgggaagttacttttgaaccttcaaaggttgacgcattaaaagctggagagacatcaacggtaatggctactttgaaagcttctaaaaaagcactgcccggggactatgtgactactatcatggctaaaactcctgaagtaaatgccgacgcgcagttcagaattgcggtaaaaactccgatgatatggggatgggtaggtgtgcttatcatcattgctactatcggtgtggtttactatctgttccgtaaatatggaaggaggtaaatgatgggcgaacaagtgatcgtacttaccgatttgaccaaacaatatggtaatttcactgctgtagatcatattcgcctgaatatccggaaaggggaaatcttcggattgttgggaccgaatggtgccggaaaatcaactactatcttaatgatgctagggttgacggagcctacttcgggaacagttgaaatctgtggaataaattctaccactcatcctattgaagtaaaaaggaggataggttatttgcctgaagatgtaggattttatgatgatatgacaggaccggagaacttgatctatacagcgcgattaaatggtattcctgataaggaggcgaaaaccaaagctatggaactgatgaagcgggtaggccttgaagaacagttaaccaaaaagaccggaaaatattctcgtggtatgagacagcggttgggattggctgatgtgcttattaaaaatccggagattattatcctcgatgaaccgacttcaggaattgacccggccggtgttcaggagtttatcgaactgattcgctggttgagtaaggaagaggggttgactgtacttttctcttcccatcacttggatcaggtacagaaagtatgcgaccgggttggtttgtttagtaatggccaattacttgcgttgatcgatatggcagaactgaaagacaagaaacaggaattgtctgatatttataaccattattttgaggaaggaggagaaagacatgaataaagtcaatcatcctttttgggtgatcgtcaacaaggaaatttccgaccatgtcaaaagttggcgtttcattatattaataggtattatagcgcttacctgcatgggatcgctatatacagcactcacaaatattggtgaagctatcaagcctaatgatccggacggctcgtttttatttttgaagttgtttacggtttcagatgggactctcccctcttttgtactgtttattaacttcttaggacctttattgggaatcgccttaggatttgacgcagtcaattccgaacaaaataaaggaacgttgagccgtatgctgtcccagcctattcatcgtgattgcattattaacgcgaagtttgtggctgctctaattgtaataggtatcatgctgtttgtattgggctttttggtaatgggctgtggattgattgccattggcattcctcctacagcagaagagttttggcgaattgttttcttcatcattaccagtatcttttatgtagcattttggctgaatttagctattttgttttcacttcgttttcgtcaggcagcgacttctgcattggcatcggtggctgtttggttattctttagcgtattctataccatgattgttaatttggtggcaaaaggtttaagcccgtcacagatggcgtcgccttatcagattatcagttatcaaaagtttattttgggattgatgcgtttggcaccgagtgaattgtttaatgaagctaccactacattattgatgccttctgttagaagtttgggaccattgactatggaacaggtgcagggagctattcccagtccgctcccgttgggacaaagtcttttagtcgtatggccgcaactgacgggactgattgcagcaacagttatctgtttcgctatctcttatatcatgtttatgaggagagaaatacgatcccgataactgactcaccataaaagacgcaaaggacacagagaaataagttaaatgaatacagctgatagatcggatgatgattaccgacaagttattcactttttactccgtgtcctttgtgttttctgaataaaaaattattgtctggaaatctcgaagcagtgctctttctgttcgaagtaatatcttatactcaagtgttgcaaacgacagatagaatcggctattgctagtcccagacctgtagatccttcctttttagttccttgatagaaacgttcgaagatatgttccttatccaacggattttctactcctgaatttcggaaagtaatactgtttttggtaacagtgatccggatatgtcccccgtcaatgttatgtacaaatgcattttttaggagattcgtgagtaaagcaacagccagagattcattcattgtcacattgaaaatgtcctgttcatcgatagttacttctatgttacgatagtcgtaaacttcttcgtaatcttgcagatattgtttgagaagtccatttagttccaattgcttggtatctgtaaactggccattgtcaattttggtaagcaatagtagagatttgtttaatttagtgatgtattctaaagtctggtgagttttcatcagttcttccagttgtttttctgataacgaatcatcttccatcaacatttccaatcggttacggcagatagcaagtggagtttgtatctcatgtgaagcatttccgataaattgtttttgttgttcgaacatctgctccgtacgttctacataacgaatagcagcctcatttaattttcggaattccgtgatttgggtttcgttactcaacggcttattcttttttcctgtttgataaccgtccagccaatgaagaagcacatagagcggtcgcatattccgatagaacacccatacggaaatgataataatgcagaataacagagctacatacaaaaatataatccatacttggatggcatctctcaaatcatctttttcaatgctgggagttgatactgtcagttcgtggtatcgtccttcatcgtctttaaagatagtagtaagaatacgtgccggttcggtttcctctttttcttcaatatataccatagagtctttatattgaatatcctcccggctttctgcatattctttgcttacttccatcatataatattgattgttggagccgttggttttagaaggtagctcctctcctgccaatgcccggataatgatggtttccgaataatcttccagagcgtcatccacttcatcgttgacttcatcaatcatcgtaacataaaaaaagatagcccagaccgtcagtatgaaggtcaaagcaagcgtaatacgaagaatgatgtaatatattaatttcatggacaatattctctttctttttttattctactaccattttatacccaaacccatagaccgctttgatttcaatgtttgcacccgaatctttgagctttttgcgaagattcttaatctgtgcatatatgaagtcaaaattatcaacctggtcaatatgatctccccatactgattcggccaaagtgtttttattgattaatcttccgggacgattgataaaatataacaggatgtcatactcttttctatttagctccacttcttgatcgttgacaaatacacgatatttatccggttctattcgtacattaccttggcggatatcaatttctccgtcatgctgatgacggcgaatcacgcttttaattcgtgcatttagttcaaccaaatgaaatggcttcggtaaataatcatccgctcccagttccagtcccaaaactttgtcttccaaggagtcctttgcggaaataataattacgttctcccgtttatggagagctttcagccgttcaagaagatcaagtccgcttccgtccggtagcatgatgtccaataagatacaatcatagtcgtagtcttcaactttgcgtagagcagaattaaagtcactggctgtttccacaacgtaacgttctttttcaagtgaacattgaatcagttctctcaaagagggttcgtcttctacaatcaatatcttcataactttgtctcctttcttttttacagctacaaagaaaagggatatttctgaaataaaactgaaatggattgaaaaaagagtttgaaataaccattgaatgtcctatgaactatttggacaggtcacaaataatataatatggaaggaaaaagaaaaggatgaaagcgattgaatcgtttccatcctttttataattatgtgtgatttctatttaataagaacgtgcaaatatcacgcggcaagcagatggtttgcctgttaccatacatttacccggttccttgtctcccggaacaaatgaatcgaacggaatacaacgaatggttgctttggtttcttccttaatcttttcttccgtttcagtggttccgtcccaatgagccagaataaatccaccttcttcgattttttctttaaattcgtcgtaagtatctactgttgtaatcttggagttacggtagtccaatgctttcttgtagatattagcctgcatttcttccagcaagttttgaacatacgtttcaatgccttcacaagtaactgtttctttttccagtgtatcacggcgcatcacttccatggtgttgttttcaaggtcgcgaccacccataaccaaacgaacaggtacacctttcaattcatagtcggcgaatttaaagcccggacgtttattatctgcattgtcatatttaacagagatacctaatgctttcagtttcgctacaatgccttctactttagcatcgatttgtttcagttgttcgtcattcttatagataggaacgatcactacctgaataggagccaaatgcggaggtaataccaatccgttatcatccgagtgagtcataatcaatgcacccatcaaacgggtagaaacgccccatgaagtagcccaaacatactccaacttgttttctttattaacaaattgaacatcgaatgcctttgcaaagttttgtcccaggaagtgggaggtaccactttgcaacgcttttccatcctgcatcatggcttcaattgtataagtatcaagtgcaccggcaaaacgttcgttggctgattttactccctttacaacaggaacggccatatatttttctgcaaattcaccatatacattcagcattctgattgcttcttcttctgcttcctcacgagtagcatgagcagtatggccttcttgccacagaaattcagcagtacgcaggaaaaggcgtgtgcgcatttcccaacggaaaacgttagcccattggttgcagagaataggcaggtcacgatatgactgaatccaattcttataagtattccagatgattgtttctgatgtcgggcggataattaattcctcttccaatttagctgcaggatctactacaactcctgaaccgtcttctgcattcttcaagcgataatgcgttacaacggcacactctttagcaaaaccttctacgtgttcagcttcgcggcttaagaatgatttcgggattaataacgggaagtatgcgtttacatgtcctgtttctttgaacatatcatccaattgacgttgcattttttcccagatggcgtatccgtaaggcttaatcaccatacatccgcgcacagcagactgttctgccaagtcagcttttaccaccaaatcgttgtaccactgtgagtagttttcactacgtttggtaaggtctttcagttcttttgccattatatttttctatttaaagttttcttgagtgttaaaacagggtgcaaaaatacgaaaaatgcatgaattgccctattcttcatgcattaattttggctcagttgtaattcttgggggattaagtt

SEQ ID NO: 8198 - DNA, 14629 bp, Unknown
  gut microbiota DNA sequence
acattctcgatctttcgaaaatcgaagcgggaacatttaattttgtatataccaatgtggatgtaaatgagacgtgtgctgaaatcatcaaatcaatgagtatgaaagtgagtaaaggtgttgaattgatttttgaggaaccattcccggaatgttatatctatacggataaaaacagattcacccaagtaatcagtaactttataaataacgcgttaaagttcacccagcaaggcagtatcaccctgggatatgaacaagtatcccatcagaaaataaaattctatgtgcgcgacaccggaatgggaataccggaagaaaagcaaaagagcgtatttgaacgttttgtgaagctcaatacctttgttcagggtacaggacttggactttctatctgcaaaagcattgtttcccaaatgggaggagaaattggcgtggattcgaccgaaggaataggttcctgcttctggtttacacatccgtaccatgctgctgactagactgactataaaaagagttgtccgcatgtttggtttctcaatattaatatgatcaatatattcgggcagtttgtggattctaaatgaatagaactattgactttgccctttttattttgtatatttgcaataaccaattagctaacatcaaaatgatatatacaaaaatagatacataaagtagtttttcagatacataaatatatgtctgaaagagtaaaaacggggtgaaatttttgctaatttcaccccgttttgtttaatatattcagtgccgtttgacgaatttctatgaatgtcgtttataataaatacaagagacgtttataataaactatttcactttttattataaacgttctatgagtttattagcatcttgtatgagaaaaagaaaacagtgtaaaggccgaaacaacaccaatgcgatatatacaaatatatttatacacttatagtaatgaacgacctttacaacttgttttttataactattcaaatgtttattccttttctcatttcagtagcgcttccaccattacaggaaaatgatctgaagagtacttattatactttatatcatcatcaatggtgtgataagaaagtatttttatttttggagtcacaaaaataaaatctatgcgcttagctgtttttccagttttgtcataggcataaaaactaccggacggtcctttaggaggcgtcaaagtacatttatatgaatccagtaataaactatctttcaggagaagttgtatcggttcttcgtccggagtggcattaaaatcaccggtgcaaaaggttggtctgcctttagcgattttccttacctgttccaacaacatgaacgaagattgccgtcttgcttctgttgcttcatgatccgtatgcgaattaaacacatagaatttcttcccagtccggaggtctttaaaatatccccaagtgcaaatccggcgacaacgtgctccccaaccataagaaggtatatccggagtttccgaataccagaaatcaccatgtttcaacaccttaaagcgatcttttttatagtaaatggcacaatgttctcctttattatccccgtcacgatcacgaccgatataagaatattcgttcagaatcatcatatcctttaattgagaggtacgcccttcctgtatggcaaacatatcgaacttattctgtcgcacaacatctaccaatgcgttcagacggacttcccaagacttatcccccttgtctcctttggtacggatgttataagatgcaaggcgaataatatcttccggtttcgttttgtctaagttggaagattttgccggaagacctccggcaaaaagtaaaatcaaaagtagaaaataatatttcttatttatagaacacttcatattacaaatcattaagtatcaatttatttactccatttaaataccggatagccgttgcttccttctttccaaagagaagaatcccagtttatgacagtgtttttcagctcgttagcagatttagctactccctggaaactactaccggacggtgatgtctcatctgaaacggtaaatgtagcctctcctgctttcaaaatcataccgtcataagcatagcagttttcataagtagcattggcagtacctccgactatacgtcccacctttgctttatcggtactaaccaacatactattccaagcaatacaattttttatgactagtttaccgccatccactttgccgactatacctccggcatttcctccacctatggcattgatatcaccactagtataacagttttcaatactgcttccactggcattgccattcacccttccgatgattccaccggctttacctgtattgttagcaatttgatcaataacagtagcactggaatagcaatttttgatatatcccgaaccaccaagtacaccgccaattccacctgctgctcccgaccccttcagtattccggtagtatagcagtttgttatctttccagtataattctctgcaccggcagccaatcctacataaccggctatgatgccaataccagtattcggagatgagatatttgcatccacaaatcccacatttctacattctccacacaataccccgaagaagcttctatatgtacctgactcacaagtaaggtttttaattacatgattgcgtccatcgaaatcaatccatttatggtaaccattagcatcattcagaggtgcccacttgatcccctgcatatcaatatccgcactcaagacaaaataagtcgtttgtttttcaataagggctttgctcatattctgaatatggatagcattagcaatcacataaggattattttgagttccgtctccattggcaaaatctccttccggttcgttgtcatgtcctccataactagcataatctcctctatccaattgccactctaaaatagggaatcccatatctatattcccaacattacgccatggagtcccccaattggcaattctattctgcaaagtcaggacactttcgcccactccatcatattttcctgtcgaaacggagcctacattatcctccggagaaaatcctgtacaaaccatatcctcccatgcataacattcagatgcgacaggatctgcctgatgtccattttcaccttgagacaaaactccacagatacgtccagatctagcagcaggtcctgtcattttccagttccaagcaacacaggaagtaattttagctccttcggaaggaagggcagcaatacctcccactgaattggcaccaattaatacacctgtagaatagcaatatgacacctcgctgttttcatacatagaacctacaatacctccacattcatctcctgtagatataacctctgctgtagaataacagtttttgatataacaaatctgtcctccatacggtctacccatacgggaagctattccaccagcatactttcctttcacttttccggagacgtaacagttttccacctgccctgtcttctctacagcgttcggagctttcactccgatataaccgccgataacccctgccccactattagtagctgcttctacatgggcattatagaaaccgacatttttacaagtcccggccaaaataccaaaaaaactagcatacgctttgtctgtacaggtgaaattctttataatatggttatttccatcaaaatagatataatagtcaccgtttgagttcaatggttcccaattagatacagacttcatatcaatatcagcccctaactggaaataaatcatctttcctttcaccaaggcttcactcatattctgaatctgtatcacatccataacgagataaggtttgttcattgttccataacctttttcaaaaagcccgcctgctccgtcaccctcgtctccgtcatctatgtctgtgtttctatccggcggaatacggctataggaatccatcggattaaaatcagagcatgagaaagataaaacagccatccataaaatggtccaatatctcattaccgaatatgtacttatatgataaaatttgtttttcataatcttcatttttattttagatttctactacaatcaccataggataatgatcggataaagaactgacaatagtgcgggtagaaagcaccgtagcatgtttcacaaaaataaaatcaattctggtctttttagaaggaaatgtaaagagagctccgtgttgaacggccgcttcccgatacgcatctttcaatataccactttggcaaatcgtagtggctatttcgggagcatcaggagtcgcattaaagtcgccggtacaaaatgcgggagtattgtcttttgctttatcggaaactgcatccaccagcatttggcatgcatgttttctggcattatcagccaaaggcatgtgagtttcaaaaagataaaattctttttgagtcttgctatccttgaattttccccatacacagaaacgtttgaaatttgtttcatcccatccgttggaaggaatttccggagtttcggaaaaccagaaacgtccggcatccagtaatgtgtagcggctcttcttatataaaatgccactcatctctcctgccttattatcgtcatttccagtgttacgaccataagcgagaatctgataatcactcgcaagttgagttcctaagtaggaacgttgttcccaactggcttcttcgaatccacaaatctcaaaatcgtagtctttgattaattgtgccacacgttcccgtcggttagtccatcctgtaccagtctccacctgtaagttataagttgctacacgcatggacgtttcagtcacggggtcttcgtcttcctcgccatctcctgtatcccacgtgaaatcaggatagtacaatgaattgtctttattatcttcacaactgccggcaaaaacagagaatatgaaggaaatcaatgtatatattactatctttttcataaatctattatttatatcttttatacttgttattcattccatcccggattttgggttacgacaccgtcagatagtgttatttcctgtcttggtaccggatacagataatcacggttctcattccaggtacggtcgatccaactgtaacacaataaattgccataattaccttctgacaatgaggtgccgcttccatcggaagccaattttacatacgtcacacttccaacattgggttgcgaagatgtggtgtagaaacagacatcatttgttccgtctccatcgatatcatacgctttattgatagctgtagcaggaagataaaatcctttaaaggattgggccatacattgcccctctttccagcgcatcaaatcataataacggaagccttccatgaccagctctatcgcacgttcccggcggatttccagaatcacccctttattatctcctgtgacattcacataaccggtttccggagcacacatataagggtccggagaaaggtttgctgcgttcatattcagttttcccgtgactcctgcacgtgtccgcaatttgtttatcgtattgtcgatatcagtttgcgtcagtgtgcctaattctgcctttgcttcggcatagttcaaataaacttctgccaatctgaacagaggaaggtcattgcttgaatcacctgtatagctcatattatcatttgcatatttcagcaagtggtatccggtcatcgtgacattcatatttatatttgaagtacggattgtttgcgctaaacgcggatcacgattgactatttcatccttgaattccattgttgcataattgggctggtcggtgaaacggttgccgttcttcattaaataataattgaccagttttttcgaaagtccggggcggcctaatgtcggagaattctcaaaagcttgtactttatgaaccagactcaaatcattattataatcccttgccaatatgatttccgcatcaatcgcattctcggatttaaagagattacgataggactgtgagccggattgatacaatgaatatcctccggaagcagtcatgatttcattagaggcacttacacagtcattcaagtatttctcataatcacccaatccatgatatttacgataagtaccttcaaataatcctacacgtgactttaatgcctggacagtccaccaggttacacgataaagttcttttgtccggttggtttctttaaaaacctctatggcaaaattaagatcttccattatctttcccatcacaaattcgcgtgaatccctggctttgtataaatcagcatcatccgagccgagtactttatcgtaccaaggtacatctccaaaacgtttcaccttttcaaaatagaaataagcacggaagaagcgtgccagggcttcatatttgtcgcgcactttctggtctttacagtttcccagattatccaataaaaaattaattgatcgcagtgcactccaactccatcctccacccgtttccggaatgacacgttgcccactcacttcgtcgcttaaaggagatacaatcagcatatcagcatcgtccctataaatatcaccgtcacccggaaaattgtttgaatagaactggttactgtacaactgtaattgctcttcattcgtaaaataatccttagtcgtcaagcgatctttcggatttatatccaatatgctttcacaagaagcaaataacaacgacagaccaacagtcgcccacaatgtatatttcattattttcatactatattcctttatattcattattatcagaacgttatatctacaccaaaagagtatgtctttgcccagggataaatatttgcgtcacttttacttgttttccagctgttacttgccgatgcttgttccggatcaatataatcggaatgtagcttagtgaatgtcagcaagttctcaccactaaagtaaacacgtattttctcgaaacctattttagaaagccatttatccggcaatgtgtaaccaatagaaagattcttcaaccgacaataagccagattctgcaaatatttagtattaaccactgccaattcacgattactaccgagagccacatatcctctgggatgtgggaaataagcatttgtattttcttcactccatacctggctcataaagtcggaaggaataaaactagcgtatggtcgggaataaggtccccaaaacatggacgtttcagcaccaggataccaattttgtttgccaatgccctgaaaaagaactgaaaaatcaattccataccaatctgcagagattccgaaattataattatagcgcggcaatgagttaccgatcactttcatgtctttccggtcattagccgatgttgtctgctcaatcttgttgttaccatccaaatcgacaaatttgaggtcaccggcatgaagtccattatccaaagcgcttgcgttaatcatttggttaacgaacgattggtccactttataattccttgcttcttcatccgttttaaaataaccgtctactacgtatccccatatttcgcctaactgctgtccttcgtaaggatcagtcagcgtccggttgggattatcatattttgtcactttggaggtgttatctccgataccagccattatccggtagttgaaaggcttgcttgccaaagtaaaactatctccccaagtaatagatgcttcccaccctttcgtacgcaagtctgccacattcattctgggagaagaggcaccatatacgccaggcaaagtctttcctgccatcaacatatctttggtatcacgaatatatgcatcaaaagatacattcaaacgattattaagaaaacccaagtccaaacctatattttttgtgattacagtttcccaggtcaaatcggtagagttcggagctgactcataggcataatcgcctttcgtagtatctccgaaagcatagttcattaccgctccggtattaatcagttgcagatagtcataatagcctactgttttctgatttcccaatgatccgtaagacagtcttagtttcagattgcttacatagtttttggcttgtgtaaagaaggcttcttcactgacacgccatccggcagagaacgacgggaagaaaccgaaacgatgtcctcgacggaaacgggaactaccgtcataacgtccgctggcttcaaatagatagcggtctttatatccgtaattcaaacgatagaaaaaaccaagaatagcatattcctcttgtcctccggttatggatatatcatcaccttttgccaggttaaaatcatcgagagattcagagagtaacccgttacgtttcattcccagtttcttgaaatacttataatcatagttacctcccacaatgacctttacagaatgtgcatttgcgaaggtattgtcatacgtcccgtataagttgaaagtttggcgtatctggttattttgtgcttccgacaaataatttcctctggtacgtccgttatccattgtgattgtttctcccggatttctggagtataacacatctacggaacgattcaaattctgctggttgtaatgcgcccagctgtaatttgcacgaacctcaaaatgcttgatgggtttcaatacggcctcgaacgtagttacaaactcatattcacgatcccggttatggtggccgccattcaataatacggcactaacaccatctgccacttctcctgtgtctgtcagacctgttctgtaaaccagggttccatccggatgcatcggcacaatacttgccaaagcatgccgcccggctctgctgaaaacatcatttactcccgatagccccggataagtatattcagaatgataataagaggtattgttacttaattcaaaccaggaagtgatattagcgatgatttttgaacgaaaagtatatttcttaaagcggtctgaatctattctgataattcctttctgattgtagtagttacctgatagcatgtactttactttttcggttcctcccgaaaccgtcaagttatgttcccaagtggggcgggtattatcaaacaaacaattataccagtcaaagttgccataatatttatactctccgtttttttctaccacccatggacgggaaggatcttccactttatcattacggcgaatccataattcatggtaatcttcttgggtataatgtgtataagggacgccctggtatgttttgtagaacatatcattgataccggccgaataataaccacgcgtctcaaagtccgtagaagttgttgtatcaccaaaactgaaacgaccgttatagctgacattggtctttcctatctttccattcttggttgtaaccaaaataactccataagcagcacgggcaccatatacggcagcagccgaagcatcctttaaaacactgatggattctacgtcattggggtttaccttatttatatctccctcgattccatcaataatagtcaaaggtgccgcatccgcactaatggagttgactccacggatattgaaacttcccccttgtccgggacgtcccgaactaaagtttacgttcatattcggtacagaaccttgcagaagctgtgataagttggcagcagaacgggtcgtcagttcatcacccgaaacgatagcaacggcaccagtcaggtttactttcttttgcgtaccatatcccaccactaccacttcttccagtgtcttactatcttcgcggagaactacttgggacagatttctgctggtagcagcgtaattaaccgtaatatatccaatgtatgatactgtaatcgtactgttttcgggaacattagccaaagtataacgtccgtctacattcgttattgtacccaaagagctgccttgcaccatcacactggcgccaataatcggctctcctttttcatcgactacccgaccggatatatttcttttgttcgcattactggtttgttgttcagaatccgtaactttctccttcaaataaatttttgtttttccgatctcatagtttacgttagtaccgagaaacaaatcattcagaactttagatagttcctgattctttgcttctaccgtcactattcgatccggattgacgatcgtacggctataagccaccgtaagaccagtttgctgtgtaatagcagagaatactttctccagctttacttgtttaagattcattgtcaccttttgggcagaagcggaaacgcttatgattacccccagcaacaatacgagcagaactttgtgtttcatactacttgctttgattaaagttaaacttagatttaaaatctcatttatgcttagtagacacacaagtcaaaaaagcgggtgagagaaaaaagagttttttttcataagcctaatttatttcataacattcttatcctaaaacagtaaaggctgcgtatatacacagcctgtcctcattctattatcctatccagtatattttacttctttccgtcctatttcattcggactgtcacttctttccggacttcatcatattcaaattttaccggcgcaatcttttccaaatcctgaagcaccttctccagtatcgtattatccgaggtcaacgtatatacatatttcgatgcctgctcatcctctatcttaaagtttacattataccagcggttcagaaccttgaccacttctgccagaggagtatctttaaaagaaatcacattgtctttccacattgagccttgctttgaatgatcgtttttgattatccggcactggtcactttctttattatatatcagtttctcgcccggcagtaacgggtattcttttgcagaggagagagtcaggtttacatgtccttcatccagacagatcacaatgtctttattctccgggtaggcttgtacatcaaaagaagtacccagtacatgaacggaaggtccgttcagattaacaataaacggacgttttttattcttggctaccacgaaataggcttctcccaccaggaaaacttcccgcttactcaatccgaactttttaggatacttcaaccaggaatctgaattgatataaactcgtgtcccgtcttgaaacatcatctgtatccgctctcctttggcaacacgaatttcctcatactccgtagtgccgaataaatccacccgggaattgatctgtaaataaagacctatcaggaaaataacgggaatcaagattgcagccacacggaagcagatacgtttgatctgtttgcgtgatatgttcttttggatctgatggtacatcttttctgaaggtatagtatggtctacatatatttctgccgtttcggcttttaaatattctgcctcccgagtcatcacagcatccaggtaagtgttcccttcttctgtggcaaaccattccgccacaaattttgcatcctccggtgtagcaactccggcaagcacttcttctatttgtttatcagtgggtcgattcattctctttttatcttaaatagtggacacttaaatatgtcattagtgtgacaaaagtaacaattattagcattttacttaaatgaatacgtaacattttcaatgcttctgtataatgtgttttgactgtattaacagacagattcatccgttcggctatttcctgattcgttagttcctctttcactttcatcaaacaaatactgcgtttctgcggtggaagcatatctaccgctttataaaaagaggccatcaattctttcttctccagattttctatcagattatcttcgtagacaggcgtcgattgggctatctcatagttcttgctgattgcactattctcattacgaatcagatttaagacatgatttttcgtcatagtgaacagatagttcttaaggctgattcctacatgtagttccgacctaaattcccataaacgggcaaagacatgttgtactacatcttctgccatgtctgcattcattaaataacggtaagctaatacatatagcagcttatgatatctgtcataagcttgtgtaaaagctcctttatctcctttttctatgaaggaaaagagcttctcgtcatctgtattagtgtattgagctgatttatctaacattccttggattttgtttaattgtttttccaaaagaacaaaagacgtattacaattaagtgtctttcacaaaacaaaagtagtaaaatttagaaaaggtggcacacattccaataaaaaaagtccccgattaacaatcccccattaaaaagaggaaccgttaatcaaggactactccactaactaattaacaatgtattataaatgataggtaacaattctttcttcaggtgaatcgatccagaggcgccatactccttccgacactttttccggtgttccgatatttgctttaggtggacgacggcttttgatggtcagatagcctttcccttctgttgctttcactttcatcgttttgctgttcatatagacatggatattgccattcggagtgggtacagtgccttccatccatttcaatcctcccaacacaggagcaatagcaaactctttatatccttcttttacaggtttcactcccagataatatttgcccaacaggtagataggactcgctccccaggcatggcataaactctttccgtatgggcggccatacatggcaagatgttgcgttccggtttcttcggggttatatttctcccagaaggaggtagcgccttccttcaacattccaccccaataggctttcatttctttcattacagcatcctgttcgccaagagcacaaagtgcttccagttcgtaaaaacgcatatagggagttgttattttcagaatactgtcattcagcagaacagactgtttaatggcttgttgcttatcttcattcaaatattgaaagaagacagaaaacatattcgcatagcgggtgactgcatcactttgctgaccgttgacgcagttatgtacaaatgcctgtttctcgttattccagaaggcaggttctaactttgctttcaaagcagcagccagtttctcgtatttctgtttgccattggcatctccaaccaattccgcacacaaagccatcgtttccagacttctgcaaaataagatttgttcaaaagagagttcgccttttttatccagatagccgtctgcccagtccacaaatacccagtcaccggtcataccttctaccatgccattcttattggtacgtcccaacacgtaatccatcattgtttgcatacgtggatacagttggttgacaaaatggcggtcgccactatacatataatagtcatatacgctaaggaaccagtagaaagtataatccatgattgtattactgtggctggtcacagggtctttgccacgaagtaaccagattgtacgtttgacggattcgttatcaaagaaaagataataattcatcaaataactttgaatggcatcgccactccatacccaacggtcacgtttgataccgtcaatgaagaattcgcgggtagtgagatgcatggtgtatgcgccaacttcccaaatacgattcagttcttcatcattgcaacggaaaattccgcggtattcttcaggaagatattcatattgcatggagacttctccaatctgtacatccggctcgtgagatacatagacataacggaaggctttgctgttctccaatgtatattcgttttcagaattactcaaaggagaagtgctgcggatagcaaggtcggtcacttgtcccggttcgagcaagagtttgtccaatgtttcgcaatatgctttatcttttgcttcttccgggctttcaccataataaatttctatttttccttttccggaaagattcttcaatgtgataaatccgaatgtttcttttccaaaatcataaaggatacctccttcgggctgttctgtcttcgtaacaggttgctgcggttcacgcatcagactgaattgggaaggacgttgggtagctccgtcaaagttccagcatccggcatccatatagatagtggcagatgtgtcactggcttttccgctctcgtcaatccattctttatcttcgtaagttacacgccaggaagagtctgaattcaccgtttttcccttcacataaatagtgggaggagtagcctgattccagactttaatgttcagattatgttttccggccggaagcaacatggtttccggcataccgaactggagctttccatccagtttgacgttgtactttccttcggcagcaataaagatctcttccggctcggaaagattcagttgcttgctgaattctacgacaacataatgactgtccgttttccaaaaaggaggaaaaaatgcacctcgttccatacgacggttattcatttgatttcccagccagatttcgtagtctcccggataccatatccaggtctgggcaaatgtgctgcttgccaaagacaaggcactaagcaatatcatatatttctttttcattattctttctattactaacaaactgaatcgtaagaaataattcgttccacagtggttgacgtttagttccacatctgtttccctttagttctacaattgtt

SEQ ID NO: 8199 - DNA, 4206 bp, Unknown
  gut microbiota DNA sequence
gatatttagtaaatccttatatcctacttccagtcccgcacgttcacgaataacactatccaccttcggaccattgttttcccatacatttcccggaccattggcattttgcagatacttctctccttctgtccaattatcacgtacagtaataaaggaagaaccttcatccgtataaagatagaaccagtgattagggtcgtgtacataccccggcttataaatactatgcacgcaattctccgttacataacttttcggctgcgaaccgagtgtgtaaatacctgccacatcatacatgtgtttcgcataatgatgaatcagattggcatgtactctgttattacgcatacaattcacagtttgcgtccatccccaaccaagactgataccactataaggcacttcactgatttcattatgctcgatattgacgtctcctacatatcccgcagcaatggcaaggcatccccaatcttcattgcctatttccgtgaaataacaattattgatttgttgctgtgtgcatacttcccgacgatcagcaggatcgtatggcaaatgcgtctcatgggcagccggagaaaaactgccgactaacagaccatttccggcaatatcgcggaagagacagccacgaacaacaccgccttgcaccgcttcttcataatccaatccggttgaacctaaatgctcgaaccggcaacgctcgaaatcaatctgccttgcagcagccacacgaacagcagctgcgggacgtcccaaccatccttggttatccaacggatgattcaagtaatcccgttgcattttcggatcaatccggtaaccatctgtcagatacatacctgcctgaagaggtacatgtcctttttctgacggacgcatccatgtagtataggaaaaagtaattttctcgaaacgaatatgacacacaggacgatccacagttccttccacccgtactaatgtctcaacagcaggtacgatcactttcgcctcctgcatcttctctccttcccgtggataataatatatcttacgggcatctatatcatgataccattctccgggtacatcctgcaattcgcgggcatttgtcagatagaaagcagaattatgtccgtctgtcgtcaccatcggacgcggccagggatgctcaaactgaatccgactttccggttgatgaaaacgtattgccgcgctatctccctgcacttcaactgaacgaatccgaagattggcaacacaccacatctgatgtaataccatctcggcatatttagctttcaaattccctttattatcaataagcctgcgaatggaaactgcaggtacataaagaatttcattcttctcatccacactgcaaatgcgattcatcttttcgaaatcctccacatcacgggcacgaactgccttttttccattcacccacaactggcggaaatccaatggacgtccattaaataccggtacatctgctacccaaactttcccttgcttcttccagccatttatgctgattcctccactcaatatcactttttcatcgcctaccgagcgaatgattgtgggcgattctttggttccgctatcttccggacggataaaaaacggttcatggaaggcataggttccaccttccatatagattgtgattccaccttgaatacggttatcctctgtcctgcgccattctcgtgcttgtcgtaaggcagaagtcagcgtggctttaggagattgacgagttccgtcgttgaagtcactacccttgggagaaatccatatctcaccggccaatagccagtgactgcacaagatacatatagccgttacaaataactttttcatgatttttttcatttctgtatactaaacaatccggactatctggcaagaggcatccatacagtcatttctcccttttctctgtttccccaggcataataaggaatcaaacggatatttactgtcttttcagcctgaacaaccggccggtaaagcactccttcccacgaagttgcagatgccagacgtgccattccttcaagtgcaacaatcggactgccttcaattgtgattttcttcggagttagttttatatcagcgggaatcaatacgttatcaatcttttccccgtttgcaatatccatactttccagacagtaaaccaacggcccgcgcttcacgaccacctgattacgaatctcctctgctaacggatgggcttcgagcaaacggacaggcatatccatcaccagctccactacatcccccttcttccatgtacgatttatttccgcatacgaatttgcctttgcattggtttgcagcggctgtccattcactgtgagcgtagtcttttcgcaccattcaggaatacgtaagaagagcgagaaagcacccgccttacgaggaactctatccaacgttacgcgtacctttccttcccagggataatccgtctcttgtgttaatgccagctctcctttgtctttccaagtcgtagtcagcgtatttgcaccatacaagttacagtaaatgccttccggactcaatgtgtaggcgtaattctgtgcctgacacaatgtacgcaatgtattcggcgggcagcagaaacaactgatatattccgtccgttctttcggccagcgaagcgtgtaaggaagatcggcactgatacgaagcggattggtatagaaatatttctttccgtccagactgataccgctcaatacactattataaagacaagtctctacaaggtcagcatatttcgcatcccctgtcacttccagcatacgccagttgaaaagcatatttccgatattggcacatgtttcattgtgcgctgtactatttggcaactgataaggacgtccgtagctctgatgtaccttctgaatactatccggctcatagcaagtcccgtccggtgacgttccatcataaagagcaccgcaagctccggtcacgtacatcttccgggtgacaatatcattccagatactagtcagatttttcatcaattgctgttcgcctgtctcggcatatacatccgctactcctgcatacagataatttgcacgtacggcatgccccattgcacgatattggtcgcggaaaggaatacgatcctgattatcatccgttccgttttccaccataccgcgaatatcaatcaggttcttcgaaagttccagataacggggatttcctgtggcacgatacatttcgaccactcccatataatgtgaagggcaaatggcattacgagccagttcggcagaagccgtttcgtaaaagtggcaaagaaaatccgttgcttttacggcagcatcaaaaagagtagtctttccggtggcacgacgatgcacaatacccgccatcatcaggtgtcccaagttatatgtctcaaagttcagccgattggcaaaagctcctttttcattctcgtcacctactttcgttccaatgaccgtttgtttatgctgatcctccaatgcatgagagtcaatccctttattcagttcttcgataacaacaggcgtatgtatataaccatctgcacgttgggcttttacgacacaagcaataaagttatccatcaacttatccagttccggatctttgttgacagcatagacagaagccacaccctccatccatttatacatatctccgtcatggaacggaggtccccaatgttcacccttgcacacaccagcggcaatctcaaaattacggaaaccgtgggatatttctggtgtgttccaagtattccacatactttgcagggaagtccggctaaatacctgaaagcgatctccccagaatccatctgtccaatgtacggcactgattccggtattcgccatctttgcaaaacggctctgactcatatccgtcaatccattgctttgcgcaagtgctcccgtaacggaggcggaagctaaaagaagtaacagttttatctgtttcattaatatggataatttaaaatttacacaatatctttataaaaagacgtgattatccgtattttgtactcaataaaacgaaagcgaagattgctaagcaaccctcgctttcagtaaaaaagatctgtattaatctttatttcttatttatcaggtgtataattcaactccgcctttctcgcctgcgaatgttgaaattgtcgtgcaaccttatactcatgtc

SEQ ID NO: 8200 - DNA, 1925 bp, Unknown
  gut microbiota DNA sequence
ggtgcgaatgtaggaataatttatgcaataacttaaaataatggataatttaacagttcttgcacattgaattgcttacctttgtccacatatttacttaatcaagaaaacacaaaatctcatggtattattttcagaagaccacatacaggagactagaagaagaggccggatcgaagtaatctgcggttctatgttctccggaaaaacagaggaattgattcgcagaatgaagagagcgaaattcgcgaaacaacgtgtcgagatattcaaacctgctatcgacacccgttattcagaagaagacgtagtctctcacgacagccattctatcgcctccactcccatcgattcgtcagccagcattttactgtttacttctgagatagatgtagtaggtattgatgaagcacaattcttcgacagtggtttgattgatgtatgcaaccagcttgccaacaatggaatccgtgttatcattgcaggattggatatggacttcaaaggaaatccgttcggacctatgccacaattgtgcgccattgccgatgaagtctccaaagttcatgcgatctgtgtgaaatgtggtcagctggcctctttctcacatcgtacagtcaagaatgagaaacaggttcttttaggcgaaacagccgaatatgagcctctgtgcagggaatgttatctccgtgcacgaggggaagatgagcagaaagtataaactctataaaagaaacagattatggaaaggaaaaagataacattcgacagttttatacgcggttccatcggatgtgtgttagttgtaggaatattaatgctcgtggaacgtcttagcggagtgttattacctttctttattgcgtggctgatagcttatatggtctatccgttagtcaaattcttccagtataaactacgattaaaaagccgcattatttccatcttctgttccttattcctcattacggttatcggagtcactttattctatctgttagtgccgccgatgatttcggaaataggcagaatgaacgacttgctagtgacttacctcaccaatggagccggtaacaatgtacctaagaatctttctgaatttatccacgagaacatcgatcttcaggcactgaaccgtgtattaagtgaagagaatatcctggcggcaatcaaggataccgtccccagagtgtggactttgcttgcagaatctctcaacattctattcagcatccttgcctccttcattatattattatatgtaatctttatattattggattacgaagcaatagctgaaggatggttgcatctgctacccaataaataccgtacgtttgcctccaacctggttcacgacgtacaggatggtatgaacagatatttccgtggacaggctttggttgctttctgcgtaggtattcttttcagtatcggtttcctgattatcgattttcccatggctattgctttgggacttttcatcggagcattgaatatggttccctacttgcaaatcatcggtttccttcccaccattttattggcaatcctcaaagctgccgacaccggacagaacttctggattatcattgcatgtgcattagccgtctttgcaatcgtacaaatcatacaggataccttccttgtccccaaaatcatgggaaagattaccggactgaatcctgccatcatccttttatctctttctatctggggttcattaatgggaatgctcggcatgattatcgccttgccactaacaactttgatgctctcctactaccaacgctttattatcaacaaagaaaagataaaatatgatgaagtagaaactactgataatcaagaaacaagccataacgaggaaaaataattgaaacttttttctacggaatgcttgcaaattaaataaaagtaactac

SEQ ID NO: 8201 - DNA, 11947 bp, Unknown
  gut microbiota DNA sequence
aactctgtgtcctccgtgtcctctgtggtgaactcattattatttatttgataaatacagcccaaagtatgacggcaattgctatcaggactcccatgataataagcgttccccaaacaaaataattgctgtctttctctttctttttctccgagtcgtggatgatgcgttccatttcttcgggggtggtgttgggtagtggataaggttcgtttgcacggtttagatgcttcaacttatcgttagcacgttcacgacgtaggcgagaagcttcccgtccctcttttattcggcgtatcatgtcgaatgcatgtccttcaccaaccatattctttgttttttagaagttcacttcctcatttttctatttcccttcttctctgtccactttgagcaatcctcccgtattcggatcaaaataaactttgatggtagaattcttgttgaacaaaaccggagccagatattctatcacaccaaattgagtaataggaagctcaccttcgtaaagtttctttttaccgtcagtcagtgtaaccatagcttgtccgggtacgttgtaggcgattccatccaaatctttcttcttcttatcgtcttcctgtggtatcttgaccgatttcaggtctttcagactgatataaaacggagttcctgccaaatcattgttggcaactacacctaacttcttcgagaagcggaaggcaacttcattgttgaattccttgtcaggggtaaggcggacagtgaatgttctctcttctttgttgcaggtgccggagaacatttgcgtcatggcttcttcctgtgcattcagattgtcgagcataattttaagctgtgccccatctgaaggcatattatcagcttgtccgcgcaataaggcatttttgctttcgcggatgttatagatttctttagccaccagctcggccatcttggcggtagaactagccatcagaatctcttcggtcaggaattcgcgaggattcgctttcttttggaggactgcgggagcgggagcaacttttttgcttacactgctattgctgtaaggaacattgatcgttttcacaatgccatcctctgtcagttccatgagcggtgctactgtcttatccttcaattttacgaaatacgtagtttcgctgttgggcacacctacggatttcacttttacgctagccagttcccagtactcttcagggtcggcggagacgttggtcagtcgtaggtaacgatcagcatatttgctgaattctccgggagtatagttgactttgttggcttttatttcaagttctatttgggttttgggaagactgtaaaccactccatagtcttttcctcgggtaacccctgtcagtacttcggtttgtgcataggcggacgttgtcataagtagtcctgctgctataatcaactttttcatattcggttctttttaactggttttgaaaacaaagttaatgaagttattgaaaaaagggtaacttcttaacttttattcgcttacaagtcgccatgctgtcggcagacaggtgataatatcgcttgcgatcattccgatcattccttgcttcttttgagcgacatcgcccgccagtccgtgaatgtaagtgccgatttttgcggcttcctcggttgggtaaccttgggcaagtagtgccaggattactccggtcagtacgtcaccgctacctccggttgccattcccggatttccggttgggttgaagaaacatttaccttcgggggtgatgatggcggagtaggctccttttaaaataatgtgaacatgggcggcacgggccagttcgcaggccttcatcagacgttcgtaagagtcctggcatttgccggtcagacgttccagttctttcggatgcggggtgaggatggaacccttcggtaggtgggtaagtgcatgacggtggttggcgaggatattaagtgcgtcggcatccactacaacaggagtctggcagtgttccagttgttccaacaaggcagcttccgtttcctcgtttcgtcccagccccggaccgataccgactgcttgatagtcgtccgtgtcggtaggtacggcaaaacaggtttcgttgatgtcggtttctacgattgcttcgggtatggaggtctgcaagatgtcgttgttgcacattggtgcatgaacagtcagcaaccctactcccgaacggaggcaggcacgggcagcgagaacagaggctcctgccattccttttgaaccggcaatcaatagtgcatgaccgaagtttcccttgtgggcaaactgtttgcgtggcttgatgagtgaacggatttgctctatttccaacatttcgtagttcgtttccatctcttcaataccgtctttgctcaattggatatccagcacttcccattctccgacaaattccgtgttctctgcgaaaagaaaggcgagcttcggcagttgcagactgaaagttacgtcggcacggataatattagcttttacgttgaatgtattttcttctcccatcagtccggaaggaatgtcgatggctactaccatagcaggggaggaattgatgtatttcactacggcagcgaatccaccgctcaacggtttgttcaggcctgaaccgaataatccgtcgattaccagatggtcgggcgtcagggcgggaggtacgaattgggtactgatttcgtggaattttacttcttccatcatttctaccagttctttattggtctggcagtcgggtgaaagttctcctttcgtgttgaagagaaatacctcgattttatatcctttttcagccatcatgcgggctacggcgagagcatctccgccattattccccggtccggcaaagatagtgaccggtgtctccgtattccatctgtctgtgatggcttttgttaatacagttgctgcacgttccatcagatcgattgatgcaataggttcgttctcaatggtataagcgtccaatttcttgatactgctgcttggaaatattttcattgcgatgttcttttagttttcggattacaaatgtacatgattcttctgacttttcccgtttgttgtgggaagaaaacttgttaatcataaggagatgacttgttgggggcagggaaatgaatcaaactcgtggtggtttgatttattaaaaataatcattttgtacctttcacaagtttcacggacacgtaagttgtagtgtgacagatgtttgttgtgatttaaggttctctttttaattcttcacatctttcacactgttcacacccttaagaaagaagcccggtcaaagcaaaagcttaggtgtttcttcaatatggcaagacataggagaacgaatatgattgaagaccggattgaaatagttggcatgatattagccaactgtagttggctacttagatgactactgtcggctacatggtcaactgcagttgactaaatagctgacttcagttgtctattaataactcaacttcaaaattgtcgtatagtgccgacattaggcagtattaagctatatacctcatgtgtggttacggtttccttcatctccataccttcttaaacaaatttttaatgcggttcccctgattaagcctttgattatttgccgtttccgataaaaatgttatctttggagataggtaatgtgcatcacattaatttcctgtgctcacaatgaattagaatctaaataacggattgtttaatcttctaaagtttgcatgatggaaaagacaaaaattggcttgaatgccgggaaagtatggcgcatcttaaatgaaaaaggtgaactttcaatgttcgatttgtgccgtgaattaagtttgacgtttgaagacgtagctcttgctattggttggctggcccgagaagacaaaatctttttgaggaaaagagaaggaatgctttttgccagtatcgaaaatgtcgaatttacttttggctaaggtggtagctaacctacatttaagatggatctccactttattatttacactgctaaaaaagtaatgaagtggatcagtaggattttttatgctcgtttttactattccccctattattctgtttgataagagaagcatctaatctactttttctgtacctttgcaccccataaactactaaacacataaattcatgagtgcattgaaagggcatccgaaaggcctttatctgattttcgcgacaagcacggcagaacgtttcagttattacggtatgcgtgcgatctttattcttttcctgacgcaggcattattgtttgacaaagaagcggcagcatccatctacggcagctataccggactagtttatttaaccccgttgattggcggatacattgccgataaatattggggaatccgtcgttccgtgttttggggagcggtgatgatggcagtcggacaattcctgatgtttatgagtgcctccactttagataatacaaaccttgcccactggatgatgtatggcggactaggcttcctgattctgggcaatggttgcttcaaacccactgtctcttctctggtaggtcagctctacgaacccggagacaggcggctggatgctgcatacaccattttttatatgggagtgaatgtaggctcttttgctgctcctttgatttgtggttatctgggtgataccggtgatccgcatgactttaaatggggatttcttgcagccggaattatgacactgttcaccgttgttcttttcgagactcaaaagaataaatatcttttttctccttccggagaaccgattggtattatccccgatgctaaacgtgaaaagaaagaagacaaggtcgaccatatctcacacccaaagatggacaaacgtaccaaagtacgtaatacccttgtaatcacaattcttaccattgctttaatagccttctttaactatgcatttgaaggcgattgggtgagtattggcatttttaccgcctgcattgttttccctgttctgatcctgttagacggttcattgaccaaaatagaacgcagccgtattttcgttatctatatagtagccttctttgtcatcttcttctgggcagcctacgaacaggcgggagcttctttaactctttttgcgtccgaacagacgaatcgtgacatattcggttgggaaatgccggcttcatggtttcaatccttcaatcccctgtttgtagttatcctggcatatatcatgccgggtgtatggggtttcctgaacaagcgaaagatggaacctgcttctcctaccaaacaagcgattggtctgttactcctttctttaggttatcttttcatctgtttcggagtgaaagatgctgttcccggagtgaaagtgagcatgatttggctgacaggactttactttattcataccatgggtgaaatagctttgtcgcctatcggactttcaatggtaaataaattgagtccgctacgtttcgcctccctgatgatgggaatctggtatctgtctactgccacagccaataaatttgcgggaatgttgagcggactctatccggaagccggaaaagtaaagtcaatctttggttatcagattgctaccatgtatgatttctttatggtattcgtcgtaatgtccggtgttgcttcgttgattctgttccttctctcgaagaaattacagaagatgatgcacggggtagaataaaaaatcgtatttttgcaaggttatttttaaattaccggttatggataccattcagataaaagacaaattgtttaccgtttctattaaggaacaagaaattcagaaagaagtgattcgcgtagcgaacgaaattaaccgcgatttggcaggtaagaatccgcttttccttagtgtgttgaacggttcgttcatgtttaccgctgatttactgaagcacatcaccatcccttgtgaaatctcatttgtgaagttggcgtcttatcagggcatcacttccaccggagtgattaaagaggtaatcggcctgaatgaagacattgccggacgtaccattgtgatcgtagaagatatcgtagacacaggactgacgatgcagcgactgctcgaaacattaggtacacgcaatcccgaagctattcatatcgcttctctgttggtgaaacctgaaaagctcaaggtaaacctcaacattgaatatgtagcgatggaaatcccgaacgactttatcgtaggttacggactggattatgatggtttcggacgtaattatcccgatatttatacagtagtagattaatattaaataggtaccagtttaaatggtaaatagtaaatcgttaaattgtaaataacaaaatgttgaacatcgtaattttcggtgctccgggttcaggaaaaggaacacagagcgaacgtatcgtagaaaagtatggaatcaatcacatctcgacaggagatgtattgcgtgctgaaatcaagaatggcacagaactgggtaaaacagctaaaggttacatcgaccaaggtcaattgattcctgatgaattaatgattgatattctggcaagcgtattcgacagcttcaaagatagtaaaggggtaattttcgacggtttcccaagaacaattgcacaggcagaagcattaaagaaaatgttggcagaaagaggacaggacgtttctgttatggttgacctggatgttccggaagaagaactgatggtacgtctcattaaacgtggcaaggattccggtcgtgctgatgataacgaagagacaatcaagaaacgtctgcatgtatatcattcacagactgctccactgatcgactggtacaagaacgaaaagaaataccaacacatcaacggcttgggtactatggaaggtatcttcgctgaaatctgcgaagcagtagataaattgtaataatacaatattataaataaataagtcagtagccggagtgttctaattaactgctctaactactgactactttaactctttaaaaaaatatggctgaatcgaattttgttgattacgtaaagatatactgtcgctcgggtaagggcggaagaggctctacgcacatgaggcgcgagaaatattgtcctaacggaggtcctgatgggggcgatggtggaagaggaggtcatatcatcttgcgcggtaaccgtaattactggacattgctgcacttgaagtatgaccgtcatgcaatggccggtcatggtgaatcggggagcaaaggacgtagtttcggaaaagacggtgcggataaaataatagaagtaccctgcggaacggtagtttataatgccgagacaggggagtatctttgtgacgtaacagaagacggacaggaagtggtcttgctcaaaggcggtcgcggcggtcagggtaactggcatttcaagacggccacccgtcaggctccgcgttttgcgcagccgggagagccgatgcaggaaatgaccgttatcatggagctgaaactgcttgccgatgtcggtctggtaggtttcccgaatgcgggaaagtcaactttgctttcttccatttcggctgccaaaccgaaaattgccgattacccgtttactacgctcgaacccaacttgggcatcgtttcctatcacggtggaaaatcctttgtgatggcggacataccgggtattatcgaaggagccagtcagggaaaaggtttgggactgcgtttcttgcgtcatatcgagcgtaattcattactgctgtttatggttccggcagacagcgacgacattcgtaaagaatacgaagttttgctgaacgaactgcgtaccttcaatcctgaaatgttggacaagcaacgtgtgttggctgtcaccaaaagtgatatgctcgatcaggagttgatggacgagattgaacctacattgccggaaggcattccacatgtattcatatcttctgtttccggtttgggcatctcggtgttgaaagacatcctttgggaagaactgaacaaggaaagcaataagatagaggacatcgttcaccgtccgaaagacgtgacccgtctgcaacaggaactcaaagacatgggcgaagatgaagacatcgtttatgaatatgaggaagatgtcgacgatgacgatgatatcgattatgaatacgaagaagaagattgggaagaaaaatgatttcacttacaaaacataacgagttgaagggatataagtcactggaggcatatcccgaagtagctcattttgtaactacgcgtcacgaaggtataagcaccggagcttacggctctttcaactgttcgccttataccaacgactcatgtatgaacgtcaatcgcaatcagagctggttgtttcagtgcatgaatcatcagataaaggaattatttattcctgaacagaatcatggctgtgccagtctgattatcaatgaatcattttttaaagaatcattggaaatgagacggctacttctgcgaggaatggatgccttgataactaatgtgccgggatattgcgtttgtgtcacgacggcggattgtgttcctgtattgctgtacgacaaaaaacaacacgttgtggctgccgttcatgccggatggaagggaacggtgaagcatattgtcagtaatgtgatggaccacttgaataagatgttcgggacgcaaggcgaagatgtgatagcttgcatcgggccgagcatttcgctcgaatcatttgaagtaggtgatgaggtgtatgatgcttttgaagaaagcggcttcgatatgtctctcatttctatgaagaagaaagaaacaggcaaatatcatattgatttgtgggaagccaaccggattgaattactgaatctcggagtgcctgcagaacagatagaagtggccggaatctgtacctatattcatcatgatgaattcttctctgcacgtagactgggaatagattccggtcgtacattgtcgggaataatgattagaaagtaataattggtgtccgttattgcaggacgctgatgattggtttatgataagttatgtttgaaataaaagtatctaaagaaataaaagacgcatgtccggtttttgccggagccgccgtgtatgctgccgtgaagaatacagcttacagcgaagggctttggcaggaaattgacgcttttaccgggcaactgacttctactacacagatggaagacatcaaacatcaacccgttatctttgctacccgtgaggcttataaacgttgtggcaaagaccccggacgttaccgcccgtcagccgaagctctacgccgccgcctgatgcgtggaattcctttatatcagattgatacgttggtagaccttattaatttagtgtctcttcgtacgggacattcgatcggtggttttgacgcggacaaaatacaaggtacgcaccttgaactcggtatcggcaaagcaggagaaccgtttgaaggtatcggacgcggtgtattgaatatcgaaggattacctgtatatcgcgattctttcggaggaatcggaaccccgacaagcgatcatgaacgtacgaaaatggatctcggaaccactcatatcctagccatagtcaatggttataacggaaaagaaggtttgcgagaagctgctgaaatgatacagaccttattaagaaactatacagaatcggatggaggcaaaatcgtattcttcgaataattagaatgagtgctctaagaaaaaagacatgaaaaacatacttatcttactgacagttttattattattgccactgactgccgacgggcaggataaaccttccttctctgcccgcgaaatggctgatgtacgggtagctactcccggattatttgctaaaggcaatcatatctatctgcatttggattctctgaaagaccacgaatatgcttttccattacccggaggaaaagtaatctctgcctatggaactcgcggaggacattcgggaacagacattaagacctgtgcaaaagatacgattcgtgctgcttttgatggagtggtgcgtatgtcgaaaccctattatgcctatggcaatatcgttgtaatccgccacgctaacggattggaaacactttatagccacaatttcaagaatttggttaaagctggtgatgtcgtaaaagccggacaagctatcgggctgacaggacgtaccggtcgtgccactaccgaacatgtacacttcgaaacccgtattaacgggcaacattttaatccgaatctcatttttgacttaaaagagagaacattgcggaaagaatgtatcaagtgtaccaagaacgggagtaaaatcgttgtgaagactcaaattcctgacaatcggattgctcaaaataaaaagtaaagggctatcagtagttgatgaatagccaggggattatgacaaattatggcacaaattttatgcagacaggtttgtctactttaatatcttgctgtatgtctgttaacagtcctgtgtttatgtctctttcataaacttgtattatattactgtctctgcaagcaaccaacaagtatttaccattaggcgtaatgatgaaattacgtggatgaatccctgttagttgatagcctgctttcgccaacattccgttatccgggtgaatactgaatatggcaataccatctgctttcaaacgattgctggcatacaggaattttccatccgggctgatatgaatatcggcgcttccttgtgcgtttaccgtatcggcagcgattgtctggatctcttttaaatctccgtctttgtattcaaaagcgattactgtgcccgataactcattaatcagataggcgtaatgaccgtttggcgagaaagtcagatggcggggacctgaaccggctttcactttaaaggcagcaggcgatccttctttcagaaatgcttctttattctctacatttgcagctgggttaatgataaacttatgtatttgatctgtacccaagtcatcggcaaacaagtatttaccatccggagtgatacggacgcaatgcagatgcggtttctcttgtcgttccttgtctactcccgtgcctttgaattgtataatatcggaagcgggtaggagcgagccatcttttgcgatagggaaaacggagatgctgccatcgctgtagttggcggttatcacattatttccactggcgatgatataacagggatcttcacctcccgtttgctgtgaatttaatagttgcaaagtacctttttctttattgaaggcaaatgcattggcggcagcttgtgtattgttgaattcactgactgcatagacgaattttccgtcggcagatggaacaagataagaaggattttcaatttccgtttcacttaacggagtggcagtcccgtcttcttcgttgaagcggtaactatatatccctttactggttcctgatgtgtaagtacccaccaacatggttagttcgttttccgttgtatcggttattcccataggagtcttttttttagaagtacagccactgatactgattccgaatatgcaaacagcggcaaatgctttgaatatagatgttttagatagatatgtcttaatcataagtagcttattattggttgatttttcatgatgctttttcaccttaaatataaaatagctccgtaaagatagtgctttgatataatatttgctaacgtcttctcgtaaattagaaaacatttcctatctttgcactcttggaaagcgttctaaacaatcgctattctgtacgaataaaaatttggggttgactggatttgacagcgggcagaaatggtaggtaagcatgcagtgggtcggtaatttccacttaaatatcagttaccaaaattttatctggcgaaactaattacgctcttgctgcttaatcgaatcacagtagattagcttaatccaggcactaggtgccaggacgagacat

SEQ ID NO: 8202 - DNA, 8122 bp, Unknown
  gut microbiota DNA sequence
ccacctttggtgagaggaatattattcatataatatccgtcaatatctgtaatcgtgtatgcagcatcgtattcatacgtgacggtgtatgtgaagctccatggcgaaggatccgcaactcccggatttgcttttctccacgcttcttgagcggccttttctgccgctgtaattgtagcgtcgcttacatgagcttgagcctgatcttttgttccgtttgtaactccagttggtagtccactaccgcttgttgaactattcaccttaatgtctgatgccttgccatgaaactcgaaacgtgacaatacaggcgctactgaaacctcgacactgtaaaggtcgtttgtattgtcgcctgttctttcccctcctggtgttttcaatgtgatatctttaggtgtaccacgatattccattttcgtgtatcctatctgcaagtcattgatgttggcagcactcttatcgacgttcatataaacgttcactttagtcgtagcgctgggaatgttgctgatattaacgggtttgcggcctgcagcagcggcagtctggtcgtcaccttttgccgtagttacttgctcgggtgtaaagtcatacgtgccaagcgaagcattggatgcgttgaagtactcgatggtaatgttttgaatattgcttctgaccgctgttattgctgtggtcacttcgtcatcgctcattctcgttttaggagtagcgacatcaaaagaaaaatcgagtgatttcaggttcgttgtttcttgggtcacctcgttgttctcattggaacaagcggagagagtggcggcgaataaagccatgaaaataattttcttcattgtttttataaataaaatgtttaataattgcgtcagcttttgctttagcttttgttttgcccgtttgatagtttggtccctaaacaaactataggtgaatgcttacctgtaggaggttgtttttttgttatgctttcttgtttttttggtgtttataaatctgttatttatctctgttattaatctttgttgttcatctctgctgttttttctttgactgttgttgcctgataagaatggcattctcctgcttctttgccatttctgccagattttgtttggcttccggcagtccggcttctgttgctctgttcaggtgtgatgttgctttgtcatagttgccgcaaagcatttccagtactcccattgtgttgtggtattcgggggtatcgagtgattcttctattttgctcaaatatcgtttggcgtagaccgtatctttgcgtgacaacgcggctgctgctgcattcagattggcggtcacgtcgtcgggatatagcttcacggcagtttcgaacaggtcgataaactcttgtgatcccttttcgtaggtgttggcaacaaggaacatctcattcaagctaaggttttgcggacggcttttgaatacctctttagcctgttcgatgctgaaatttctgacgtcaaagtcaatcttacaaatcgctttgcgaagtaaggggcagaactcccggatgatgtatctgtatggctcgccgcctttcaggttcatcaatgttttttttcgcctcacttgggcagcgtagtcacattcggccgggaaagactcgatgaactccaaaacttctttacgatacggcatttgggacgcctctacacattctttgagcccgtcccagttctcacccgcgaaagcgacttggtataaactccgcggataatcgaattgtgaagccaaataatcggtcagtgctttggcccggccttcggacaaccgttgattgttggacagcaagccttccggtgaagcgtagccgattacgttgatcgcgcggactgtgacgtccgggtcgtcttttatcccggcaacgaggtcggtgactttcttcagttcctgcggattattcatgtaatcggggcggatgtcggtcttgtttacaacgaaatccagaaaagcctcgctgatgatttcgcgtctttttaccggttcgacgacaggttgcacgtatgccatgctgggagttatttcgtacggctctattattttctctagcgttatacggttggcaagcatggtgatgcctatcctccgcgcaggattgccgcagccgcaaaggtcttcatacatatccagctttgcgtccgccatccacggattgtatttcacggctacgctgtatgcaattgtttttgcgttccccgatttgaatccggggacgactgcatacggagcttctgcggcatacgccgctttttcccggttgctcatcaaggcggtttcccgtcggtacacgttatagttttcacgtcctttgacgactacttcgggcaggtccagtctgtcgcctgccgctaccagagtgggaatcaggctgatcgaacgacgtgaatctacgtttaccccggaaatgtcgaaagagagtttcacgtacactgaatccccttcttgttgcagggacagcgccgtgacgtgtattttcccggaatactctttttgctgtgctgatgtgttcgtgcagaacaacaacacgatgccgaatagcatatattgtcttttcatgtttgtttgtctatttaaggtaatatatcagtgatattcctgctttcgtaggaccgaaataatttctgctttctgtcccgatcttttcgccgcacttttggcatttgtacttgtcatagtgcaagcgtgcatatccgattcctagattggcttcaatactccatcgtatgcctagaaagaagttgtagccgtatgaaattccccctccgtagccatagccttcgaagcggtattctttagaaccttttccgaatatgagtggcaaatcctgttgcgcaatattatattggctaccgagaacgtgtactccgaaaaagtgtccggagaagcgttggcatagccagtaacgatattctatttcgcctagccagtggactagttttttgttgttttcagccgttccgtcaagattccagggattatagccgccgcctaaatcgagtgtgcttcttttacccaaacctatttcaagactaagattcggggtataggtataacctccgtaaagtaaatttgtttttatggctatatcctgcgctctcgagtatgaaacgaggagggttaggatgaggagggtgaaaatacttcttattttcattatatttacttgttgattatttttgtatgtgtgtttttaagtttgtactatttgccagtttgtttcgttaattgaaaaaaatgtaatatctatctgttctttctcttcaaaagagacggaataaaacttgtattatgtgcgtaatcgtcttataattagatgtgtagttgtgcgcttggctgacggaaagttccttttatttgtgaaatatgggtaaatatatttgcggtagcttgaattcatagtgatctgattattttgaatatagcttaaatattgtttgagaaatacttgcgagtaaagatttaaattgtttattttgcaaataaatattttattccgtctcttttgaagagaaagaattgcagtgaacaataatttgtaaatcaattgattatgcatagactttaattccatcttgcagtcctgcatatattcttatataccggaaatcagtttggcattagcatcatcaatcacggacctgtcaagagatgagagatatattcgggttgtcttttcgctattatgtcccatactttcactgatgatttgtgtagatataccttttttcttggctagtgtagcccaactatggcgcgccacgtatgaagtcaaaggtttgggaagtcccatgaagccggagattttctttaaatgaatattatgaagtctcaaggcactatcataattctgtgtactttctgataaaacaggaaataagaaagttccgttactgtaatgagagtatctatcaataatagtttttaagcatatttctagttttatgctaagttcttgtccggtcttatggcgtcggtaaataatatattctccttgaatattctctttggttaggtacgccagatcaataaaagccatccctcgtgcataaaagctgaacataaacatatcgcgtgaaaaagccaatcgtggttttgacgataaatccaatgtttttaatcttgatatgacatcttcgtctattgcccgtttgatggttttatcattgcctacgaatacttttttaaacggatgcttttgttctgtatagctttcttcgacagctctattataaatggctcttaggtttcgcatatagaatgaaatagtattattacatatctgctgctctttcagatatctttcgtagtctgaaataagtttaggagtcagttcttcgaaagaaatgtcaactccgtttctgaaccggaggaaactttttactgaagctatatatgattttgcggttcggggttggttcttgatatacaaatcatttgtgacactcttgctgaatacggataataggctttcaccttgaatttttttgaaaagtttgatgatggtatcaatgttgttttcacttgtcagaatgtgctgaaggtgtcgaatatcccggatgatggagttttcaatgagctgcagttcatatctgcgctggtattcggcatttgatatcgcaattagcgaacgcttgtcattccactcgtgtgaatgaatcttatacggagttgttatctctctgtattctttattccttgtcaacagataatagatggttcctttctttttcttaattgttgattctctaaatttaaccttgatagttatcatatttttctattttttttaggtaacgtggactaccggctattgttttttgtaaggggtagaacggttttatatttttgtttaattgtctcaagtaaagagactgtcagggttgttatggaaattttatttaaataatgctgccgtaaaatttaggctggttcaaaagtattattaaaatatattttcctttctttgtgaaaggaaaatataaacattctgttttatggaaaactctttcagttatcagccggcagccggacgctacgaacggatgccctataaatattgtggcaagagcggcttgcagttacctttaatctctttggggttgtggcacaacttcggtagtgtggacaatttcgatgtagctaccgacatgattaagtatgctttcgatcatggtgtcactcatttcgacctggcgaacaattacggccctcttcccggaagtgccgaaactaatttcggacgaatcttgcgcgagaacttccagggctaccgggatgaaatgatcatctcttccaaagccggacatgacatgtgggctggtccttatggagggaatagctcccgtaaaaatctgatggcgagcattgaccaaagtctccgccggacagggttggagtatttcgacatcttttatagccatcgttatgatggagttactccggtcgaagaaaccattcagacattgattgatatcgtgaaacaagggaaagcgctgtatatcggaatctccaaatatccccccgaacaagcacgcatagcctatgaaatgatggcaaaagccggtgttccctgtctcatcagccagtatcggtatagtatgttcgaccgtgaggtggaggcggaaacacttccgctggcagcagaatatggttccggtttcatcgccttttctcctttggcgcaaggactgttgacagataaatacttgaatggtattccggaaggttctcgtgccgcacgttcttcgggttttctccagctttcgcaagtgacgcctgaaaaggtagaagccgcccgccagttgaatgaaatagccctccgacgtggacaaacactcgctgaaatggcactggcatgggtattgaaagatgaacgaatgacttcggtgattgtgggcgcaagctctgtcaaccagttggccgacaatttgaaagcactggaacatttggaattcacggcagatgagttgaaagagatcgaacagattttacctgaataatttcagcctgaatcgtatgctgatttcaccttattattgaaaatgataaggtgaagtcagctattttaaggatgctcctgtccagtcatatacatatttccaagatttaaccatgcgattgcatctcctctggctgctgctattttaaaatattcaaaaggtttttaaagtcactagcatctatatcatttaataacaaaagaatggaatattattgagtaaaaaaacagaaaagtgttaggaatgctcgaaaaaaatatatacattcgtataatattcaccttaaatacttgtgatatgaagcaattaactgtagtattcgctctgttgtgtatttttgcttgtagtagcgaagatattgtaagtaccgttgaggaatctgtaaagccggctaatgaagtggctatacaaactgttaatttgcttgatagccttgaaattatggattatatttatagcattattggaccgatggctaagacacgatcaaatctaccagggggagggtatattcttcctgataattgggattctcaattaacagatgaacagcgcgaattgctcaggaactctttcccacgacctctcttttctgctgaaaggaatgctttaaggaaatcgtttcctttagttgaatattccaatacagttgttatgaattatccgtcatctggatataattgttttgcctattcgttggggtttaataataagtggatagagtttagtacttgggatcaagtaagatatggatatgaaaatgcgagttccgtgtatcatgccgcttatgattacatgaaaggggcaacctcaatatcaagatactatcctgtagtttggggttggggaaatacccctctgcatgcatctcttggaggtagtccccattgcgaggcaccttattctaagatggggcgtatgtggctattgtggcaccttgtaagtgtgttttctaatggaatgtatggagttcctgtggaaacctatggggcagtttctcctacccgtagtctaagtgaaatagatgctaatgcaatgaaagaaataagtgaggatattcacgaaaatataatcttctcaccggatgagttgatgatgattgctagaaaagtaaaaacatgtagagatagttcaaggtttgaatctctgtttaatgaatggaaggaagcatggcattactcgcttagtaataacactgctactacaagaaatttacctcaatatgccgatttaaaggctatgggaaaagaaatcattccattattgattgagaagatggtaacagaagaggataatttctttgcaataagattgtatgaagatctacaagataatcctaatctgataatacgatatgcgaacgatgatccacaccaacttgaaggattacaacaaacaaccaaaaaaactataaagaagtggttagaatataattccaattaaagttatcttgggaatgataggttgttggatattgcgtatacctttaaattaagaatatcggctcaaattgggccgatatttgaatataaatattcaagaaatgggatatcaataataatagagataagtctgtttttaggatcttttgctggagtgtttctcgtttgattttactgtgaaaaacttatttgtagtcttaatcgaaaaatggatttttgaggtaaagaaaatatgaataatatttctctgcttttgaaagaactgaatgtcatatgtgaggattatgaacgtagggaaaacttactgaatactttcagttcacatcggatatgcatcgtatgatttataccataaatacagttgaggactgtcatcatcagatacggaaagtgacaaaaaaacaagggcgtgttccctaacaacaccgcccttaaaaaactgttttacctcgcttatcgcaatatatgtaagaaatggaccatgtcatactggctaactggggagctagtgcacgacaactggcgataaaatttgtagataggtttaaaatgttgcaattttacgtccgttgggacgggtagtgctgccccttggcgctggccgttcaccgaccgatgagattgagtgagaataaagcatacatagtttaatttacacat

SEQ ID NO: 8203 - DNA, 5227 bp, Unknown
  gut microbiota DNA sequence
cctggaatcatgtcatcgtttattatatgtttattgttgttgcgaatgatttctctttactgccgatttggctgttttatcagtgatactgtccgtttgatgcgttttcaccttttctgcttcttcccgtttgcgcttattacgcaaccgccatttattccaaaaatagagatcactccatttattgaagtccttcttgtacatgatacctactccctgtgtagtcagatttgtttttgtataatagcggtcattcgtctcattataagcctttaagcgtatatctcccgaacgggtaatcaaccattctgcttcaaagtctcctacaaagttagtattagccatcggattatcccgataaccgaagtttccgtttatcaataaacgattattcaataattgtcccgatagaataccttctacttccatatccgtccaacctttatcacccgtactcaaattcgtacctatattccagttatttgtttcaaagacttgtgaaagtgcattgttcaactggccggagagggtagatgagagcaccgaagacatcacattcgaattttgattattattccgtgcatcttccgtataaaacttaccaatacccagcaggtaaaggatctgcatattcatctgttcttccgtactgatatagttacgcaccaatgtttgtatttcatccctttcatttggaagctctatgcccagcttgatagtcggacgtaccagcataccacttaaattcatgatacaatttacacgtacattgggttgttggataatagccgaagcatccggtatcaagtcattcaaggaagcagaattcactgtatatgaagcttgtatatccatgttagcatccagaggtgctccattgaacgttattgtgcttccatccttgattataaagtccttacggattacttcctgcaagctgaatttatatactccctgattaatccgataattaccaaacatcttcacatcacccttattataaaattccgttcgaatatttcccgtaccttttccgctgatatagtctccagcaatagggtccatgataattcgcatggtggcatcgggagttgcatccaccagaatattcaaacggatatccgttttctgctcttcttctgcctgacgtttttgctgtatttgttcgtaatatgagattacctgaatagaatcctgaatagtacgacggggtgttttatctacaaacttaataaactgattactggtagccgatgctacactgccattaatataagtaaaggtagtatttcggttggttgtcatagccacgtttacatccaacccttgtgtggcatttccggcaagtaatacatttccggtaccgtataccgtaccatagaaaggcatatctgccgattccttcgtattcatcacaagcatattatttgcctgtatctcaaaacgatagtttaagttcttaaaatgctggaaatgcaaatatccgtccattcttcccgaatgtccttccatgtcggatatatgtatattattaaatgtcaatccggtaggagccagatgaatcgtgtcttttacagcaaaatgtgtgttcagaatatcaaacttcatggaagcgtctgtcataaccgcaccatccaaattcaatcctttgaattttccatagaaatgtacttttcccgtcccacgtcctttaatatcattggcaatagacttcatataatgttcgaggaattttaagttcaattcatttgcttcaatatttaaatcaagtccgctctcgggtttcaatggataaataatacctgtgacacgtgacggagaaggggatatgtcctgaatggatgcatccaaccggatacctctattttcgttatcccactcaccataaatatccaaatcacccaagcgaccctgattaagtgaaaagttctttatatataaacgggtattcataataggtttctttagcactccgcttgcataagctgttcccgttgcatcaccttcaaaattcacatcgtcggatatgcttgcaatatcaaatacatatcccatatttatatcttttaaatcaacctttacagtatctttaggattctcggagagccggccgttaatacgtacatatctatcctgatggctaaagtagaagttattcacatccaccctgcctgaatcgaccaccacttgtgaagcatgtatcttccaaagagtatcgtttaaaataacatcagtaggttttacatccaccatcgctttcaacaatggtttttccccgcttgtacgtagaaatttggcaacggcagccaattgcccgctatatgtcactgcagcattattcccccaattcaatgtcgtactgacattatcatctttagcttgtgcatccaaggatagattgactgcccctttctttttcaaagaagtcaaacgaacctgtgcacgaatatgatctgcaggattctcgcacagaatcatgcccgactcaataaagttatttttatattgcagacggggaaaatatccttctacacgcaagcgttgtaaggcatcattgaaatatcccttcaatgtggaatgagtgtacactgtcaacggtatatcaaagattgtagataaaatgtccatattatatatatgtacgtcaaacagaaaattgttatgtgtttcaatcggcttcttgggaggtaatattaaagacggcacatacttccgcataatattcagaatactggcaggtaatgtgtggtactggaatttaccttctatacttgctttcaggaattcagaagtcaatcttagttggttctcgccgttctgtttggtagcccggatattcatattctgcataaaatatgctttatccggagctgtaaattccaaactatccacattgatttctccaatcatctcatccactgatccacctgtgaaattagctttcagttttaaagagaactccgcatctggatatttagtcgtaagattcaaatcatgtggacgtactttgttgactactgcaagaaaattaaaagtaggcactttagacgtaacatttacatctccattcagataaatcgatccattagggtcatccaacgccactttaccattaaatccaccttgtttgtattctccatccaatgtgatattttcatatctatatctgctataatctaccgaagcgatcaatcctttcaattccacagctggcaattgcccggtaatgtgccgcccatgtacatccagattgaaagtgatttcttccaacttctcattatccaataacttacctaactggaaatcttcagttttgacagcaccggaatatgcaaacagtcctttagccttgtcagaactcaattttaagtcggtttttacatttccaaggctcgtttgtaattgcccgtaagtaactaggtccgtaaagtatcctgaaatctctccctgaaaacttacatttcccaaacgttcgagaagcggaggaactccattataattgtgactcaaattacgcactaagaagccgactccacgagtattggccgaaagctcggaaagtgttccatatacatacgcatcttgtggacgcgacaagtcctgaagcgacacatcccctcgcaaacgaaactggcggtcgtcggccgtaatttccaaatgcgaacaagtcaactggtccacagttcccttcacctccatatccaatgtcaccggttccttgaaatgcgataggataggaacaaaaggagaaatatcttttagagtaacttgcgacggcaaagtacggaaagagaaatgcacttgttctgtaaaacggtcaaaagctttcaaactatcatactctaaatgaatggtatccagcttaagagatgtttcgggcaactctatagtaaaattatcaatgtttgtctgcttgtcattggcaaccagtttcaaactcatttttttcaaagaaaagccggatgccttttcatcaaggctcaatcgcttgattcctaaattcaaagagtccttacttaaggctttcagcgatatattggctatgatattttgaagctgaatatgcttggcgttaaattttcccggtgtttcctgttccgataacacatgataggacatccttccacgacgaatcaggatggagttaattcgtaaatcaagtgaactttctctctttactgtatctttggaagcaaaagcatccaaaacaaatttaaaattaggaggagactccggagtctctttccggagatcgatattaaatccgaagagctgaacactgctaatggatatctttcctttaaagaaaggcataatatcaaacttggcggataaacgagtgactttgagcatttcctgaccactttgatcgtcaagcaatacatcatcaataataatacggttcaatagaccgatattaattctaccaatcactacctttgtgtttaaaacttcggaaagttctttagccacaaatacactcattgtttgctgaatgcttggtatattcagcaaaacaatagtcccgatatatactcccagtacaataccaactacccagcgtacagtctttttcagcgttctgatatgcgataacttttattttgcgaacaaaaatataaaatagttcgttacgaatcgtagttttatgattacttttgcaccgtttaatagtttaaatacttatgagtgcaataattttaggaattgaatcctcctgtgacgatacgtcggcagccgtaatcaaggatggttatttgctgtcaaatgtggtatcaagtcaagccgtacatgaagcatacggtggagtagtacccgagttggcttcacgggcacaccaacaaaacatcgtaccggtagtacatgaagcattaaaacgtgccggtgtcaccaaaaaagagttaagcgcagtagctttcactcgtggtccaggattgatggggtctttgcttgtcggagtctcctttgcaaaaggatttgctcgttccttaaacattccaatgattgacgttaatcacttgaccggacatgttttagcacattttattaaagcagaaggagaggaagaaaggcagcccgctttcccatttctttgcttgctggtatccggaggaaattcacaaatcatactggtaaaagcctataatgatatggagatcctcggacagactattgacgatgcagcaggtgaagcaattgataaatgttctaaagtgatgggacttgg

SEQ ID NO: 8204 - DNA, 10783 bp, Unknown
  gut microbiota DNA sequence
gaatggtacgataaccgatgtagacggtaatttctcattaagcgttccggctaacagcacgctgactatctcttttgtcggctataaaacgcagacagttccggtgaacgggaaaaactcgttgaaagtaaccttgcaggaagatacggaagtattggacgaagttgttgtagtaggttacggaacgatgaaaaagagcgatttgactggtgccgtatcttccgtcggagtgaaggacatcaaagattctccggtagctaatatcggtcaggcaatgcagggaaaagtatccggcgtgcagattatcgatgccggtaagccgggtgataatgtcaccattaaaatccgcggtttgggtacgatcaataacagtaacccgctgattgtcattgacggaattcctaccgacttgggattgtcttccttgaatatggctgatgtggaacgggtagacgtattgaaagatgcttcggcaacagctatctatggttcgcgtggtgccaacggtgtggtgatgattaccagcaaacgtggtgccgaaggtgccggaaaagtaacggtaaacgcaaactgggctattcagaacgctactaaagtgcccgatatgctgaatgctgcgcaatatgccgccttgagcaatgatatgctgtctaataatgatgataatacaaacccttattgggcagacccttctttattgggaacaggaacgaactggctggatgagatgttacgtacgggagtgaaacaaagctattcggttagctattccggtggtacggaaaaggcacattactatgtatccggcggtttcctcgatcagtccggtatcgtagaaagcgttaattaccgtcgtttcaactttcaggcaaatagtgatgctcaggtcaataaatggttgaagttcactactaacctgacattcagtacggacgtgaaagaaggaggaagctatagcatcggagatgcgatgaaagcactccccacccagccggtgaagaatgaagacggtagctggagcggtcccggacaggaagcgcaatggtatggaagtatccgcaacccgatcggtacgctgtatatgatgacgaacgagacgaaaggatataactttctggcaaacatcaccggagagattgcctttaccaaatggttgaagttgaaaagtacctttggttatgatgccaaattctggtttgtcgacaactttactccggcttacgactggaaaccgaatccggtagaagaatcttcccgctataagagtgacaacaaatcatttacctacctgtgggataattattttgtattcgaccatactttcgcccaaaaacatcgtgtaggtgtgatggcaggttcttccgcccagtggaacaactatgattacctgaatgctcaaaagaatatcttcatgtttgataatatccatgaaatggacaacggcgagaagatgtacagtatcggtggcagccagagcgactgggcactgctttctctgatggcacgtctcaactattcttacgaagataaatacctgcttacagccactgtgcgccgtgacggttcctcccgcttcggtaagaacaaccgttggggaacattcccttccgtttctctggcatggcgtatttcgcaggaagaatggtttccgaaagacaattctccggtgaatgacctcaaattgcgtatcggatacggtgtgaccggtaatcaggaaatcggtaactacggctttgtggcttcctataatacgggagtttatcctttcggcaacaacaactccaccgctttggtatctaccaccctttccaatccgaatattcattgggaagaggtacgccaaaccaacttcggtgtggatatgagcctgttcaattcacgtgtcaacctttcgctggatgcctacatcaaaaagacggcagacatgttggtgaaagcttccatccctatcacctccggttttgaagatactactgaaacctttaccaatgccggcaaaatgcgtaacaaaggagtggaaatgaccctgcgcaccatcaacctgaaaggtcttttctcttgggaatctgctttaacggctacctataacaagaatgaaattctggacctgaatagcgaaactccgatgtttatcaatcagatgggtaactcatacgtgactatgcttagagccggttatccgatcaatgtattctacggatacgtgaccgacggacttttccaaaactgggaggaagtaaatcgccacgccacccaaccgggagccgctccaggcgacattcgtttcagggatttgaataacgatggagtcatcaacgatgaagaccgtaccgttatcggtaacccgaatccgaactggttcttctctttaagcaataatttctcttataagggatgggaactctccgttttcctgcaaggcgtatcgggaaacaagatttataacgccaacaatgttgacaacgaaggaatggcagccgcttacaaccagaccacagccgtattgaaccgctggacgggtgaaggtaccagcaactctatgccccgcgccatttggggagacccgaaccagaactgccgtgtatccgacaggtttgtggaaaacggttcctatctccgtctgaagaatatcacgctttcgtatacactgcccaaaaagtggatgcaaaagattcaactggaaaatgcccgcatctctttctcttgcgagaatgtggcaactatcaccggatattccggcttcgacccggaagtggatattaatggcatcgacagcagccgttacccgatttcacgtaccttcagtatgggcttgaactttaacttttaaatcaggagaaagaatatgaaaaagataataactttggtatttatgtctgccgtgctggcattgacatcgtgcaatgatttcttggataaatatcccaaatatggcgtcgatcccgagtcggaagtgacgaacgagattgctgtggcactgactactgcctgctacaagactcttcagtcatctaatatgtataaccagcgtatttggagcctcgacatcatcgcaggcaacagtgaagtaggagccggaggaggtactgacggtttggagactgttcaggcttccaacttcatagcccagagcgacaacggctttgccttgtatgtatggcgttctccgtgggttgggatcggacgttgcaacatcgtgctttccaatttgccttcagcatctatctccgatgagataaagacccgttgcatgggtgaggcttatttcctgcgtgcacattattattatattctggttcgtttgtacggaggggtgcctttgcgcttggagccgtttgaaccgggagaatctgcggatattgcccgtaatacggtagatgaggtatatgctcaaattctttccgactgcaagaatgcagtgactatgcttcctccgaaaagcagttatggagatgctgacaggggacgtgcctgcaaagaggctgcaatggcgatgctggcggatatttacctgacactggctcccaatcatcgtgactattataatgaagtagtgaccttgtgcaataacattgctgcaatgggatatgatctgactcaatgcaattatgccgataactttaatgcgacgatcaataatggtgcggaatctctcttcgaagtgcaatactccggtagtacggaatatgacttttggggcggcgataatcaagcgtcctggttgtctactttcatgggaccacgtaattcgggtatggtagccggtgcttatggatggaacctgcctacggaagagtttgtcaagcaatacgaagacggtgatttgcggaaagacatcactgtgttgtatcagggttgtcctgcttttgacggtatggaatacagacgttcctggtcgaatacgggttataacgtacgtaagttccttgtatcgaaaaccgtctctccggagtataataccaaccccaacaactttgtagtataccgttatgcggatgtcttactgaagaaagcggaagccttgaatgagcagggacatccggatcaggctgccgaaccgatgaatatcgttcgtaagcgtgccgggctgacagagctgccgaccactctgacgcagaccgaaatgagagaaaagattattcatgaacgtcggatggaacttgcttttgagggacatcgctggttcgatatgatccgggttgataatggaaattatgcattgacattcctgaaatctatcggtaagaataatgtgaccaaagaacgtctcctgttgcctattccgcagacggagatggactccaatcacctgatgactcaaaatcccggttattaatccgttttataatcattcatttagacaaataatatgatgaagaaatatatatatcagttgttatgctctcttttcatcggcgcaacgatggttgcctgtacagaggattatatggagacagataaaggacatgatactctcaccctttcggtgaatcagcaggagctggtgttgaacgaaaagaaccatagtcaggaggcgctggcgctttcatggactaccggaacgaattacggaagcggtaaccgcatctcttatacgctggaactggcgaaagcaggaacagacttcgcgaatgcttattcggtagatttaggtacgggaacgtaccagtggaccaagaaagtggaagaactcaaccagtttttaaattcgcagtttggtatcggctatgccgtaaaagcggagctggaagcacgtattacagccgtcgttgccggaatggaagatcagaagcagagcgcgacgactgcctttacggtgactacttatcagccggttactaccacgctttacctgattggcgatgctgccccgaatggatggagcgccgatgacgcaacggcaatggagcgtacggataatggacagtttacatggacaggaaaactgaacgtcggatcgctcaagtttataacgaccttaggagaattcctgccgtcgtacaaccgtgacgctactgccggagaagaactcaaactaatttatcgtacatcgggtgaccaaccggacgagccgtttacaatcgataaagaggcaacctacatcgtaaaagtaaacctgttagacctaacgttgacatttaccgaaacagaagatgttggctggagatatgaggaatttttcattgtcggttcgtttactggcaacggtggctggggatttgaagcactgtctaaagatgctgcccaaatggatctgttccattatggagccgtgattccctggaaggcggacggagaatttaaattcgcttctgtgacagatttcggtcaggcggatgctttcttccatcctaccatggctaatgctccgtacacttcgacatccgtagtgcttggaggtgacgataataaatggcagatgaaggaagccgaatgtggcaagccttataaagtatggttctacacaggaaaaggaaaagaaaagatgctgatgcgtccgttcactccttacgaaggactgtatctggtgggtgaggcaactccgaacggatgggatttaggcaatgctactccgatgactaagagtgccgacagtccttatatctttacctggagcggcacgctgaaggcaggtgagatgaagatatcctgcgataagcagtcagactggaacggggattggtttatggcggataagagcaacaaggctccgacgggagaagtagaaacggcattgtttgttgctaagtcggatgcggagttgagcagtatgtatccggatgcagatttgggtagtttggattataagtggaatattcaggaagccggttcttatcggattacgattgaccagttgaaagagacgatttcgattgtgaaacaataaaacaagaattcaagatgaagaaaataatatattgggtggctgcttttctgtgtatggcttgcagtgacgatcatgggtcgaaccaggagaatggaggagcttcgggcagtgtcaccgaagtgactccggtaacatcggatttaagtgtggacctgtctacggataaggctttctataaaccgggggagaaagtggtatttacagcagaagatgcgttgcctgccggaactaaagttcgttatcgtcttttaggggaggttgtcggagaagagtcggtggtaaatggtaccagttggacatggcaaccgcctactactgatttcaaaggatatatggcggaactgtaccgtcaggagaatggtacggatgtgattgtcggtacgattgcggtagatgtatccagtgatccggcacgttttccgcgttatggttttgtcgctgatttcagtcgggagaagacggctgaaaagacacaggaagagatggcgtatctgaatcgtcatcacatcaattgggtacagtttcaggactggcataataagcatcactggccgttgggcggtacacgcacacagttggacgaagtatatatggacatcgctaaccgggaggtttatacaaattcggtgaaaaattacattgaagcgcagcatcgtttcggtatgaagtctatgttttacaatctttgtttcggggcgttgaaggatgcagctacggacggggtgaaggaggaatggtatttgtttaaggatgcttctcacactactaaagacagtcatgatctgccgggcggatggaaaagtaatatttatctggtagacccttctaataaggaatggcagaaatatttgaacgaaaggaatgatgatgtatatgcgaactttgccttcgacggctatcagatagaccagttgggacgacgcagcacgttgtacaattacaagggtattccggtcaatctgcgtgaaggatatgcttcttttattgaagcgacgaagcaggctcatccggacaagagtttggtgatgaatgcggtcagtcgttacggtgcccgccagataggggagacaggtaaagttgatttcttctataatgaggtgtgggcggatgaggctgattttaccaatctgaaagccattctttatgaaaatggagtctatggcaattatcagttgaatacggtttttgcagcttatatgaattataataaagcggataaccggggagaatttaatacgccgggtattctgctgacggatgctgtcatgtttgctttgggtggttcgcaccttgagttgggaggcgatcacatgttgtgcaaagagtactttccgaatgagaacctgacaatgagcgaagaattgaaaacagcgatggttcgttattatgatttcctgacttcttatcaaaatctgcttcgtgacggtggtacggagaatagtgtttccatgaattgtaccaatggtgaaatgagattgaatagttggcctcctcaacagggatcagttactacttatgccaagcaggtaggtggcaagcaagtgatacatcttcttaatttctcgcaagcgaacagccttagttggagagatgtggacggtacgatgccggaaccggctctgattacaaaagcggctttgcaaatgaatctgtcggcaaaggtgaataagctatgggtagcgtcaccggatgcacacggaggggctttgcaggaattggcctttacacaggagaatggagttgtctctttcacattgccttccttgaaatattggacgatgattgtggctgaataaagcggctgctacagaataactaaaatgataggtatgatgattagatatagattatgggtatggatgttgtgcctggtatttccaacatgggtttgggcggaaaatgagacacgtacatgcacttcttttacacaacaaggacgtcaggtgacttttcacctgacggacagtgccgcgttgcaattgcaactttgtagctcttccgtcgtgaaaatctggttctcacccgacgggcaattgcagcgaagaaatgtttcgtttgcagtgattaatgaagaactggaagaggtaggaactattcatgtggatgaacaggcggcctgttatgagatatttactccgaagttgcgtatccgggtgaataaatctccgatgagtcttcagatattcgataaatatcagaaacttctgtttagtgattatgccgataaaggccatgtcaatgaaggaacgaagaaggtggaatataaagtgcttcgtcgtgacgagcacttcttcggacttggtgagaaagcgggaaagatggatcgtcgtggcgagtcttataagatgtggaatagcgacaaaccttgttatagtgtggtagaagatcctctttacaagagtattcctttctttatgagcaattaccggtatggtattttccttgataacacctataagacggaattcaaattcggaacggaaagccgtgattattacagctttgaagcgccgaacggggaaatggtatattactttatcttcggtaaagactataaagaaatcatcagccaatacgtcggactgaccggaaaacctatcatgccgccgaaatgggcgttgggttttgcccaatgccgcggtctgttgacaagtgaaaagttaagccgtgaaatagccgaaggctaccggaaacggggaatcccttgtgatattatctatcaggatatcggctggacagaatacttgcaggatttcgaatggcgcaaaggaaactatgaaaaccccaaaaagatgctttcggatttgaaggagatgggttttaaggtagtcgtatctcaagacccggtaattgcacaagccaataaaaaacaatgggaagaagctgaccgcttaggctattttgtaaaggacaatacgaacggcaaaagctacgatatgccctggccgtggggtgggaactgcggagtggtggacttcaccctgcctgccgtagccgactggtggggggcttatcagcagaaacctattgatgatggtatctccggcttctggacagatatgggcgaacctgcctggagtaacgaagagcagacggaacgcctggtgatgaagcaccatttgggtatgcacgatgaaatccataacgtctatggcctgacctgggacaaagtggtgaaggagcaatttgaaaagaggaatccggaccgtcgtgtttttcaaatgactcgtgctgcttatgccggattgcaacgttatacgttcggctggacgggtgatagcggaaacggagacgacgtattgcaaggttggggacaattagccaatcagattcctgtaatgctttccgcaggtttgggattaatcccattttcttcctgtgatattaccggttactgtggggatattgaggattatccggctatggcggaactctatacccgttggattcaattcggtgcattcaatcctttgagtcgtatccaccatgagggagataacccggtggaaccgtggcttttcgggccggaagcggaaaagaacgcgaaagcggctatcgaactgaaatatcgtttgttaccgtatatctacacttacgcccgcgaagcgtatgatacaggattgcctatcatgcgacctctgtttctggaatatccaatggatatggaaactttctccacagatgcccaattcatgttcggccgtgaattactggtagcccctgtggtgaagaaaggtgcccgcacaaagaacgtgtatcttcccgaaggtacatggatagactacaacaacaagcaggcggtctacactggagagcaatggactaccgttgacgctcccttgtcctctgttcctatatttgtgaagcaaggttccatcatccccaccatgccggtgatgaactacacccatgagaaaccggtatatccacttacttttgaaatcttccccgcacaggaaggtgcacaggctgcctttactctttacgaagatgaaggagaagacttaggatatcagcgtgatgaatttgtcaaaacaccgattatttgcagcactctggcaaatggatatgaactgaccgtctctgcccgtgaaggaaaaggatacactgttcccggtccgagaaatctgttgttccgtatttattctgcgaaagctccgaaagagataactgtcaaaggaaagaagataaagaaaactaaaccggaacgcttggaagaagatttagagaatgacacggaatctgtattatggagttgggataaagaaactggtgtctgtagtgtgagaatacctgataaaggtgttgatgaacagttgatgattacttttaaataaacagggagctgttggcaagctaatattcagagtttttctttcgttttatatggataatgtgtagattcgcacgaaactcatatcagaaatgtgtaagttatcacatttctgatatcaaaagtgtgattcattatgagaagcttttcaacccgcttacctgattcgctatttaatgctgaatttgaaacaagatggtaatttgattaatatccccctgtttttggcggataagacaaaagaactattgaaggataaaagttgaaagagccttctgaaggaatcaataaccttcttaaaaaacgatgattcttaaaaaaggaatatttaatcattggaagaaggacgtgaattgcaagtttggtaaagaaaagcaggaaaatgtcctgcatttgtaattacacgattctctatttctgctgtttcgaaaatatgccaatcaagctgcgatagatttttgattatttttgttatttggagagcagatgcccgaataattaatcattttattgttttttcctgtccgatatattatggtaaactagagaaaaaaatgtttctt

SEQ ID NO: 8205 - DNA, 10846 bp, Unknown
  gut microbiota DNA sequence
actacaggaattataaaagataaacgacacattggagcgcctatattttcaaccgtagccgtatccgggaataagatgattgtttgtggttttgcgggtaatgtttattgcttttcatcgaagtaaactccctcttcactatcataatgcataaactcaaatggtacataagcactaaaattatatagatacagtttttgccaccccacacgttgtaatttaaagattatcacgtatctttgcctgctcaaatcataaatacgagatatggctattacaatcaagaaagtctccacaaagagagaacttaagaaatttatccgtttcaattacagaatgtacaagggtaacccttactctgtgcctgacctctatgacgacatgctcaacaccttcaacaagaagaaaaacgcagcattcgaattctgtgaagcagattatttcctcgcataccgggacgataaaatagtaggacgtgtagctgcaatcatcaacaatcaggcgaacgagaagtgggaatgtaaaaacgttcgtttcggatggatagacttcatcgacgatcccgaagtatcatccgcactcatcaaaacggtggaagaatggggaaaagaacgaggcatgactcacattgccggtcctctcggatttactgatttcgatgcggaaggaatgttagttgaaggattcgaccaacttagcaccatggctactatctacaactacccatactatcctgtacacatggaaaagttaggcttcgagaaagacgccgactgggtggaatacaaaatctacataccggatgccattcccgacaagcataaacgtatctccgaactgatccaacgaaaatataacctcaagataaagaaatatacttccggaagaaaaatagccaaagactacggacagaagattttcgagctgatgaatgaagcatacagtcctctttatggctattctccgttgacacagcggcaaatcgaccaatacgtgaaaatgtatctgccgatccttgacttacggatggttacactgattactgatgccaatgacgaactggtctgtgtaggtatctccatgccatctctcgccgaagctttacagaaatcacacgggcgtctgttgccactcggatggttctatctgttaaaggcactatttatgaaacgccgtgccaaaatgcttgatctgctactcgttgcagtgaaaccggaatatcaaaacaaaggtgttaacgctttgttattttccgatttaattccagtttatcaaaaattaggttttatctttgcggaaagcaaccccgaactggaactgaacggaaaagttcaggcacaatgggattactttgagactcaacaacataagcgccgccgtgcgttcattaaagaaattaataattaagaatgaagaatgaagaatttggctgcgctactacttaatgccgcatggcaattcttcattcttcattcttcattcttcatttataacagctatggaagagaacgaattaatacctgtagacaacaacaatgcagtagagtacactgacgacaacatccgtcacctaagtgacatggaacatgtacgcacacgccccggtatgtatatcggaaggctgggcgacggtgcacatgccgaagacggaatctatgtcctcctgaaagaagtaattgacaacagtattgacgagttcaaaatgcaagccggtaagaaaatcgagattaccgttgaagaaaacctccgtgtcagcgtacgtgactacggacgaggcatcccgcagggaaaactcatcgaagccgtcagcatgctgaacaccggtggtaagtacgacagcaaggcatttaagaaaagtgtcggactaaacggtgtcggtgtgaaagccgtcaacgccttgagctcccgttttgaggtacgcagttaccgcgacggtaaagtacgtatcgccactttctcaaaaggaaacctgctgaccgacgagacgcagaataccgaagaagaaaacggaacttacatcttcttcgaaccggataatacattattcctgaattactgtttcaagcctgaatttattgagacaatgctacgtaattacacgtacctcaataccgggcttgccattatctataacggacaccgtatcctgtcgcgcaatggtctggtagaccttttgaacgacaatatgacggcaaccggactttacccgatcatccacctgaaaggggaagacatcgaaatcgccttcacgcataccggacaatacggagaagaatattactccttcgtcaacggtcagcataccacccaaggaggtacgcatcagagtgctttcaaggaacacatcgcccgtactatcaaggagttcttcaacaagaatatggactataccgacattcgcaacggactggttgctgccattgccgtcaatgtggaagagcctatctttgagagtcagacgaaaacgaagctgggttctaccaatatggttcccggcggagtgacagtcaataaatatgtaggcgactttatcaaactggaagtggacaacttcttgcacaagaatgcggatgtagccgaagcgatacaacaaaagatacaagaatccgagaaagagcgtaaagccattgcaggtgtaaccaaactcgcccgtgaacgtgcaaagaaggcaaacctgcacaaccgcaaattgcgcgactgccgtattcacctcaacgacccgaaaggaaaaggactggaagaagactcctgcatctttatcaccgagggggactctgcaagtggttccatcaccaaaagccgtgatgtaaacacgcaagcagtgttcagtctacgtggtaaaccgctgaattctttcgggttaaccaagaaagtggtctacgagaacgaagaatttaatctgcttcaggcagccttgaatatagaagatggcttggacggactacgctacaacaaagtcatcgtagcaaccgatgccgatgtggacggtatgcatatccgcctgctgctaattactttcttcctgcaattcttccctgaccttataaaaaaaggccacgtatatattctgcaaacgcctttgttccgtgtacgcaataagaaaaaaacaatctattgttatagtgaagaagagcgtgtcaatgcaattaacgaactaagcccgaatccggagatcacgcgatttaaaggtttaggagagatttcaccggacgagttcaagcatttcatcggtaaagacatgcgtctggagcaagtttctttgcgaaagacggatgcagtgaaagaactacttgaattctacatgggtaaaaataccatggaacgacagaactttattatagataatctggttatagaagaagatttggcatcatgagaaaagcaatattcccgggtacttttgaccccttcaccatcggacattattcggtagtggaacgtgcactcacctttatggacgaaatcgtgataggaattggtatcaatgagaacaagaatacatactttcccattgagaaaagagaggaaatgattcgggaactttacaaggatgagcctcgtataaaagtgatgtcctacgactgtctgaccattgattttgcgcaggaagtaggagccaggtttattgtccgcggtatccgtacagtgaaagatttcgagtatgaagaaacgattgcagacatcaaccgcaaactggcaggcattgaaaccatcctgctcttcacagaaccggaactgacttgcgtcagctcaacgattgtacgcgaattattgacttataataaagatatcagccagtttattcccaaaggaatgaggataagttgagagttgagaatggagaattgagaaggatgcaggcgtatctgtgcccggttgttaatacttggctattaatataaagtaagattatgaataagattaaaatatacgtccttttggcttgcctgtgggcagtatcagccttacaggcccaaaatttcggttctgaagccatgcgcaagctacaaatggcagagttcgcaatctcccatttctatgtagacaaagtagatgaagacaagttggtggaggaagccatcatcaagatgctggcacaactcgacccgcactctacttactcggacgcagaagaagtgaagaaaatgaacgaacctcttcaaggtaacttcgaaggtattggagttcagtttcagatgattgaagataccctgttagtagtgcaacccgtcagcaacggaccttccgaaaaagtcggcatccttgccggtgaccgtattgttgcggtcaatgacagcgccattgccggagtgaaaatgagtacggaagatattatgaagcgtctgcgtggtccgaaaggctctaaagtcaacctgactatcgttcgtcgtggcgtgcaagatcctttattattcacagtgaaaagagataaaatacctatccttagcctcgatgcttcttacatgattcagcctaaaacaggttatattcgcatcaaccgcttcggagcaaccactgccgaagaattcaagaaagcaatgacaagccttcagaaacaaggtatgaaggacctgattctcgacctgcaaggaaacggaggaggttacctgaatgcagctatcgaccttgccaacgaattcctggggcaaaaagaattgattgtctacacggaaggacggactgccaaacgcagtgatttctacgccaaaggaaacggagatttccgtaatggacgtcttatcatcctggtagatgaatatacggcttccgccagcgaaattgtcagcggtgcagtgcaggattgggacagaggaattatcgtaggacgccgttctttcggcaaaggattggtgcaacgccctatcgacttgccggacggctccatgattcgtttgactattgcacgctattatactccatcgggacgttccatccagaaaccgtacgacagtactgtcgattacaacaaggacctgatagaacgtttcaaccacggtgaactgatgaatgctgacagtattcacttcccggattcactgaaagtacaaaccaagaagctaggacgcactgtttatggcggagggggtatcatgccggattatttcgtacctatcgatactactctttatacggattatcaccgtaatctggtggctaaaggagctgtgattaaattcaccatgcagtttatcgaagggcaccggaaagagttgaaaaacaaatacaagaaattcgaatcgtttgatgagaagttcgtcgttgatgataatatgctcgccactttaaaagaaataggagagaaagaaggagtgaaatttaatgaagaacaatatcagaagtcgctccctctcatcaaaacacagcttaaagcactgatagcccgtgacctttgggatatgaacgaatatttccgggtaatgaataccaccaatgagagtatacaaaaggcgctggagatactgaattcggatgagtatcagaagaagctgaaatagggtatttagtaaacaatcataagacaccatttttcagttcggtggacatatatactcaccatagtgaaaaaatatctatcataagtatcattcattttgatactcttctcattatcaaagaaataagtatgatagatagcttttaaaaaaggtatctatcatacttttaccagcaaaaactggttatctatcatctacaaaatagccgaataaaggccctatatgcataagatagcttgtttttgttgaatagtttaattctcccctgtcctatatctatcagatagaacaaggcgtataaatacctcaaacaagcagagatagtttgcttttctccctgatatagtttatctttgttaccgatatagttcattcttcatggccgtggcgaattcctaccacggccgtggaaagatactaccacagccatgaagagatctctccacggccgtgggaaactaatgataaaggcaccggaagacaactatccctatgccttagtctaagaataaaggcaggataacttataaaagccgcttgataacaaacaaacaacagctatataacaccctcccccctaagtccgaagatgatcgattagcttcgcaacaacaaaaaacaatgtccttataggcttgcaacggtaaattaaaggtacgtagtaatgtataaggcgaaaacaaattaataatggcaatacaatttgaattgtacaagactccccgtcccaaggatgaggaagacaaagaagtgtatcacgcacgtgtagtcaacttccaacacattgacacagactatttggcaaaagaaatccagatagcaacttctctaactgaaggggatgtaaagtcagttctcgaatccctaagtcattttatgggggatcgtcttcgggaaggacaaagcgtccatctggatggcatcggttatttccagataaagctgaatagtcaagaacctatcacttcgcccaaactaaaagcgaatcagataaaactcaaagccaatatcagctttaaagcggacgtcaaactgaaaaggtcagtcagtgttgttcatgtggagcgaagtaaactgaaaccccattcggctgtcctttcaaatgacgagatagacaaattgctgacaaactacttcaagagcaaccctgtattaactcgtcgcgactttcaaggattgtgcggctttgcccctaccactgccgcacggcaaatcaaacggctgaaagaggaggagaagaagttgaagaatatcaatacttattataatccgatttacataccgatgccgggatattatggcaaggcggagataaagacagatgaataaaatggaaccaacataatacagaaataaaatgaaatcagaagaaataaaagagctatttaagcagtttgagagcattgtttgcgaatacaacaaagtggaatgttggagtgcgagagaactttatccattgttaggatattctcaatggcgtaacttcctgtctatcatatagaaagcaaaagatacatgtaaaaatgccggagaaaatattgcataccattttgctgacgtcagcaaaatggttatattaggttcaggcgctgaaagagaagtagataacatctttctgacccgttatgcctgctatctggtagcacaaaatggagattctcgaaagcaagaaattgcctttgctcaaaactactttgcaatacaaacgcgccgtgcagaattagtagagcaacgtttaatagaatatgaacgtgtccaagcacgtaccaaactagccgagacagagaaacttctctcgggtgttttatatgaaagaggagttgacaatcaaggattcgccattatacgttccaaaggagataaagcactgtttcacatggacaccaaaatgctaaaacgtaaacttgacgtacctgatagtcgaccattggctgattttcttccgaccatcagcataaaagccaaagactttgccgcagaaatgacctctgtgaatgttcagcaaaaagacctatacggacaaactgccattgaaaatgaacatgttgacaataatgtcgcagtcagagatatgcttgttggtagaggcatatttcctgaacaaattcctgcaaatgaagatattgcggcaggggtatttctctaaagaaaaacgttttaacacattctttataaatctgatttataataaaggaggggaggaacctattaaaacagagcctgttaggcagcatctataaaaaggatttacaagcagcagtcgtgcaaactaagtcattccctcaattcttcagtcattgtttttagtaatgacctgctgtcacttaacggcaaatccgtagctaaatcccaactcatcatacctttcagcttctgttcctttgcataacgggttttgatacgaatgttatcctgaccgtcaaacacataagtatctccctgatagatcacttcattctgtgcaggactcgtaaccaatccattctgtacaaaattgaaataagcctctgtcttctttgaattatctttggtcaccccataaaaaggaactcctgccaccagtttttccttcggaataccatactccaataccatctgtatatccgaacaatatttctctatcggaaagcgaaccggtgaaggaccatagcactgaagtgaaataaaatcaactgcttcaatagcttccttactaatcttataacaaacaggatgcagagatacactaaaaagatacttgtttcccaacacttcccgcatcttcaggatagccaaactataatctttatattctttctcattttccgcccactcaaaatcaagatcaatgccatccagtttattcttttccagtacagtctttatgttctttgcaaacgtcgtacgagcggcctcatcggctatcatcgctttccattcgccactggaagctcccaaacgtattttcacttttgtaccttttacttttgcacgaaccgatttaatcaaaccttcccaagtggtcaccccttttccctgaaatacacgtggattctcaaatgacaatgatccgtctttattaggatgaacattcaagaaaataaggtcgtcacttgcccgcaagctttctgtagagatacgaccacggttgtaaaaattaccccgcacataagaactgaccatatagtcttgttgtgcaaacaatgataatccaacaaacacaaaaaggaagaatacaatttttcttagcattagcataatgattgataattaaaacgtttagattgcaaaaatacgcatatcaaagggaaacagatgttcaaaaacaactataatacttccaaaaatcaacataaagttttctattcagaaatttacaacagataaatattgaattctttaacatcatccaaagggataagaataatatttgcaggtttctactaaaacataaataaaagaaagagttccattttccgcaaaaaaagcctatctttgttccgttaagataataaatcacgcataaaactcatgccaggagattcattttgcatacaatataccaactgtacgggatgtccaaaaaatgttgagaatatccttgtatatagaaacttacctaaaggagagcatatccccaaggataagtgtacgcagaattgtatgctttttatgataaagggcgaattacttatcaatagcgaagagcatcccggaataacgttacgcgagagacaaattgttttgcaagctattggctccaaggtcgaaatactggcactgacagatgttgaatacgttgtctactggttcaacgaactgcctttgctttgcgaagaccgatatagggaaatgatggaacaggcggaagctcctttgacctacactccactgattatgagcgaaaggctttaccaccttgtcaccagtatgcccgaattcctcgctgaggaaaacccttgcagcaagtatatcgacttaaaatgcaaagaactggttttcttgattaccaacttttatccgctgccccaactgagttcattcttctatccgatcagcacttatacggaaagtttccactatttcgtcatgcagaattacagcaaggtgaagaacgtggaagaatttgcgcatctgggaggatatacgaccactactttccgccgactattcaaaaacctctatggtgtgcccgtatacgaatggatactggaaaagaaacgggaaggaatcctggaagacctacagcacaccaaaatgcgaatcactgaaatctgtaacagatacggattcgactccctgtcgcatttcgcccacttttgtaaagactctttcggagataccccacgcgctttacgcaagaaagcagccggcggtgagaaaatcgggaaagtacaataaacagcctcatcctactaatgtgccaatcagttgcaccatgcgcgcatactggctggcatattgatacattagcgcattgattcattattaaagaattatttctttaattccttgctcaatcaatctatttcccctatttttgcagtctgtaagaggtgtaaaacgtcgaaattttagttctaacaattaaataatttaaattcaatcatttatgtggttaagtaattcatctgtaggaaggaaagtggtgatgagcgttaccggtatcgcccttgtcctgtttctaacatttcacatggcgatgaacttggttgcaatcatctcggctgatggttacaacatgatttgtgagttcctgggagcaaactggtatgcgttagtggctaccgcaggactagccgctctttttgtgattcacatcatctacgcattctggctgacaatgcagaatcgcaaagcgcgtggtagcgaacgctatgcagtggttgacaaaccaaaaactgtagaatgggcatctcaaaacatgttggtgctgggtctgatcgttatcgtaggtcttggtttgcacctcttcaacttctgggcaaaaatgcagttgccggaactgatgcacaacatgggcatgcacgctgatacactgacgctggcttatgccgctaacggtgcttatcacatccagcagactttctctagcccggtttacgtagttctttacctcgtttggctgtttgctttgtggttccacctgactcacggcttctggagctctatgcaatcactgggatggaacaacaaagtatggatcaatcgttggaaatgcatttctaacatctattctacgattgttgtactcggtttcgcactggtagtagtggtattcttcgtgaaaacactgatttgtggcggtgcttgctaaatagtaaattgtaaatgattaaattgtaaataatattatgatcaagatagattca

SEQ ID NO: 8206 - DNA, 21658 bp, Unknown
  gut microbiota DNA sequence
aacccgttcagtcttttggaaagatactgttccgcttgatttgcgtgagtatatatcgccaccagttttaaacgggattcataaatgccggattgtgtatggaaaagaagtagaagaagtcacgtatgctccttatcagatgcggaaagtgtcctctttgcatctgatagaatccgataccattaattacacttacaaaagcacacatcgggaagaactgaacgctttgtatgcccaaagaggaatggcagatgacattttaatcgtgaaagacggctatctgacagatacttctattgccaatatcgccctctacgatgggcacacatggtttactccggctcatccgttactccagggaacgaagcgggcggaacttctgaataagcaattcattgttgagaaagacatcgcgcaagtacatttaaacgactattcacatatcatgttattcaacgccatgattgactgggaacgtattgtattgcctataaatgagaaacatttcattctataaacgataattaactgaaatatacagagcattgctgaacaaatgtcacttttgtactgttatatttatgtgtttttcatagtattagatataagattaattaaagagattgtactccacttgtgaaagctaaagtacgtcagagacagaagagtctgtttttttgataaatgtgttaaagcatcggttttaccaggccgatgctttttttatgtccttttacccccttttttagtttatatgaaataaaatttgtacgtttgtagagtaataatagaaaatgataaagatgaacatacccgttatctttcagtttttaaaagatctttccgcgaataataatcgtgagtggtttaatgagcacaaggcagaatatgaaacagcccgtgccgagttcgacaactttttggcaacagtgattgcccgtatttccctgtttgatgaaactatccggggaattcaacccaaagactgtacttatcgcatttaccgggatacccgcttctctgcggataaaacaccttataaaatacatttcggtggttatatcaatgccaaaggaaagaaatccgaccattgtggatattatgtccatttgcagccggatggttcgatgcttgccggaggaagcttgtgtctgcctcccaatatcttgaaagcagtgcgtcagtctatttatgacaatatcgaggaatttgttgcgatcgtagaggatccggagtttaagaaatactttccggtgataggggaggattttctgaaaacagctccgaaaggtttcccgaaagacttcaagtacgtcgattatttgaaatgtaaagagtatgtttgttcatataatgttcctgatgatttctttacccggccggatatgttggaacagatagacaaagcgttccgccagttcaagcggtttgctgattttataaattatacgattgatgattttgaataaataatgcctggaatataaactttaaaatttaacttatatggtagtagatactttagaaaatctggagaaatatgcgtctttaaatcctttgtttgcacaagccattgacttcttgaagtctcatgacctccaagccatggaaattggtaagacagaactgaaagggaaagatctgttcgtgaatatcgcacaaaccaagcctaaaacaaaagaggaagccaaactggaaactcataacgaatttattgatattcaaatcccgttgtcgggaacagaaattatggggtataccgctgctaaagattgtgttccggcagatgcaccttataacgcagaaaaagacattactttctttgaaggattggcagaaacatacgtttccgtaaaaccgggaatgtttgctatcttcttcccgcaagacggtcatgctcccggcatcactccggatggtgtgaaaaaagtaatcgtaaaagtaaaagcataatcctaattcaattctgatatggaaaagacacttaatctcataaaaaatgatccctggctggaaccttttgccggtgctatcaccgggcgtcatcagcatgtattagacaaggaagctgaattgacgaataaaggcaaacaaaccctttcagattttgcatcggggtatctttattttggattgcatcgcaccgataagggatggactttccgtgaatgggcgcccaatgctactcatatttatatggtgggtacatttaataattgggaggaaaaagcagcctataagctgaaaaaactaaagaatggcaattgggaaattaacctgccggcggatgccattcatcatggcgatctctacaagttgaatgtatactgggaaggcggacaaggcgagcgtattcctgcatgggctactcgtgtggtacaggatgaacagaccaagatattcagtgcgcaagtctgggctccggagaaaccctataaattcaaaaagaaaacattcaagcccgacacgaatccactgttgatttatgaatgtcatatcggaatggcacaacgggaggaaaaagtgggcacttataacgaattccgcgagaaaatacttccccgtatcgctgaagaagggtataactgtatccagataatggccattcaggaacatccttattatggaagtttcggctatcatgtatccagcttttttgctgcctcttcccgttttggtactcccgacgaattgaaagcattgatcgatgccgctcatgagatgggaattgctgtgattatggacattgttcattcacatgcagtgaagaatgaagtagaaggattaggaaactttgccggtgatccgaatcagtatttctatccgggcgttcgtcgtgaacatccggcttgggattctctatgcttcgattatggcaagaacgaagtgattcacttcctgttgtctaactgcaagtactggctggaagaatataaatttgacggcttccgttttgacggagtcacttctatgctatattatagtcatggtttgggtgaagccttctgtaactatggagattatttcaacggtcatcaggatgataatgcgatttgttacctgacattggctaatgaagtgattcatcaggtaaatccgaaagcgataaccattgcggaagaagtttccggtatgccggggctggctgcaaaaatagaagatggcggttacggcttcgattatcgtatggccatgaacatcccggactattggatcaagacaatcaaagaaaagattgatgaagactggaaaccttccagcatgttctgggaagtaaccaaccgtcgtcaggatgagaagaccatttcgtatgcagaaagccacgaccaggcattagtgggagacaagacaattatcttccgtctgattgatgccgatatgtactggcatatgcaaaagggagatgaaaattatgttgtcaaccgaggtatcgctttgcacaagatgattcgtttattgacctcttcaaccatcaacggaggttatctgaacttcatgggaaatgaattcgggcatcccgaatggattgacttcccgcgtgaaggtaacggatggtcatgtaaatatgcccgtcgccaatgggatttggtagacaacaagaatctgacctatcattatatgggtgattttgataaggatatgctgaaagttctgaagagcgtgaaagacttccaggcaacacctgttcaggaaatatggcataatgatggcgatcaggtattggcatacggacgtaaagaccttatatttgtctttaactttaatccgaaacagtcatttaccgactatggattcctggtaactccgggagcttatgaagtaatattgaatacggacgacgttgcatttggaggaaacggtttggcagatgattctgtagtgcactttactattgccgatccgctgtacagtaaagaaaagaaagagtggttgaaactctacattcctgcccgtaccgccgtagtgcttagaaagaagaaataattttatctttaaataagaagcccctgcaactatcattgtatatctgcaggggctttctcgtatattacgctattgaatgatttagttctagtttaccaaaaaggtacttggtccgagaatatcatacatatcactcacgttgcgtgttttcagtaatactccttgtggagtatagaataactgatatttgatgtcaacgttatcttggcctactttaattacaataatagcttgccatttgggaaactctaccatcgtcacattatctaccacccaacttgcgtatggcccggatacaaaagcattatagactgccggtgacagacgatcaaggctaacaaggtcagtctgtgtcatcacccattgcccccggacgttaaaccacacatttttagtaaatccgttcattacaaaattggcgcaataatatccgtcatcttgtgaccaggcaatgccgtttgctttgggatacattttcttgaaagttgcctgtacattgccgggaggggtatctccaaaaacagatgtagataatagcaaaaacagggtgatcgcacaaatcataaatttcttcataagctttgagtttagagaattagttataactaaacagcctttgagaatatttgtttgagcgatgtacataaaataatcctccgggcatttataagtgaaatgcccggaggataaggagtatgcggttcttatcttactctttttacttaaaaagtaatctttaaaatttttccgttataacctccgaccgaaacatctgtcggtttataaggtaataagctgatttcttctttagcaccggtcatcaaatcaatggcctgataagactccatttgaggaatctgcaaaaagtcgaaggcatgtgaaggcacgttgatggcaacatctaccagttgactatcgaaattaataacgaaaaacagaatctcgtttttgtatttccgcataaaagtatattgtttatgctcattgaaacgccatccgtttatattggcatacatcaagtcaaagaataccccctttttgattgcctgctcttcgttgcaaagcgtcagtactttttgatagatagagtagaggtgcttatgttcttcagtaagcattttcccgtcaaactttcctccgttacgccaacgacgtatagtatctacgctccaataatcaaatatggtagtccgtccgtctcttccgctgaatccttcgctatccatgcccagctctccgaactcctgaccgaaatagatcatcataggattggtgttcatacatgcagaaacaattagtgcgggaatccctttacgcggattaccggcaaagaaatcagatgcgatacgttgctcatcgtggttctccaggaagttgagcatttttttctctattccattcaggctttgccagcaatgagtgattgcggcggcagattcatatccgcaggctacatttcgtaatgtatcatacaatcctaccttatcatatagataatcaaacttgccacggaacagatagttacgatattcactgggattatagacttctgcgatgaaaagtatttcaggataaacctcttttacttgaggaatagcccattcccaaaattcaacgggaaccatttctgccatgtcacaacggaaaccgtcaatgttctttgacgcccagaaaagaagaatgtccagcatctttatccaagtgtccggagtcggggagaagtggcaggtaccgccattctgataatccactccatagtttaatttcaccgtttcataccagtcggtgatattaggcgtagcatcaaaacgattgttaccggtagctttagccggaaattcccggtaaggctctgctgcaccgtctttcatatcgaactgggcacgaagttccgcttgcgggatataatagaaattattgtatggactgaaagattggctggggtcatcgttagcccccaattccgtcgtaccgtcgggctgtgcgtccgaatggtactggcgtgctacgtgattaggtacaaaatctataatcactttcaaacctgtgcgatgtgtacggtgtaccaggttctcaaattctttcatacgtccctgtacatcgttggccaggtcaggatctacatcataataatccttgatggcatagggagagccagcttttcctttcacaatggcaggatgatccggactgatgttataacgacgataatccgtttgagtggcatgttcgatgatgcctgtataccatatatgtgtagtacctaattttttgatttcaccaagtgccttgagcgtgaaatcagccatttttccacaaccgttggtggcaatgtctccattgtagacacagtggttgttgttatttccaaacagacgggtgaacacttgatagataattattttattttcgtcattcatatagagtagattattaatattcgtattcattctttttttcgatggataggaggttacttccatattttccctttttcttccaacagttgattaagtacttcattggctgtattatatccttgtccgaagatttcttctgctttctccagttcggtattgctatatccgtatagattgtatggttcgattaataaatcacacttttccctttctggaaaagtattggcgcggaacataaaatggaatgaacgcatagcaatgcttacaatattcattttgtagtcctctgccatgatggggcttacgttgacagccaccaccttatcacacactctacgcagggtagagacaggaagattcatcatcaatcctccgtctacatagttagtgccatctatattgactggtgcgaacataacaggcatacagcaggaagctgcgacccgttcagcaatactgccgcggtgaaaatgaaccatgcgtccatgatcgaggtcggttgctgtgataatcagaggaagttgtaaatcttccaagtttttggcttttacgttggttcggagaaagtctataaattcacaaaggtcaaataatccttttttaggaattaccagtttggttaaatcctggaatttatgtccggagaaataatcaagaactttgtggggttcgttgccatctgcataaaagacaccggcaagtgctcctgcgcttactccggagatgatttccggtttaatatcatgctctaaaagagcttgcataactcccagatgggcaaatcctttaataaatcctccgcttagtgcatagccaatctgatatttccggctattcctgttatttgtgaatatctccatgagttgctttctttagttcgccacgaatttagtgaatttattgaaagtaggaggaatataatgaatagtttttttaagagaacgttataagtagttttttgttatccatagaacacaataaatgcggataacatggaactttaattgcgtaagtataaagttttgttatccgcatttaaatatatcacaatagagcacaaatatatggatggaatcttttacaccggcactgtgtgctgattagaatccgaaatcgtctatctccactttatgttcttcgttttctttaaaaggttttgcttctttttgtactggatttccttcgatatagatagcgcggaatggacgggcagggcaaacatattcgcatcctccacaacctacgcatatttctttgtttacatgagggatcgttaatccgtctttatatggtaccattgccacagcctgtgtaggacagtgctcggagcacgctccgcaactggttccatcagtataaacgatgcaattttcctcgataaaaacaacatatcccatttgtgtaagatgtttttgctctacacttatgggaagaattgctccattgggacaaacgtctccgcaaacagtacagtcaaaattacaaaatcctttctcaaaactaacggtcggctgcattatacctgccaaaccatactccataaaagcaggttgcagaacatgagaggggcatttgctgacacaaagatgacaggatgtacattgctgttgaaagtgttcccgactgatagagcccggaggagtgattggattctcctttttgtatgcctttttgccttctaatcttgcaacagattctttggcttgggacaggagtttgggagcagctccggcagtaacaagaccggcaaccaaaaagcggcgtttggatgaatccgtgtccggtgatgatggcacaggggcttctacgtttgcttgttgtttctttaaagaagggttgtagaccaatgccttttgcttgcatgctcctaggcagtcgaaacaatctacgcagcggctataatcaatggcatgttccttactattgatgcaggaggctttgcatttggtagcacaaagcccgcatccattacattttgcagtatcgatacggatcttaaataatgaaaagcggctcaataatcccaatactgttcctacgggacaaaccgtattgcaccatgtccgcccgtgtttccatgccattacaaaaataattgcaagagtaataacagcaatgagaagagaagaaatgcttaaaacagaggtatctacctgataaaacgtataattgtcgaacttggaaaagacagattccagcagattattccccaacatgtagataggtttgaatatatgcactactacacgtccatacgcactgtatggatcgagcaggcctacaataaatgtaaatccgcatagaaacccgattactgtcagtccaagtacgccccaacgcaatttattttttgcgggactgtaactatatctttttttctttttccctgttgattttgaaatgcgtgcaatgacatcctgcaaaatacccatagggcaaattgtagaacaataaacgcgtccaaacaagagcgttaacacaatgagaaataataagatacctatacttagtgaaaggacagctggaacaaactgcaaatgtgccagccgatgaaaactgttcggtaatatttctgcaaaatcgagaaaaaagaaagaaatcagcacaaataaaagtgctgatattccaatacgtagccttcttaacattgttattttacatcttaattcgcttgacattcagcttgtcaatgttcatggttcctattttcagtgcttctcctttagcgaggtgtcccacagtatctagtggcatctcacgtacttgattgaagaatttggcggcagccgtgtccactgctacaatatccggtgaaatgaacagtcctttcgctaatacgacatccgaggcagaacgtcctcgcggaccattggttttcatgatacgataagcgtccactacgttcagcacagctttcttttgcagtgtgcagatatcggcaatacattgctgcaagtcattctggtggaaaaatccacgatcccagacaattcccatgtgatttttcattgagatagtcagattggcgcccccgtggtttttcaggatgggaacattgatccatacatcgcaattcaggatggcttcatgtatctttgctttcttcatcttctgaccgttgggtaggtttaccggcttgtaataagactccaaatgagcaggcattacttttgctccggcagcttttgccgccgcttcgatgccgctgtttttgtaacacttctgccaatcgtcacaagtatgatcgaatacggtcacttctttagctccggcagcaaagcattgtttcacgatttcagcaatcagttgcgggttggtgtttcctgccagttccggcactttatcccaaccgatattaggttttacgaccaccttctgtcccggttttacgaattgtttcataccgcccagttcgctgatagcacggcggaacatagcttccggttctccacccataacggctaccaagtccggattgcctccgttcgtattattaatagtctgggttaatatttccattgcctccgaatgctgaatactcaatgcggcaccggttatggctactgtttttaaaaagtcccttctgtccatttttgtttttactttagagttttgcaatcgctttcagtagggcgtagccaccaaaccattgaattaacataccgggaataccaatgcggaaatcttgcactgctgcatggaaatttccgatgaatgcccattcaaaagcagttcctataatctgataggagagaacgacaccgagaatagcccataaagaaacggatttcagtgttcgtgcagccaaggcggaagtaccggcaagtaaagcggattttatcaatataatggggagtgcagcttccgaaggcattgcaaataacaggtgattgatgacaggagaaagaattgccgtcagtaatcccacacgaaagccatatttataagctgcgatcaacgtgaaaaaatagatcggcaataaagtagggccaccgtatggtacaagatgacagatttgtggaagtgcaatgttgcccgccacaaatagcagggcaaagaggtaagttcttacattgctgtaattcagtgaatagagtttagcagatgtttccattttcgttgataactttaaagtttaatagaacgataatttcctaaaaattagacttctttcttttagaaaggtttaatccggacaaagaactatttgctaaagtaactgtctaaaattagttaatagaaaaaaggaggcttcattgcgttttgaataacaacttataatacgaactaatttaagcatttactttatgatattaaaaatgggacagaaaagtttcaagcctatttgaaacactttgtttcactacgggaaactgtttgtttcaccgcttgaaaccattcgtttcacaccgagaaacaaacagtttcaaagcttgaaacatattttgaaactatttggtttgtacttttgccttattcggcgcccattctttcccggatctttccccatgcatgcgtatcaaacaggcaactttggcgcatagtcccacacatttctctgaatctggacataggtatcgtataactcaacttatccgcttcaaagtacggacgcaccgacggatcgaagaaaccaataaatgtccgcttgcctcctttgcggttttcaagagtggcttgtgtcactatggaactgcaaccggaaccgaataaggaaacgacaccatcttcggcattgttatcatagtaagcccatgtagtcagtccggaaagcatatcaggattggcgataaacatgacgccttccatttgttccagacttgccactttgtctatacgggcaaaatgaaggtatttcttttctgtcctcggaactccgagttgccggataaattcaatgaccatttccggagtctgtttatatcgttcttttagtgagacaaaagtcggtacgcgttcaggcatttctgtaaaacctgtgtagaatttgccgccaccgcaaccgatattttctgcattcaagctgatagtgccaccttctctgacagtcttcatacctttaaagaagcaaccgttaattttctctgttgttccttccagtatatccgaataccaaaatacaagaggtaattcggcattctctccgaatgcctccttgaagttctgaataaatgtttggatgtccatagcttatcaattttagttatgtatgtaggtctttgtacaaagttaaaataaaaatagacattcatcctctttttaaacaataattacttatatttgtccggaacagaatataaagagaagcgttatgaagtatttactaatatatatagggttactttgtacatccctgcaattgtggggacaagaaacggttgctacaagaatcgctcctccgacgggatatgtcagggaggcttgttccgatcattcgtttacaggttacttacgtaatttgcctttgatgccgaaaggtagtaaagtgatgctttataatggaaaagaaaaatcgaatcagtctgcagcttacgctgtaatcgatatggagataggtaaccgtgatttgcaacagtgtgccgatgcggtaatgcgtttgcgggcggaatatctgtggaaacataaacgatatggagaaataaaattcaacttcaccaatggtttccctgccgggtataagaaatgggcggaaggaaatcggataaaagtcagcggcaatcaagtgcaatggtatgctgcgggcaaaggagtggattattcctataaaactttccgtaactatctcgatatggtctttatgtatgccggaacggcttctttatcccgcgagcttcaggctgtgtcttatacttctttgcaacccggtgatgtgtttattaaaggaggctcacccggacatgcagttattgttgtagatgttgctgttcatccggctaccaaaaagaaagtattcctgttggcgcagagctatatgcctgcacaacagattcatattcttgtaaatcctgtcagtcgcagcctttccccctggtatgaattggcggaaacggatgcggggaaactatatactccggaatggatttttagccggaaagatttaaaacgttttaaggagtagaatcttttcgttatctttggcatttaacaaaccgtttttaatcatacaacaacgaaaaacaaccgattatgaatcaagatttgtcaatgaatgctaaccagttggtagcattccttcaaaagccaacttcagagtttaccaaagccgacattatctcatttatccagcaaaaagatatccgcatggtcaatttcatgtatccggcgggagacggtcgtctgaaaaccctgaattttgttatcaacaatcaagcctatttggaagctattcttacttgtggagaacgggtagacggctccagtcttttttctttcatagaagcgggcagtagtgacctttatgtgattccccgtttctgcactgcattcgttgacccgtttgccgagattccgacgctgtctatgctttgctctttcttcaacaaagacggcgaacctctcgaaagtgcaccagaacacaccctttacaaagcaagcaaaacttttacagaagttaccggaatggaatttcaggcaatgggcgaattggaatattatgtaatagccccggatacaggtatgtttcaggcaaccgaccaacgtggttatcacgaatcgggtccatacgctaaattcaatgagttccgtactcaatgtatgtcttatatcgcgcaaacaggcgggcaaataaagtatggacactccgaagtgggtaattttacgctggatggctatatttatgaacagaatgagattgaattcctgccggttcctgtatcgcaggcggcagatcagttgatgattgccaaatgggtgattcgtaatctgggatacagatatggatataatgtgacctttgctcctaaaattacagccggtaaggcagggtcgggcttgcacgtacacatgcgtatcatgaaagacggcaagaaccaaatgttgaaagacggcgttttgtcggaaacagcgcgtaaagcaattgccggaatgatggtgcttgctccttcaatcactgcctttggaaataccaatcctacttcttatttccgtcttgttcctcatcaggaggcacctaccaatgtttgctggggagatcgtaaccgttccgtattagtacgtgtgccattgggatgggctgcaaaaacagatatgtgtacattagctaatccgttggaagccgaaagccattttgacaccagccagaagcagactgtagaaatgcgttctccggatggttcggcagatttgtatcaactgttggccggtttggctgttgcctgccgtcatggttttgagattgaaaatgcgctggatatcgctcaaaagacgtatgtgaatgtgaatatccatcagaaagagaatgaagataaactaaattcactggcacaactgccagatagctgtgaggcttctgccgattgcctgcaacaacaacgggcaatatttgaacaatataatgtctttagtccggcaatgattgatggtatcatccgcagacttcgcagttacgaagataaaacgttgcgtgcggatttggaaggaaagccgatggagatgttagatctcgtacataagtatttccattgtggctaatctgcaaactgatatataaaataaaaggctaccttctgtttcaaagaaggtagccttttattttctgatgcagaattaactataagtatttgtttttcaaagagcttataacaaagaaactatagaagactaatccggtgattggtatgaaatagcccgatataaaagaatgcgaacgttaagtattggcctattttcataaaaaagatgttttgagaaaagaaaaaggagggaatatagtgcaatatctccaaataatgctttcctttgtaccaacaacaataaagaggtttattacgatttgatttttttacgtgtatcttctcatttatttgagcatatccatctctaattaagatcttcctaaaactttcttattgaattattaattttttatatttgtattttatgaatttgtacattggaaatcttagctataatgttaaggaatcggatttgagaaatgtaatggaagagtatggaacagttgcttcagtaaagttaatcacagatcgtgaaactagaagatcaaaaggttttgcgtttatcgaaatgccggatgatgcagaagctaacaacgctatcaaacaattgaacggtgcagaatatgtaggtcgttcaatggtagtgaaagaagcattgccaaagaactaatactgaataaatagacagtaatagagaagggcgcactaggaaactagcgcgcccttcttctgttaatcctcattattatcttcttcatcatccaccatattattgagttccaattccaggtctaccagctcttgttcccataatttcaggatattcttcggtgtatcttttgcggctttctttattctttcttgagcaacagatacttcatgctctaattgtctacgtctgctcatatttttattgttttgattatgaaatgataacaactcgtgtgtggaatagttcgacaggcaaaattaaaaagtagtggactgaactattcgcaaataaagtatgttttgtagtctgaatcttttaaaacatacaatcatgctcaatttaatagccgtattcttagtctgttcaggtatcggaatagcagtacatattgccatagacctgacacatcgtccgcaatcaatgaaaataatgaatgcagtttggatattatctgcattgtggggaagttatttagctttatgggcgtataataagttcgggcggagcagtccgatgaagatggaggatgacgggatgaaagggatgggcatgtctgacatgaaagatatggatatgtcaatgggagagatgaggcgtccatattggcaatcggtagctctgtcggctcttcattgtggcgcaggctgcacattggcagatatcataggagagtggtttacgaattatgttcctgtaactgttgcaggcagtcaacttgtagggaattgggtacttgattttgtattggctttgattattggcgtttattttcagttttatgcgattcgggaaatggaaaaaatctctgtggggaacgcgctgacacgcgctttcaaagcagatttcttttctcttttatcctggcaggtaggaatgtacggttggatggcaattgtttattttgtgctattcatcaatgagccattgcccaaagatacatggatattctggtttatgatgcagttggctatgcttttcggtttcttctgcgcttatccgatgaatgctcttcttataaaattaggtataaagaaaggtatgtaaaataaatgcagattcatttaaaatgataagtatgaaattacttattttgagtgaatctgcatctgtaatattactatttctgttttttatttctcttttggaggttattttttcaatagtttgggtatatccgaaggctcttgtgctacccggatgccagcagcttccaaagattcaattttctcttttgccgaaccggaacttcctgaaataatagcgcccgcatggcccatttgttttcccggaggagctgattgtccggcaataaatgctaccacaggtttagttacattattacggatatattcagccgcttgttcttccgcatttcctccaatctctccaatcaggacgattgcttctgtttccggatcattctgaaacatttccagcagttggcggaagtgaagccctacaacaggatcgcccccgatgccgatagcggtagattgtcccattccattagctgttaagtgatacacaatctcgtaagtaagtgttccgctacggctgataacacctacatttccttctaaaaagacttgtcctggtaagatgccaaccatgctttttcccggagagataagtcccggacagttaggcccgatcaacatggcgcctttttgttcggcaaaccgatgcgccttaatcacgtccagtgtgggaattccttctgcaatgcagactatgatacggatgcctgcgtccgctgcctccatgatagcatttgccgcaaaacgtgccggaacgaaaatgatggaggtattagcctttgtctgctcgacagcgtcatacatggtgttgaatacggggattccgtccacatctgttcctcctttgcccggagaagtacctccgaccacattggttccgtattctttcatcttcttggcatggaaaagcccgtctctgccagtgattccctgcacaatcaaacgggtggatttatctattagtatgctcataattgctttattttttagtgatttggtacgtattatgctttcagagccataagagcagcctctttcatcgttgtggctatttggaaacggctgtaattccgtaacagttcccgtccgatatgttcattggtgcctgtaagccggacgatgacggggacattgctgtttatttgctcgaatgcctgaagaagccccattgccacatcatcgcaacgagtgatcccaccgaaaatattaatcaggaccacttttactttctcatcctgcaataagagtttcatagcttcaataaccttgacaggattggagctgccaccgatgtcgagaaaattagcaggctgaccgccgtaaagtttaatcatgtccatagtagccatggcaagtccggcgccatttaccatacaaccgatattgccgtccatgtgaacataactgaatcctttatctttggcatctgcttccactttttcttcttccgtcggatcaaacaaagcatgaatctccggatgacgatagagcgcattgtcatcaaaaacaatctttgcgtcaatagccattaatgtacctttctttgtaagtgccagcggatttacttccactaacgacgcgtcattctccacaaagattctataaagttcctgaaggatggcagccattttacctgcttgttccatttgggggaagagagcgaaagcaaaacgccttgccagatagtcgggaaggccaatgaatggattgattgaatatcggatgattttctccggtgtttgacgggctacctcttcaatatccataccaccggatgcactcatcatcagaacgacagaacgtgtattccggtcgatggtataactgacgtaatattctgcagcaatatcaaccgcttcgctgaccagaacttgattgactggaagacctttaatgctcattccgagaatgttcttggcttcctgataagcatcttccgtattgtttaccagtttcactcctccggcttttccccggcctccggttaatacttgtgcttttataaccactctgtctgttcccatcctccggtatgcagctatgacacctgcggcagtacggcataaagtgtgcctctcgacaggtattccgtacttggagaaaatctctttcgcttgatattcatgtattttcatggctcataaatttgagtaaatgattcctataataaaaacaaaagaaagattcggaaagtttgccggaaaagaaaagtatcagggtgttttacaacatgttcgtttgtattccatctatggttttcatataaaaaaaacgtgttggcaatagttaccaacacgctctatatcacttaaagataaagtctgcttacggatatttatgcaataccgtgagcattgacagtaccgtcaatctttttaatcaatccttgaagtactgcacccgggccacattctgtaaaatcagtagcaccgtcagcaaccatattctttactgattgtgtccaacgtacggaagcagtcaattgagcaaccagattctttttgatttctgcaggatcagtgtgaggaagtgcatccacattctgatataccggacatttaggagtatgtatttctgtagctttgatagcagcttccagttctattttagcaggatccatcaatggagaatggaaagcaccacccactttcagcggaagagcacgtttggctccggcagctttcatcagttcgcaagccttttcgatacccggtacagagccggagataacgatttgtcccggacagttgtagttggccggtacgcaaacttcaccttctgcatttactgctgcacagatttcttctactttttcatccggcaatgcgataatagcagccatggtggaaggagtagcttcgcaagctttctgcatagccattgcacgtgcatacacaagcttcaatccatcttcaaaactcaatgcaccggcagcaaccaatgcagagaactcaccaagtgagtgaccggcagtcatttccggtttgaagtcgtcgcccatgcaaagagcagaaataacagaatgaaggaaaacggcaggttgagtaacctttgtctgacgaagatcttcgtctgtgccgtcgaacatgatatctgtaatgcgatatccgaggatatcatttgctttttcaaacaattcttttgctaaagctgagttttcatacaggtctttacccattcctacaaattgagcgccttgaccgggaaatacaaatgctttcatatttttattatttaattgatttttaattgcgggtgcaaagttacgtatttttatgatacaaccgcacaaaatgtacacatttgtgcaacggtgtccggaaaatgccataaagggccgttaccatggccgatatttaattcttttcctgcgataatggcttgagtgatatatgttttcgcatgctggatggattctcgcatggggtagcctttggctagataggtggcaatagcggaagagagggtgcatcccgtcccgtgtagattatggctttctatttttttctcctcatatatatggtagataaattcggacgtatgtaaaaggtcgcacatattgtctccttccagatgtccgccttttagtaagacattagtctgataatcatccgtcagcattttggcagcggtctgcatatcctgaatgttgtgaatacttttacctgtaagtacttttgcttcatcaatattaggggtgattaatgtgacaagcggtaaaagttcttttttgatttcttctatcgcttcatctgtcataagtttccttccgctggtagacaccattaccggatcgtaaacgacgtatgcaggtgaatatttttgtagacagtcggaaattacacgaacgatctgaatgtcatttatcattcctattttgatggcaaccggttgcaggtcgtccatcacggcttctatttgcccacgaaccatatccggagagatagactgtacggcgcgtactcccagtgtgttttgtacggtgatggcagtgatggccgatgctgcatagcctcctaaagccgagattgtttttatgtctgcctgaatacctgcgcctcccgaacaatcggagccggcaatggataaaatgactggatgacgttccattttagattttttaatatttacccgacaaagatagaataaaaaacgataaggtacaaaatgacatatcgtttaaaatacaataagtacctttccgggcatctgttggaaaagatatgaaaagtactgataataaagcgtccatctagtttttgtactttatacaattactcacccgtggaaatactaaaatacatattgtaattcgtaagataacactaactattcatattgtagaatgtatgatatgtatttatatgaaaaacaatgttttatagcatagttcttattttgttttgatggtttgtagcctctatatttgcatcgtcttaaagaaatagatatgcaaaatttacagaaaaatacacctttagcaaacaatcatatatcagtagactgtgtagtgattggttttgacggagaacaactgaaagtgttgcttgtaaaacgtgcaggtgaggataatggagaagtatatcatgatatgaaacttcccggaagtcttatctatatggatgaagccctggatgaagctgcacaacgagttttgtatgaactgacaggacttaaaaatgtgaatctgatgcagtttaaagcatttggttctaaaaacagaacgagtaatccgaaagatgtacgctggttggaaagagctatgcagtcaaaagtggagcgtattgttaccattgcatatttgtcgatggtgaagatagatcgtacgttggataagaatctggacgatcaccaggcttgctgggtcgctttgaaagacgtgaaaacactggctttcgaccataatctgattataaaggaggcaatgacttatattcgtcagttcgtagaatttaatccttccatgttgttcgaactgcttccgcgtaaatttacagccgcacaattaaggactctttttgaattagtatacgacaaagccgtggacgtgcgtaacttccataaaaaaatagcaatgatggaatatgtagttcctttggaagaaaaacaacaaggagtggctcaccgtgctgcccgttattataaatttgataagaaggtatataataaggtaagaaggtagaccctgttcaagtatcaagtattaagtattaggcgttggatgttaaagcattaattgtcggacattgagcgtaaatcgtaaatagtaaatcgtttaatcgtaaataaaattatgtttctattaggttatgacataggtagctcgtctgtaaaagcgagtttggtaaatgcggagactggtaaatgtgtatcctcggcattttttccgaaaacagaagcgaatattattgcagtgaatcccggatgggcggaacaagatcctgaaagttggtgggaaaacttaaagttgtccacgcaggctattatgaccgaatccggagtgagtgccgctgaaattaaagccatcggtatctcttatcagatgcacggattggtttgtgttgataagaatcagcatgtattgcgtcctgctatcatctggtgtgactcccgtgcggtgccatacggtcagaaagcgtttgagacaatcggggaggagagatgtctttctcatttgttgaactcaccgggaaattttaccgcttccaagttggcgtggattaaagaaaacgaaccggccatctatgagcagattgataagataatgctgccgggcgattatattgccatgaagttgagtggagaaatctgtacaactgtttccgggctttc

SEQ ID NO: 8207 - DNA, 18257 bp, Unknown
  gut microbiota DNA sequence
atagatataaaaaaactctgtggaaatctgtgttaatctgtggtgaaatgaaattcatttaatgtttggtagcaatcatccgcttcaccttttccatatcgtggcgcaccatgatacttaccagttcttcgaatgatgttttgcatggatcccatcctaacaatgtttttgctttagtcgggtcacccagcagttgttccacctctgacggacggaaatatttaggatcaacctctaccaaagactttccggtagctacgtcgatacctttctcattcacgccttcaccttcccaacgaagttcgatgcctgcttccttgaatgccagcgttgcgaattcgcgtactgtgtgcatttctccggtagcaattacgaaatcttcgggaacgtcatgttgcaggatcagccacatacattcgatgtaatccttggcatatccccagtcgcgacgtgcatccagattacccagatacagtttgtcctgttcgccctgtgcgatacgtgcggcagcaagcgaaattttacgggtaacgaatgtctcgccacggcgttcactctcgtgattgaacaagattccgtttacggcaaacataccatagctttcgcggtagtttttagtaatccagaaaccatattgtttggctaccccatacggagaacggggatagaatggagttgtctctttttgtggaacttcctgcaccttaccgaacaattcggaagtagaagcctgatagatgcgggttttcttttccagtcccaggatgcgtaccgcttcgagcatacgcaacgtaccgatagcatccgcttcggccgtgtattccggaacgtcgaatgaaaccttcacgtggctttgagcagcgagattgtagatttcatccggttgcacctgttgaataatacgaattaacgaactagaatctgtcatatccccataatgcagattgatcgtacgtttctgtttcatgtcgcgcacccactcgtcaaaatacaaatgttcaatacgtcctgtattgaacgaagaagaacgacggagtataccgtgtacttcgtaacctttttgcaatagaaattcggcaagataagaaccatcctgcccggtgatgcctgaaattagggcttttttcatacgctattatttaatataattgaaaatgtgggtgcaaatgtcggcattttttgtgagccagccaagctactacccaattatttttcagcacagtcattcagcacggtttttccccattattttgtcgataatcaaagcgatagctccgtcgcccgtcacgttgcaggctgtgccgaaactgtccattgcgatgtaaagcgcaatcattaaagcctgtgccgattcgtcgaagccgagcatggattgaagaattcccagagaggccatgatagctccgcccggaacccccggagcggctatcattgtgatgcccagcatgaagatgaatccggcaaacaaggggaagtcgaacggtattccctgcatcatcatcaatgccagtgcgcaggctacgattttcagtgtgctgcccgacagatgaatggtggcgcagagcggaatcacgaaaccggccacttcggcagatacaccgttctttttggtttgttccagcgttacagggatggtggctgccgaagattgtgtgcccaatgccgtgaagtaagccggcagcattttattaagtaatttaaacgggtttttgtgtacaaatagtgccgcgatggaatactgaaaaactaacaggaagatgtgaagagcaaagatgactccgataattttaataaacaccatcaggatggaatatacttgtcccgaatgtgtcatgttgaggaatatgccaaagatataaagcggcagtaaaggcagaatgactgcgctaatcattcgtacgataatttcctgaaaatcacgtgccacgtttttcaatgcgtcgctgttcagtgacgccagtcccaagcccaaggtgaaagccagtaccaaggccgtcatgacgttcatcagtggtgggatggagacggagaagtaggggaggattccttgtgcttcgctcacttcttcaagcggtgctcccggttcgatgagtgacggaaatacggtgactcctgtgaagtaggagagaaatcccgaaaacagggtggcgaaataagcaatcagagccgttacgagcagcatttttcctgcaccttttccgatgtcggcgatagccaccgttaccagtccgacgataatcagcgggatagagaaattgagaaactcgctgaaaatgccgttgaaagtaacgaatattcgtactagcggagccgggaaaaaagtaccgatggcaatacccaaaatgatagcaattacgatgcgtgccaacaagccgattttgatcttcttcatccttgattttatttgtagaccacaaaaataatattttaatctaaaatattgcgaacaaatgtccttttcaactgttactaagataaagaatattcaaaatatacaagttatggcaaatcagaataaaacagatatcggacttatcggcttggctgtgatgggcgagaatcttgctttaaacatggagagtaagggatggcacgtatcggtttataaccgtaccgttcccggagtagaggaaggagtggtagaccgcttcatgaatagtcgtgcaaaaggtaaaaacatcgaaggattcacagatataaaagcatttgtagattcgatagctattccccgtaagataatgatgatggttcgtgccggaagtccggttgacgaactgatggaccagcttttcccgttgctttcaccgggagacattcttattgatggcggtaactccaattacgaagataccaaccgccgcgtcaaactggcggagtcgaaaggatttctcttcgtcggtagcggagtgtccggcggtgaagaaggagccttgaatggagcttctatcatgcccggcggttcggagaaagcatggccggaagtgaaaccgatccttcaaagcattgcggcaaaagcaccggacggaactccctgttgccaatgggtaggccctgccggatcgggtcattttgtgaagatgattcacaacggtatcgaatatggtgatatgcagttgattgctgaagcctattgggtgatgaaaaagttgctggatctgaccaatgaggaaatggctgatgtctttgcccgttggaacgaaggcaaactacgcagctacctgattgaaatcaccgccaacatcctgcggcataaagacaaatccggagggtatctgattgataaaatcttggatgcggccggacagaaaggaaccggcaaatggtcggttatcaacgctatggaactcggcatgccgttgggattgatcgccacggcggtattcgaacgaagcctttctgcgcagaaagacttgcgtcatcaggcttccagacaatatcagtgtcaacatacacaacctatatataataaggtggaactcgtaaagaatatattttctgctctttatgcttccaaactcgtctcttatgcccagggattcgccgtattgcaacgtgcttccgacgctttcgactggcatctcgacctggcttccattgcccgtatgtggcgtggaggatgcatcatccgcagtatattcctgaacgacattgctgccgccttcgaagccaccgacaagcctaaacacttgttgttggctccttattttaaagaagaaatgaaaacattgcttcccggatggaagaacttggtggcggaagccatgaaagaagaacttcctgttcctgctttctcttctgcgctgaactatttctattcgctcacatctgccgatctgcccgccaatcttgtgcaggcacaacgcgattatttcggtgcgcacactttcgagcgcaaagacgagttgcgtggacagttcttccacgagaactggacaggtcacggaggagatacgaaatcgggtacatataatgtttaaatagaaaacagttttgaaatgataaatgggaatttgaaatgataaatgggaatttagcggttaaatgagaatttatcggttaaatgggaatttatcggttaaatgagaattttgcagttaggctgaaagccttacaattatatatttattggggtgccctgaaagggcttaattatatagcgtagggcaacgccctacgaaaaagacacaccagccacaagccctgaaagggcggaactgtatacaattatgccctttcagggcgcaaattcagattatcgtttttacgtagggcgttgccttacgctatataattaagccctttcagggcactccgcaaaattatcatttaccatctcaaaacagaaattaaaacaactcttgaaaaatggataaatttgcaatgataattttcggtgcgtcgggtgatctgaccaagcgtaagctgatgcccgccctttactccctctaccgtgaaaagcggttgaccggagagtattctatattgggtatcgggcgtacggtctactctgacgataactaccgttcctatatcttagaagaactgcaacagttcgtaaagtccgaagaacaggacacagctctgatggcttcgtttgtctcccatctctactatttaccgatggacccggcaaaagaagaaggttacccgcaactccgccaacgtctggtcgacttgaccggtgaggtagacccggacaacctgctgttctacctagccactccgccgtcactgtacggagtagtgcccttatacctgaaagctgccggactcaacaccccccattcacgtatcatcgtcgagaaacctttcggttatgatctcgaatcggcacgtgaactgaataaaacgtatgcctctgtattcaatgagcatcaaatttaccgtatcgaccattttctcggtaaggaaacagcccagaatgtactggctttccgttttgccaacggtatcttcgaacctctctggaaccgtaactatatcgactacgtggaaattacagccgtagaaaatctgggtatcgaacaacgtggcggattctatgaaacggcaggtgcactgcgggatatggtgcaaaatcacctgatacagctcgtagcccttacggctatggaaccgcccgctgttttcaacgcggacaatttccgcaacgaagtggtgaaggtctacgaatctctcaccccgttgaatgaagtggatttgaacgaacatatcgttcgtggacaatatacagcctccggcaataaaaaaggctaccgtgaagaaaaaggagtggctcccgattcgcgcacggatacttatattgccatgaaactgggcattagcaactggcgctggagtggcgttccgttctacattcgtacaggtaaacaaatgccgacgaaagtaacggaaatcgtcgttcatttccgtgagacacctcatcaaatgtttcattgtgccggtggcaactgtccgcgggctaataaattgattcttcgtttgcaaccgaatgaaggaatagtgctcaaaatcggaatgaaagtccccggtgcaggttttgaagtgcgccaggtgacgatggatttcagttacgcgcagttgggcggcgtacccagtggcgacgcttatgcccgtctgatagacgactgcatccagggtgatccgactttatttactcgaagtgacgcagtagaagcctcatggaaatttttcgatccggtactccgttattggaaagacaaccccgacgcacctctctacggttatcccgcaggtacgtggggacctttggaaagcgaagcgatgatgcacgaacatggggccgactggacgaatccttgtaagaatttgacgaatacagatcaatattgtgaattatgaaactatcagtttttccttcatctattgaaacttcacgagcattgatactccgcttggtggaaatcatgaatgaagagccggacagagtgttcaatatcgcagtcagcggtggcaacacacctgctctgatgttcgatttatgggcgaatgaatacatggatattaccccgtgggatcgtatgcggatttattgggtggatgaacgttgtgtgcctcccgatgattcggacagtaattacggaatgatgcgcaacctccttttgggtttgactcctattttgtatgaaaatgtattccgtattcgtggagaggcgaagcctgcgaaagaagcggtccgttattcggagttagtccggcagcaagtaccgttgaagcgtggctggcccgaatttgatattgtactgttgggggccggagacgacggacacacgtcttccatctttcccggacaagaagatttgctgacttcaaactctatttatgtagtcagcgctcatccccgtaacgggcagaagcgcatcgcaatgacgggataccccattcagaatgcccgctatgtcattttcctgattaccggaaaaaataaagtcgacgtagtagaagaaatctgtaattcgggagacactggccccgcagcctatatagctcatcacgcgcagaatgtagagctatttgtggataaagcggctgccgcatatattgacgatagtaataaaaaatgaattagaactgtttcgttgacgaaactaacagaaaaaagaaaaatatgaatccttatcaaaattcatttggaggtaatatcccgcaggacgtagccgggaaacaaggtgaaaatgtcatttttattgtttatactctaaaagatactcctgaaactcttgataaagtaaaagatgtatgtgctaatttctcggccatgattcgcagcatgcgtaatcgtttccccgaactgatgttcagttgtacgatgggctttggcgccgatgcctggagtcgtcttttcccggaaaagggaaagccgaaagaactgaacacttttgaagagatcaaaggcggaaagcacacggcagtttctactccgggcgacatcttgtttcatatccgtgcaaaacagatggggttgtgttttgagtttgcttccatcattgacgagaagctccagggcgtagttgaacctgtcgatgaaactcacggtttcagatatatggacggcaaggccattatcggctttgtagacggaacagagaatccggcagttgatgagaatccttatcattttgcggtggtaggagaagaggatgctgattttgcaggaggaagttatgtttttgtacagaagtacattcacgatatggttgcatggaacgctctgcctgtggaagaacaggagaaagtgatcgggcgtcgtaagtttaacgatgttgagctttctgacgaggagaaacctcaaaatgcgcataatgccgtcactaatattggtgatgatctgaaaattgtgcgtgccaacatgccgtttgccaatacgtccaagggagaatatggtacatacttcatcggttatgcaagtacgttcagtacgacccggcagatgttggaaagtatgttcatcggcaatccggtagggaataccgatcgtttgcttgacttcagcacagctgtaacaggaacacttttctttgctccttcctacgatttgctgggagaattgggcgaataaaaaaagaaaaataagaataaaagattgggggaggattacactttggtaatctcctccactatatattgatctttcactctcctgcaggtacatacaaagtattccggatgtttcagggctccttctaaagtatcaggaagaatcatctctttggtacgtctatccattgccaccgttgcatatagaataccctctttttcgcatctctcaattaatgcattttttagttcttctacgctatattccatttgtgtgagactttatcgctgcaaagttatggaaaatatgtatattttgtgcaataatattcctgtaatatataaaaatagctccctagttcgtccgccgacgagggagctatcaacacaaaaactaaactagacttaactaaactattctattcttggaatttcacaatccctttctgttctttgcaaaggtagatataaaacggattttggcaaactataatcgacaaaaatcacttttttaccgataaaataatgaataatcagctcctttcgtcaagaaaagtctgaaaaacttgcttgtaactatcgctgataggaatatatgtcttgtcaaacacgatacgtccgcggtcaatcacacgtattttatctttctgtacgataaaggagcggtgcacacgtatgaaacgactggatggcaagagctcttccatggctttcatactcatcagtgacaggataggtttgggagcgtcttccgtatatattttaatgtaatctttcagtccttcgatatacatgattttcttcaagtccacttgtaccagtttgtagtcacttttcacaaagatactgtctatctcttccggtttctgcacgagttcgaaccattggagagctttgttggcagcttgcaggaaatcaacgtatgagattggtttcagcagataatcgagtgcattgacacgataaccgtcgatggcatactgtccgaaagcagtggtaaatacaatacgggtatgcggatctaccatcttcgagaactccagaccgttaagctccggcatctgaatgtccagaaacaggaggtcgacctcttcgcccggcaattctttcatcgcctgaaccgcactggaatactttcctgcaagttgcaggaacggagtcttactcacataactctctaacaagctaagagctaaaggctcatcgtcaacgattgcacaacgtaacatcatactattttatatctaaagttttatatccaaaatcttgtacttgacgttttatactaaacattggtacttaacgttttatactgaacgtttttctttctactctctaatcttgatactcaatctcgattcgtataccttttcgtcttttgagacgcctttcaaccacgtataagctccgggataaagtatctccaaccgacggctgacttgttccaatcccacgcccgatccactcttatcctccactgtcttaggatgattactattgcggatttcacaaatcacttccttatcattctccaaaatatgaatactgatgaaactcgattcagtaggggagatgccatgcttgaaagcattctctatcaaagagataaagataagcggggcaatgagcgtctgactgtcgggctgaatatcgaatttagtaatcatctgcacgttggcggacagacggatgcgcatcagttcgatgtaattgcggataaaatcgacctccttacagagaggaacgtatgtctgctggttatcatataacacataacgaagcagtttgctcaactcctgaactgcctgttgcgccttgtccgaatcaaatgcaatcaatgcatagatgttattcagcgtattcagcagaaagtgagggttcagttggttccgcaggttcttcagttccgcttccgcacggttccgttccgcctcttttcgggcagcttcattctgtgtccatcgggcactcatgcggatagcggcacttagtccgatagtgaatacgagactcaacatatccctaaggaaaaacaaccatcccggaggcatccccggtctttttgatttgggagcgaatgacggatcgaacgtcagactttgccagagatgaagcaacacaccgatggcgcataaaaagataatattgtagaccacatatcttttggcctgactctggaaaagatagcgcggcacaagaatgaaataattcacgtagaacacaatcatgaaagagagtggtacggcaaggtggcgtgtataagccatccagttgatgttcccgtttccacgttcgacgaagaagaacgggaaaccgaacataatcccccagctgataatgtgtatcagtacttccaggggacgacgtgcggatgtaaaggtttgtttcataaagacaaagataattcttttattggtaattatccattttattcgtatctgatggcttctatcggatctaaatctgctgctttcttagccggataccatccgaagaagactcctgtaactgtacatactgcgaaggagaggaatacgctccacgactggatatagataggccaatgcgctacgctcttgacaatccaactggctccgcagccgataatcactccgatgatacctcccgtgatactaatcatgatggcttcgatgaggaattgacttagaatgtcgaccccgcgtgcgccgacagacatacgcagaccgatttcacgggtacgctccgtaacggatacatacatgatattcataatcccgataccacccactaccagcgaaatacttgcgatgcaagcaagcagggtagtcatcaaatcggtggttgagttgagcatcgtgctcaattcctgttgggtgcggatggtgaaatcatcgttatccgaagccttcagtttatggttgcggcggaggattgtactgatttcgtcagttgcatagtccgtcatatcttcggtgagggcagaggcaaatactccctgcaaatacgtaacggcaagcagacgtttcattacggtggtatatggtgcaagcactacggcatcttggtcttgtcccatagagttgtatccttttgctttgagcactcctactacacggaaaggtattttgttgaaacggataatcttacctaccggatcacttccgtccggaaacagattgtctactatggtctttccgatcacgcacactttggccgaactctgtatgtcggcttctgtgaacatctccccattctcaacagtcagttggcgaatatcgagatattctgttccgacaccgttcaccgaagccggatagttgttgttaccagcaataagctgtcccgatgacgagacattgggactgatggcagacaggaaactggtctcatcgcgcaaggcctcgtagtcggctagcttcaaggtctgcatcgcagacgggtcctgccggacacctccacgcatatcggctcccggatgaatcataatcatgttcgatcccatctcggaaatctgctgctggatgcttttcttcgaaccttgtccgatagccagcatcgtgatgacggaagcaacaccgataatgataccgagcatggttagaaaagcacgcagcttattgttcgccaatgcccggagagctatcttaaataaattagttccattcatgtttataaagttatggagttattaatggggttctgaaggtataaggctattataaggttataaagttatgagactgtaaaatgttggcgtgatgctctaagcatatcatcttataacttcattgttccttatcacatgaattgcttcttataacttcattactccttatcacattaattaatcctcgtcgttctttggcaatgccgccagtgcttcggcggcagacagaattttcggattggcagtatcctcaataacctgcccgtcacgcagacggatattccggctgctatattgcgaaagttcgggattatgtgtcacaaagataatcgtacgtccctctgcatgaagtttctgaaacagtacgagtatctcaaaagaggtacggctatcgaggtttccggtcgcttcgtcggcaagaatcactgccgggttgttgaccaacgcacgtgcaatggctacccgttgcatctgtccgccggacatctggttggatttgtgttccaaacgatcccccaatcctacggcctgtaaagactcgatagcgcgacgacgacgttcggaagcactgacggcagagttatacatcagcggtagttccacattttccacagccgttgttttaggcaacaggttgtagctttggaacacgaatccaatcttccggtttcttagtaccgcacgttgaggcttgctcatcgtacgtacgggaatatcgtcgagcagatactctccgcttgtcggggtgtccaggcagcctaatatattaagcagcgtggattttcccgaaccggaagtacccatgatggtgacaaactccccttcattgatattgaacgaaacgccccgcaatgcgtgaacggtctcgtcgcctacctgaaagttacgtttgatattttgtatttcaattacttttttcatcgtaaataatgtgctaatgcgccaattcgttattggcacattgaataattattttttcttcttacttcccggagggcccggcatgaacggacttctttctccgccattttccatatttccttcaggtcccatgttttcaccgggcattacacctatagtagcttctgttaccacctttgtcccttcaggaataccactgataatttcggtggatatgccgttgctgattcccacttctaccggatgagcggtgaatgtagttccttcgcgagtccaaagtttgtgttcgccttcgcaatctttcactatatcattattgccgattaacggtttttccggtgtgaatcgcaaggctttgttcggaacagacagtacatcttttttatcaagaatatagatcgttacattagccgtcaaacgcggttttagtttcaagtcggggttgggggcagagatgactacctcgtaggtaactacggtggtagtgctgctcgtgctgctcgtactgcttgcgtcgcccaaacgaatctgtgtaaccacaccttcgaatacatcattcggataagcatctaccgtgaagctggcacgctgaccttccactacaccgcctatatctgcttcatccacatcggctactacctgcatctgtgtcaggtcggcagcaatggtgaacagggtcggagtttcgaatccggaagcaacggtttgtcctgcttctacatcacggctgataacaactccgtcaatcggtgaagtaatggtagcgtaagacaggttacgttccgctttcgcgagcgatgccttgctgctgtcatagctgcttttcgctttctgataattgtagagcgcctgttcgaagtccgtatcactaatcaatgacttttcgtgcaagcctttgctgcgttcataatttttcttctgatattcatattcggctttcgcaccatcgtaagttgcctgctgtgaggccagttcactttgcaatgtgatgcggtccatttcagcaatcagctgtcctttggttactaccgagttgtaatctacgtgaatcttgtcgatgataccggacacctgcgtaccgacttctacttccgtcaccggttcgatggtccctgtagcagtcaccgaatttgaaatatcgcctttactgacagtagcggtggcgtacgtcactttgtgtttggccggtgaaccggcaaagagccatattcctgctcctacaaccacaacgactactacggcgattagaataatctttttcgttttcattcgtttattatgcttttacttatttataatgctgattttatactctttataaagctaattgatctccctgatagaacttcagcaactgcgtattcagtatagccatatatttagcctgaagctgttcctgctgtgcttgcagcaaattattcttttcagtaaggagttctacggtattcttcattcccagattaaactgttcgctaatcaactcatagctgatttgtgtacttttcagcttttcgtttgcggcagcataacgctgttgcgcgctgttggcatccaaccaaaggctttcaatggttttgtacagtgccttttgttcgtcaagcaaggataacatgctcgtttcgtactgcaatttagctttttgtacggcacttttcgtttgacggttattgaagataggcacactgacagacaatccgatagagttgttccatccgttcttcacttgttctccgaaggtgaagtcgctaccgctggtatggttggttccgattcctgcgctaaggctgatggtagggaaatagctcgatttagcgatattgatacccagttcagaagcctctacattcagtttgctcgcttcaatctccggacgaaggctcaatgcgctgatgtacacatctcttttggtaggtagcggagccagtacattttcgtcggacagggtagggaggtagatgttcatttcattctccccatccagttcgagcagttgtttcagttgcaatttgtaatcttcaagagtggcttgcgcggtgacaagttggtatcggtcggtgctcacctgtgcttccagttgcgcgaggtcacttttggcaatacttccggcattcagaagttcctgtcctcggtcgcgctgcgcaatggaaacttgcagggtgttttcgtttactttcacagattcggctgcataaagaatctggatatatacttgggcgatagactcctgaatattattttcggaagtcgccacatccagctcggccatctgattattcaacttttcctgttggatcgtttttagtcgtttattaccattatatagagtccacgaagcattcagtccataattaccgttgtagctcgttttgctgttgctactgataatctcgctaccgctcacccggctactcgtctcctgatacggacgattcaccacctgttggccggtagaaaacgaaagactggggaacatggcagctttagctgtcttcacatcaatctgcgtgctggccgcagtgatccggttcttgcgaattgtaatgttctgctcctttgcatagtcgatgcatgactgcaagtcccattgatccgggattttcgtttctttcagcgtatcgacttgcagcggagaaacctgggcagatatgccggacagcatacttgctccaagaaatgtcatcactgtcaatcttcttacatttatcatattcatacttctattgatttactgttagcgaaggtacgtacatattatatatgccgcaaaaacgatagacggatgacgttatttcgccgttaaatgatttttttctgtcgataggtaggtttttgaagaaaaacacgacaaatcttgcaacttttttgactacttgtttgttttaattataaaaaatgtatatttgtactcattacaaattataacgtaaacatatgaagaatacactgcttacgatctggaatttctatttggagggcttccgtagtatgaccttaggacgtactctatgggttattattttgctgaaattattcgtcatgttcttcatcctcaaaatgttctttttccctgatttcctcggcgaccacccaacggatgccgacaaaggtacatacgtgggaaatgaactgatagaacgtgccatccccaataaatctactgatttttaactcttaaactacataggattatgattgaaagtattgacacctcgctgatcgattggtcgagagcccaatttgcgatgacagccatgtaccactggatttttgttcccctcacactcggactggcagtggtgatgggaatcatggagacgctgtattataaaacaggcaacgaattttggaaaaagactgcccagttttggatgaaacttttcggtattaactttgccatcggtgtggcaacgggtttgattctggagtttgaattcggtacgaactggagcaattattcgtggtttgtaggggatatctttggtgctccgctggctattgaaggtattctggcattctttatggaagctacgtttatcgcggttatgttcttcggatggggaaaagtaagtaaacgtttccacttggcttccacctggctgacaggattgggagctacgatttccgcgtggtggattctcgttgccaacgcatggatgcagcatccggtaggcatggaattcaatcctgacactgtccgtaatgagatggttgatttttgggcggtggctacctcgcctgtagcagtcaataagttcttccacacggtattgtccggctgggtgttgggtgctatttttgtggtcggtatcagttgttggtacttgctgaagaaacgaaatcgtgagtttgcactggccagcatcaagattggtgcaatcttcggactggtagcatcgttgctttctgtttggacgggcgatggttccggttatcagattgcccaaacacaaccgatgaaactggcagcagtggaaggtctgtatgaaggcggaacgaatgtcggtctggtcggaataggagtattgaaccctgaaaagaagacttacaacgatgggaaagatcctttcctcttccgttttgaaatcccgagtatgctttctttccttgccgagcgtaatgtggacggttacgttccaggcattacgaatatcatcgaaggtgggtatcagttgaaagacggatcgaaggctctctctgctgccgagaagatagaacgtggtaaaacggctatcggcgcattagctgcctatcgtgctgcaaagagtgccggacacgaggaagatgcgaagattgcatataatgtattgcaggaaaatattccctattttggctacggatatatcaaagatgtgaaccaactggttccgaatgttcctctcaacttctacgcattccgtataatggtaatcttgggcggatatttcatcctgttctttatagtcgttcttttctttatctataaaaaggatttgagtaagatgcgctggatgcactggattgctctgctgacaattcctttgggttacatcgccggacaagccggatgggtggttgccgaatgtggtcgtcagccgtgggctatccgcgatatgttgcctacgatggctgctatctccaaactggatgtaagctccgtgcaaactacgttctttatcttcctgctcctgtttacagtgatgctgattgcaggtgtcggaattatggtgaaagctatcaagaaaggaccggacgcataatacttaatacttattacttaatacttgaaacttatgtatatatttttgcaacaatattggtggcttgtcgtttccttgctgggagccatactcgtgttcttattgtttgtgcagggaggtaattcattattgttctgtctgggtaaaaccgaagagcatcgtaagatgatggtgaattctaccgggcgtaagtgggagtttacgtttactacgttggtgacgtttggaggagctttctttgcttctttcccgttgttctacagtaccagtttcggtggtgcttattggctttggatgattatacttttcagttttgtattgcaggctgtcagttatgagtttcagagtaaggcaggaaatctgttaggtaaaaagacatatcagactttcttggtgattaatggggtagtgggtcctgtgttacttggcggggcggtggctactttcttcaccggttctgatttctatattaataaggccaatatgacagacactattatgccggtaatcagtcattggggaaatggctggcacggattggatgcgttgacgaatatctggaatgtaattcttggattggctgtcttcttccttgctcgtgtattgggagcactctatttcattaataatattgatgacaaagaactgaccgacaaatgtcgtcgtgcagtacgcaataacacagtcttgttccttgtattctttttgtcgtttgtcattcgtacattggtgtccgaaggctttgccgttaacccggaaacacaggagatttatatgcagccatacaagtatctcacaaactttatcgagatgccggtagtgctggctttattcctgattggggtggtactggttcttttcggtatcggaaagacattgcttaaaaagacttttgataaaggtatctggtttgcaggaatcggtacggtactgactgttttatctttgctactggtagcagggtacaacaatactgcctattatccgtcatataccgacctgcaaagctcattgacattagccaatagctgctccagtgaatttacactgaagacaatggcttatgtttccattcttgttccgtttgtgattgcttatattttctacgcttggcgtagtatcgaccggcataagattaccgagaaagaaatggatgaaggaggacactcatactaatatattatttgtatattagtcttgtgtctgtgtactaataattttgtccatacactcatacattgtccatatagaatttcgaaatagagattctagtcggaacaaataaactccccttatttaacatcactctaagtcatggtagagagataaaataaggggagctttttatatattatagtcagcggtgtgcctaaacacttttctttagaaaaatc

SEQ ID NO: 8208 - DNA, 8090 bp, Unknown
  gut microbiota DNA sequence
tttcagggcgcaaattcagattgtcgtttttacgtagggcgttgccctacgctatataattaagccctttcagggcactccgcaaaattatcatttgacttattcttgaatctgttaaaagtgaaattatgaaaaagatattgtttgtctgtcttggaaatatctgccgtagctctacggctgaaggcgtgatgcttcatttgataaaagaagcgggattggaaaaagaatttgtgatagattccgccggaatcttgtcttatcatcagggcgaactgccggacagccggatgcgtgctcacgcggctcgtcgcggttaccaattggtgcatcgttcgcgccccgtccgtacagaagatttctatcattttgatttgataatcggtatggacgaccggaacatagacgacctgaaagacaaagcaccttctcccgaagaatggaagaagattcatcgcatgacggagtactgcacccgtattcctgcagatcatgtccccgacccctattatggaggggccgaaggatttgaatatgtactcgatgtgttggaagacgcttgtgccggcctgcttacttctttaactccggatagctgatccgggtatgataagcaatctttagtttttccttgaatacagctttcacagttgctatatccttgaaagtgataggacattccttaaagtaaccttcagtaacctgtgagtcgataattttgtcgatcaggttgctgattgtttcttccgtatattccggaagactgcgcgaggcagcttccacagcatccgccatcatcaggatagcctgctctttggtaaacggattcggtccggggtaagtgaacaattcttcattcggctcttcgtccggatgctcgttcttccaggaaatatagaaatattttgtttttccccgtccgtgatgagtgctgataaaatctttgaccgctttaggtagattgtgtttatccgccagtttcaatccatccgtcacatggctgataacgacctgtgcactttgttcgtaattcaaattcttatgcggattaacccctcccgactgattctccgtaaagaaagccggattttccatcttcccgatatcgtgatacaaagctcccgtacgtactaactggctttttgctccaatgcggatagcggcttccgctgccagattagccacctgcatggaatgttggaaggttccgggaaccgtttcagacatctgccgcaaaagatcgttattgatattcgaaagttccaccaaagtaacattggaagtaaatccgaaagtcttttccaataagaataataaaggataagtgaataataacaggattccgttaatgataaagtaagtgtacatacgtatattcaacttcgaaaagtcggtggaaagaccattctccgtcatcagttcgaaagcaaaataaatggctgcataagtcagtatcactaataaggccgttcggaaaagctgggatctctgcgatagttcccttaggctgaatatcgccactaatcccgctgccaactgcgtcagaataaactcatgagggaagcgcaaggagatggagcatatcaatatagtgatgacatgcgtcagaaaagcggttctcgaatcaagaaagacacggatgataatcggcagcatcgcgtaggggatgatgtacacattaaatatattatgtgtcaccatgaaagccgttatgacactgtagaacacaatcagggtgaatagtaacgacagactgcctttccgttgataatagtctttccggaataaatcgagataaagcatgaaacaaagcatcagcatacccacaaacagaacctgacctccgagaatcaaacggttttgtcccatagactcgttgcgtttgatggattctttgcgcaatgattcgaggatattataggtatgcggactaacgatctctccacggtcgataatcttctgcccgctgactaccaatccgtttgcccaggaataattatttaatatctcctctttggcggcctgggtgcgctcctcgtcaaaagtgaggttgggagtaatgtattcgttcagcgcgcattgtcttaatacttcccggttgaaatgggtcgagtctgctgtcagcaggtgttcatacgctttctttaccgtgtaaatgttttcggtagcctgcgggttggcaagtttatcgtcaatcaccatgacggatgaagtgctgtctttttgaagctgctgtatattctctgtcgatacgatgcctgcctgatagatttcttttaaggtacgctcgatataccgtaaataatcaatggaaggaagaatacctttcagattggtatgataattctctttcaacttggcgattgcgtctttctcgatgtttttatccagttggtaataaggctggaagaaagccatcagactgtcctgctctctttttactactgcatcctctttataaataggaaagtcgaaagtagcgatcagctgcccatatttccagggcttattgatgtcaaactggtaattgaattttccgtcacgtggcaggaaatagacaatcagcgtcacagtgcccacaaatagcagtgatttatatagtaaatctctccatgaaaaactttttttcttcttcaaatgttccatatccactgaaatttttgcgaaaagtacaaaaaaaaacaatagtgtggaaaaaaaggtttaattttgccacgatttacctatactaacccaaattatggcagaaagaaaagtaagagttcgttttgctccaagtcctacgggagcactgcacatcggtggtgtgcgtacagctttgtataattatctatttgcacgtcaacacggcggagacttgatatttcgtattgaagatactgattctaaccggttcgttccgggagcggaagagtatatactcgaatcttttaagtggttgggtatccactttgatgaaggagtgagcttcggtggcgaatgtggtccgtaccgccagtcggagcgccgcgaaatctacaagaaatatgtgcaggttttgatggaaaatggaaaagcatacatcgcttttgatactccggaggaactggacgctaagcgtgctgaaattgctaacttccaatatgacgcatctactcgcggaatgatgcgcaactcattaaccatgccgaaggaagaagtggatgcactgattgctgaaggcaaacaatacgtcgttcgtttcaaaatcgagccgaatgaagacgtacatgtgaatgacctgattcgtggcgaagttattattaactcatccattctggatgataaagtactttataaatcggctgatgaactgccgacttaccatctggcaaatatcgtggacgaccatttgatgggagtttcccacgtgattcgtggtgaagaatggctgccttccgctcctttgcatgtgttgttgtaccgtgctttcggctgggaagatacaatgccggaatttgcccacctgcctttattgctgaaaccggagggtaatggaaaattaagcaaacgtgacggtgaccgtctcggattccctgtattcccactggaatggcacgatccgaaatcgggagaaatctcttcaggttatcgtgaatcggggtatctgccggaagcagtgattaatttccttgctttgttgggatggaacccgggcaatgaccaggaagtgatgtcaatggacgaattgattaaattgtttgatcttcaccgttgcagcaagtcgggtgccaagttcgactataaaaagggaatatggttcaaccatcaatatatacagcagaaacctaacgaagaaattgcggaactgttcttgcctttcctgaaagaacatggtgtagaagctcctttcgaaaaagtggtgactgtggttggcatgatgaaagatcgggtaagtttcattaaagaactgtgggacgtatgtagcttcttcttcgttgctcctaccgaatatgatgaaaagacggtgaagaaacgttggaaagaagattctgcaaaatgtatgaccgaattggcagaagtgattgccggcattgaagactttagtattgaaggacaggaaaaagtcgttatggattggattgcggagaaaggttatcatacaggtaatatcatgaatgctttccgtctgacattagtgggtgaaggaaaaggcccgcacatgttcgatatttcctgggtattgggcaaagaggagacgatagctcgcatgaaacgtgcggtagaggttttgaagtaatcgacacagtactatgctttacaacctggcaatagtcatttatgactttatcgtccatttggctgctccgtttagccgtaagccccgaaagatgatgaaagggcattgggtagtgtatgaactcctgcggcagcaagtggagaaaggggaacagtatatttggtttcatgctgcttcactgggagagtttgaacaagggcgccctctgatagaaatgattcgtgcgaagtatcctaactataagatattgctgacatttttctctccttccggttacgaggtgcgtaagcattaccggggggcggatattgtctgctatctgccgtttgataaaccgcggaatgtgaaaaagttcctggatattgcaaatccttgcatggcgttctttatcaaatatgagttttggaagaattatctggatgaacttcacaaacgccgtattccggtatatagtgtatcgtctatcttccgtcgcgaacaaatattctttaaatggtacggtggaacttatcgcaatgtattgaaagatttcgatcatctgtttgttcagaatgaggcatccaaacgttacttgtcgaaaatcggtatcagccgtgtgacagtagtgggagatacccgttttgaccgcgtgttgcaaatccgtgaagaggctaaagaacttccgttggtagagaaatttaaaggaaccaattcctttacttttgttgccggaagctcatggggacctgacgaagatttattcctcgaatatttcaataaccatccggaaatgaaactgattattgctccgcatgtgatcgacgagaatcacttggttgaaatcatcggtaaattgaaacgtccgtatgtacgctatacccgtgccgatgagaggaatgtattgaaagcggattgtcttattatagactgcttcggactgctgtcctctatttaccgttatggcgaaatagcttatatcggtggaggtttcggagtcggtattcataacacattggaagcggctgtatatggtattccggtgattttcggaccgaagtatcagaaatttatggaagccgttcaattgctcgaagcaaaaggcgcttattccatcaaagattatgatgaactgaaaactttgctggatcgtttcctggcagatgaattgttcttgcgtgaaaccggaacaaatgcaggttattatgtgactagtaatgccggagctacagaaaagattatgcacatgattaatttttgattagaggaaatagtgtcgaaaagaggtgaatccaatgaattcgctttttgtaaaaaaacggctttataaaaaatcttataaaaacagcgggatgttctttcattagaatgtcccgctgtttttattaacttgttagagtctgctatttatcttccttataccattgcgaatacatcaaataattgtgagcaatcttctgattcagttctttggcttgttcaggatctacctttttaatgaatttcgcgggtacccctccccaaatgcttcccggctcaatgatggtattgcttaataccagcgaaccggcggcaacgattgctccttcgccaactacgacgtgatccaggacggttgaccccatccctaccaatgcataatctttgatggtcgccccatgaatggtgacattatgcccaacggatacgtgatcgccaatttcaatagtcgatttctgatataacgtatgcaagacacttccatcctgaatgttgacaccattgccgattcgtatggagttgacgtcacctcttaataccgtattaaaccaaatgctacaatcatttcctatttttacatctcctataatagttgcattatctgcgaggaagcagttttctccgatttcgggagcaaaaccccgtactgatttaattaaagccatataatatttgtttctaataaagttttttatttaatgcagttctatgttgtacgacacccgggtgtcgtgatggctgagacccgggtcttggatagtctgacacccgggtctcagtatgcttgacacccgggtgtcagacaagttctgtttaaagggaagcagtcgcctcttgtaaccaaactttttcttcttcgttaagatccggtgacaacttctcgtagacagtctgatggtaattgtttaaccattcaatttcttcatttgtcagcatctccttgatgatcccttttttgcagattgggcataaagtgatagtttcaaacttaagatattctccaaacattccctctccatctttgcaaaccaacgtcaggttctccgtacgtatcccgtgactgcctgctttataaacaccaggttcattggaagtaaccatgccgggctgcaaaatgacaggattctcattcatacgaatgctttgcggaccttcgtgtacactcaggaaatgtccgacgccatgtcctgtgccatgaagaaaattcattctgtggttccagataggcatacgagctagtacatcgagctgggctccacgggttccggcagggaatttggccatagccaacgcgatgtgtccttttaatataagggtataatccgttttttcttcttctgtaagttcgcctaaggcaatggttcgggtgatgtcagtggttccgtccagatattgggctcctgaatctaagagtaagaaccctctgggctgaagagtcacatcactttctggggtagccgaataatgtacgattgccccatgttctttatatcctgcaatcgtgtcgaaactttcccccatgtagagaggctgtgcagccctaaactcatgcaactttttatctatacttaattctgtctcttttccggtagatacggattcttccagccatttgaggaatttgacgagtgctactccatcccgttgcatggcagcgtggatgccggcgacctcctgctcattgcgaatcgctttcaataatgcgacaggcgactcgccacgaagaatagaacattgcggattaatagacgaatagatagaataattcgtttttcgtggatcaatcagaatgttttttcccggaaaagaattcaggtatgtctctacctcatcatacttctgtatcccaatctgccgttcctttagataagtctctacctctgccgtcactttctctggtgaaataaaataagtcacttcatcctgtgtgattaacaggtaacttactatgaccggattgcaatgtacatcgtttcctcgcaaattgagagtccatgcgatctcgtcgagtgcggatatgaataaagcatagacacctttctttttcaactccgtacggatggcggatattttctcttcgcagcttttccctgcatatttgatatcataaataaaggcaggagaatcaggcatggcgggccggtctttccaaatgctactcaatggatctccaaatatgtcgacctgtaactgatgtgctgccagttcttctttcatctgttcgacctgttgcacagagaacattttcccgtcgatacttgcagattctccaggttttaagtgttggcagagaaattctgtaatactgggagtctccggcaacatctctttatataaggtaatgccgctgccctccaattccttcgtagcttgcagaaaataacgtgagtcggtccataatcctgctttatccatcaggataaccgctgttccggcagaaccagtaaaaccagaaatccactcgcgtgacatccagtggggagccacatattcactaaggtgagggtcggtgctgggaataatgaacgctttgatagaattgggatgaaaggtcatgcgcagtgcatgcactcgctcttttatgctctgtttcata

SEQ ID NO: 8209 - DNA, 31153 bp, Unknown
  gut microbiota DNA sequence
tctataggtgtagaagctagcatatgatgcggatattaaaaagtatatgtttactgattacaaatcttttcttctttcgtcttattattgtatttttgaattaacaacttcacaaaaccaaataaaaatgaagaagaaacaggtacttttagcagtttttgctgcaacaatgttgactccgaccgttgcatgggcgcaatacccacaaatatctggcgaagccaaagaaaactatacaaaaatgatgactgaagagcggaaacgctctgatgaagcatgggcaaaagcgttgccgatagtacaaaaagaagctagagaaggacgtccatatattccttgggctggtcgtccgtacgatttgccacaggctgatatcccttcattcccaggtgctgaaggtggtggtatgtacagtttcggtggtcgtggaggtaaagtgataactgtcacaaatctgaatgatcgtggaccgggttctttccgtgaagcatgtgaaactggtggtgcacgtattatcgtttttaatgttgctggtatcatccgtctggaatctccgattatcgtccgtgctccttacgtaactattgccggacaaacagctccgggagacggtgtttgtattgctggagaatcattttgggtagatacacatgatgtggtggtacgtcacatgcgtttccgtcgtggagaaacgaaagtatggcatcgtgatgactctttcggaggtaaccctgttggtaatataatgatcgaccactgctcctgtacgtggggattggatgaaaacatttctttctatcgccacatgtacgacccgagtgaaggacaatatgaaagcaaagacttgaaacttcctactgtaaacgtaactattcaaaatactatctcggcaaaagcgttggatacatacaatcatgcgtttggtagcacgttaggtggtgagaactgtgcatttgcccgtaacctttgggctagtaactccggacgtaatccttctatcggctggaatggtatattcaatttcgttaataatgtagtattcaattgggtgcaccgttcttccgatggtggtgattataccgcgatgttcaatatgattaacaactactacaaaccgggacctgctactcctaaggattccaatgtaggacatcgtatcttgaaaccggaagcaggacgtagtaagctggatcataaagaatatgggcgagtatatgccgacggaaatataatggaaggctatcctgaaataactaaagacaactggaatggcggtattcagattgaaactcaaccgaacactgacggatatactgaatacatgcgtagctataagccgttcgagatgccgtatatcaatatcatgggggctaaagatgcttatgactatgtattgaaacatgtaggtgcgaatattccttgtcgtgatattgttgacgaacgcgtgattgaagaagtaagaacaggtattccttattatgaaaagaaacttcctaaagacgcttatggtgacttgacaggtttgtctcctaagtcaatgggggaagacggacagttcaagtatcgtcgtttgccgaaagattcttataagcagggtattattactgatgttcgccagatgggtggttatcctgaatacaaaggtactccttatgttgatacagacaaagatggtatgccggacgaatgggaaattgctaacggattaaatccgaacgatccgagtgatgccaataaagactgtactggtgacggatatacgaatattgaaaaatatatcaacggtatcagcacaaagcataaagtagattggagagatatgaagaacaactacgatacattggctgaaaaaggaaaattaatgtaattatgaaaaagatactgatactatcattgctttttatttccggttggatgtctgcgcaggcagtcgacttaaataaagagaaccgtgatcctgaatatgtaaagtctattgtcggccgatcacaaaagatcgttgataaactcggacttacagatgcgaaaatagccgaagatgttcgcaatgtcatagccaatcgttacttcgaattaaatgatatttatgaggtacgggatgcgaaagtcaagaaagtaaaagaatccgggttgactggtgaggctaaaaatgaagctttgaaagctgcggaaaatgaaaaagatgcggcgctatatcgttcacatttcgcttttcctgccaatttatctctctttcttgatgaaaagcaaatagaaactgttaaagatggcatgacttatggagtagtaaaagtgacttatgactcacatctggacatgattcctactttgaaagaagaagaaaaagctcaaatctatgcttggttgatagaggcacgtgaatttgcgttggatgcagaaaattcgaataagaaacacgctgctttcggaaaatacaaaggacgtatcaacaactatctggctaaacgtggatatgatctgaagaaagaacgagaggaatggtataaacgtataaaagcccgtggaggttctatataattaaaaaataagatactataaaaagaagtgaaattctttcccattgtaaatggttagtttgtttgatggtggaaagggtggctcggagagtcgcccttttatcgtatataaattttgaatctattgattcttctagtatatttgagtacaaacggcgctttccatcgtctcctctgtataaaagatacaaatatagaatatagaaatgaaaaagttaagaaatacattagccgcaataagtcttctgtttctggcttcttgtggggggaacaaagactactacatgttcacttcatttcatgaaccggctgatgaggggttgagatacttatatagtgaggacggaattcactgggacagtattccgggagtttggctaaagccggaactgggacagcaccagctcatgcgggatccctcgatggtacgtactccggatggaacctaccatttggtctggactacaagttggaaaggtgatttaggatttggctacgcacattctaaagatttgatccattggtcggaacaacagatgattcctgtaatggcagacgaaccgactaccattaatgtatgggctccggaaattttctatgacgacgagaacgatcagtttatggtagtatgggcttcctgtgtccccgggcgtttcgaaaaggggatagaagaagagaataataatcatcgtttatactatatcactacaaaagattttaaaaccgtttcgaaagcaaaacttttgtatgatccgggattcagtaccattgatgccgttatcgtgaaacgggcaaagaatgactatgtaatggtactcaaggataacacccgtccggaacgtaatctgaaaatcgctttttccgattctatgaccggtccttattcgcccgcatcccaacctttcactgaatcctttgtagaaggaccgtctgtagagaaagtgggagacgattatctaatctattttgatgtatataagaaaaaaatatatggcgctatgcgtacgaaggatttccggaactttacagatgtaacagaagaggtaagcatccctgtagggcataagcatggaaccatatttacggctccggaatcagtcgtaaaagcattattggaagaaaagaaataaatccggaaacaattttaaatcagaaataaatcatgaacaactctgctaaaattctttttgtactggctgccggttggttgactactacagcctttgcacaagatagaattcattatacaggaaaagaattatcgaaccctgcttgtcacgacggacaactgtctccggtagtcggagtacataacattcagttggtgcgtgccaatcgtgaacatcccgatgcttcgaacggcaatggatggacgtataatcatcagccgatgctggcttattggaatggacagtttttctatcaatacctagcagatccttctgacgaacacgtaccgccttcacagacttttctgatgacatcgaaggatggatatcgctggacaaatccggaaattgtgtttcctccttatcaagttcctgatggatacaccaaagagtctcgtccgggtgtgcaggccaaagatctgattgccattatgcaccagcgtgtcggattctatgtttctaaatccggcaagctgattacaatgggaaattatggagttgctttggataaaaaagatgatcccaatgatggaaacggtattggccgggtggttcgtgaaataaagaaagacggttcttacggaccgatctatttcatttattataatcatggatttaatgaaaagaatactgattttccgtattttaagaaaagcaaggatcgtgagtttgtgaaggcttgccaggaaattctcgacaatccgctgtatatgatgcagtgggtggaagaagccgaccgtgaagatcctattcttccgttgaagaaaggatacaaagcattcaattgttatacattgccggatggacgtattgccagtctttggaaacatgcgcttacctctatcagcgaggatggcggacatacttgggcagagcctgtgcttcgtgcaaaaggtttcgtcaatagcaacgcgaaaatttgggggcagcgtttaagtgatggtacatacgctaccgtgtataatccgtcggaatttcgttggccgctggctatatctttgagtaaagatggattggaatatacaacattgaatctggtgcatggtgaaatcactcccatgcgttatggaggaaattataaatcatacggtcctcaatatccgcgtggtattcaggaaggcaatggggtgcctgccgatggtgatttgtgggtttcttacagtgtgaacaaggaagatatgtggatttcccgtattcctgttccggtggaaataaatgcttcagcacatgcggatgatgatttctcaaaaaataaatcaattgcggaactgactgactggaatatttattctccggtttgggcccctgtttctttggaggatcaatggttgaagttgcaggataaagatccgtttgattatgccaaagtggaacgtaaaattccggcctctaaagaattaaaagtatcatttgatttgaaagccggccagaataataaaggtacactccacattgaatttctggatgagaatggaatagcctgttcccgtatagaacttactgatgatggcatttttcgattgaaaggcggctcccggtttgcaaatatgatgaaatatgaagcaggaaagatttatcatgtagaagcagtcctttctactgttgatcgtaatattcaagtgtatgtagatggcaagagagtagggttgcgtatgttctatgcgcccgtggctgctgtggaacgaattgtattccgtactggcgtacctcgtacattcccgactgtagatactcctgccgaccagacttatgatctgccggatgcaggtgcgcaagatccattggctgaatatggcattgccaatgtgaaaacatcttccgcagataaagatgcgtcttctgctcttttaaagtatgctgacttcagtcattatgcagattgtttcaatggcatggaagacgaaaatgttgttcaggcaattcccaatgcaaaggcttcggaatggatggaggaaaatattcctttgttcgagtgtccgcaacataactttgaagaaatgtattattatcgttggtggtcattgcgtaagcatatcaaagagactcctgttggctatggtatgaccgagtttctcgttcagcgttcttattctgataaatataatttgattgcttgcgcaattggacatcacatttatgaaagccgttggttgcgtgatccgaaatatttggatcagattattcatacatggtatcgtggcaatgatggcggtccgatgaagaaaatggataagttcagctcatggaatgcagatgctgttttggctcgttacatggtagatggtgataaggactatctgctggatatgaagaaagatctggaaaccgaatatcagcgttgggaacgtacaaaccgtttgaagaacggattgtattggcagggtgacgtacaggatggtatggaagaatcaatcagtggcggacggaggaagaaatatgcccggccgacaatcaatagctatatgtatggcaatgctaaagcactttcatgtataggaattctttccggtgatgaggggatggctatgaaatatggcatgagagcggatactttgaaaaatctggtagaaaatgaattgtggaatacacgtcatcagttttttgaaacgatgcgtacggactcttctgcgaatgtgcgtgaagcaatcggatatattccctggtatttcaacctgccggataccacccaaaagtatgaaattgcctggaaagaaattatggatgaaaaaggcttctctgctccttatggattgacaactgcagaacgtcgtcatccggagttccgtacacgtggagtaggcaaatgtgaatgggacggtgctatctggccgtttgcttccgcacagacattgacagcaatggctaactttatgaataattatccgcagactgtattgtctgacagtgtatatttccgtcagatggaattgtatgtggaatcacagtatcatcgtggtcgtccctatattggtgaatatttggatgaggtgaccggttattggctgaaaggagatcaggaacgtagccgttattataaccattccactttcaacgacctgataattacaggattgatcgggcttcgtccgcgtttggataatacgattgaagtgaaccccttaattcctgctgacaagtgggattggttctgcctggataatgtattatatcatggtcataatctgacgattctttgggataagaatggtgatcgctatcattgcggaaaaggattgcgcatttttgtagatggtaaggaagtagggcaggcgaatacattgacaaaaatcgtttgtgaaaatgcacttaaatgataattttgcggagtgccctgaaagggcttaattatatagcgtagggcaacgccctacgtaaaaacgacaatctgaatttgcgccctgaaagggcataattgtatacagttccgcccttttagggcttgtggctggtgtgtttttttcgtagggcgttgccctacgctatgtaattaagccctttcagggcaccccaataaatatataattgtaaggctttcagcctaaccgataaattctcatttatcgaacaaataaaagatacttgaaaaatgaaattcaaaaagattcttctttcattgctaatttgtttgtcttgttttgtacaggcgaagaatataaccatcggtcgtcttacctgtgagatgcaggagggactggtagtggtcgaaggttcaccccgtttgggctgggtgatggaatcgccggaaaatgggacacgacaatctgcctatgagattgatattcgggaagcttttacagggcgttccgtttggaatagtgggaaggtttattcttcgcagagccagttagtttctacaaagggggcagatatacgtcctgataactcatttaattatagttggcgcgttcgtgtttgggatgaaacagatacaccttccgagtggagcagtgaagcgaaattccgggcagtacccgaaagattatcttcggggcagtggattggagctattacccgacaaaatgctcatttaccggaagggcgtaagttccacggtggagagctgaagaaaccggaagtgaaagctgcttgggaagcagtggacactttggcaaagaaaagtatttgtttgagaagaacattccaggtaggagatgcgaaagaagggggtgcaaaccgtaaaccgggcaagaaaatagtggaggcaacggcatacgtttgtggtctgggattctatgagttttctttgaatggcaaaaaggtgggtaacagtgagtttgccccattgtggagtgattatgataaaactgtttactataacacatacgatgtgacggaacaattgcggcgtggtgaaaatgtcgtaggaatcttattggggaatggattctataatgtgcagggggggcgttatcgcaaattacagatcagctttggtcctcccacacttttatttgagctggttattaactacgaagatggaacatgtacgacggttcattccgataataattggaaatatgattttagtccggtaaccttcaattgcatatatggaggagaagattatgatgcgcgtcgtgaacagaaaggatggaatcagattggctttgatgacagtcattggcgtccggtagtcatacaggaagctcctaaaggaatacttcgtccacagatggcggctccggtgaaaatcatggaacggtatgatattcaaaaggtaaccaaactaaatgcggaccaagttgcatcagcttctgtatcaactaagagaacagtcgatctttctgcttttgtgttggatatgggacagaatttggctggctttccggaaataacagtacgtggcaaacgtggtcagaaagtaactttgattgtagccgaagcattgacagaggaaggtgcttgcaatcagcgtcagacagggcgtcaacactattacgaatacactctgaaaggggaaggcgatgaaacctggcaccctcgtttctcttattatggttttagatatattcaggtagagggggctgtcttaaaaggacagaagaatccgcagaaattgcctgtattaaagaatattcaatcctgtttcgtctataattcagccaggaaagtttccactttcgaatcatccaaccggatatttaatgctgcccatcgattgatcgagaaagcggttcgcagcaatatgcagtctgtgtttacggattgtccgcatcgtgagaaacttggatggctggaacaggtacatctgaatggtccgggtttgttatataactatgatttgacagcatacgctccgcagattatgcagaatatggcagatgcacaacattccaacggagccatgccgacaactgctccggaatacgtgatttttgaaggtccgggtatggatgcttttgccgaatctccggagtggggtggctctttggttattttcccttttatgtactatgagacttatggagacgattcattgattaagaaatattatccgaatatgcgtcgttacgtggattatctcaagactcgtgcagataaaggtattctttctttcggattgggagactggtatgattacggagatttccgtgcgggattctcacggaatacacccgttcctttggtggctactgcgcattattacatgacagtcatgtatttggtacaagccgcgagaatggtaggtaatgactttgacattcgttattatacttcgttggcacaggatataatggttgcatttaataaatgttttcttcataaagatacggcacaatatggtacaggaagccaatgcagtaatgcgcttccgttgttcctccaaatgatgcaggatgcagatttgaatgagaaagtattcgcgaatctgataaaagatgtggaagcacatggcaaccgtttgactaccggtgatgtgggaaaccgttatctgattcagacattggcgcgtaatggggaacatgaacttatttataagatgttcaatcatgaagaagctcccggatatggtttccagttaaaattcggcgctacaactttgaccgagcagtgggacccccgtcaaggttcttcctggaatcactttatgatgggacagattgatgaatggttctttaattcgctggttggtattcgtccttctaccactccaaaacaaggttatcaaaagttcatcatcgctccccaacctgtgggagatttgaaatatgtcaaagcgtcgtatgaaactttatacggtaccattaatgtgaactggacttgtgagaatgggactttcactttaaacgtgtctgttccggtgaatactaccgctgtcgtttacctcccgggcgaaaaagaaccgaaagagatacagagtggaacatataaattggtttgtgcaaaatgaaagagacattttatatatatttgtagaatgaaaaacaatgtattcatataaaaaatcatgcagcatctttattttaatcatatagcatgtttgaaaaaaacatctcaatgattgtcttcaaacattgggaagaaaaaaagattctattagcatgattttttagaaggaaacgatgaaatatactttaataatatcgattatgaatttacgaacaactcttattgtctttctttgcttctgtgcaaccacagttcttcgtgccgagcgtgtagatatgctgaaggtcggtgcaaaagcaaatggcaagactcttaatacaaagctaatcaattcaacgattgaccgtctgaaccgtggcggcggaggtactcttttctttcctgccgggacttatctgacggggagtatccatctgaaaagtaatattacactggagttggaagccggagctaccttactcttttccgataactttgatgactatcttccttttgtcgaggttcgtcatgaaggagtgatgatgaaaagtttccagcctttgatttatgcggtagatgccgagaatattacgatcaaaggagaaggaactttggacggacaagggaagaaatggtggatggagttctttcgtgtcatgattgatttgaaagacaatggcatgcgtgatgtgaataaatatcagccaatgtgggatgcagcaaacgatacgacagcaatttatgctgaaacgaacaaggattatgtaaatacattgcaacgtcgctttttccgtcctccgttcattcagcccgttcgttgtaagaaagtaaagattgaaggagtgaaaatcataaattctcccttttggacggtcaatccggagttttgtgacaatgtaaccataaaggggatcaccatagataatgcgccctcaccaaatacggacggagtgaatccggaatcctgccgcaacgtacatatcagcgactgccatatatcagtaggagacgattgcatcacaatcaagtcgggaagagatgcgcaggcccgtcgtttgggagtaccttgcgagaatatcactatcaccaactgcaccatgctttccggtcacggaggcgttgttatcggcagcgagatgagtgggagtgtgcgtaaagttactatttccaattgcgtgtttgacggaacagatcgtggaatccgtattaagtcgacccgtggaaggggaggagtcgttgaagatattcgtgtcagcaacgtcgtaatgagcaacattaaacaggaagctgtcgtattgaatttgaaatacagtaaaatgcctgccgaacctaagagtgaacgcactccgatattccgtaacgtacatatcagcggaatgactgtgacaaacgtaaagactccgatcaaaatagtgggcttggaagaagcgccgatatctgacatcgttttgcgtgatattcacattcaagaagggaaacagaaatgtatcttcgaaaattgtgaacgtatcacgatggatgacgtaatcgtcaatggtgaagtaattaaaagcaccacagatactacagattaacacagatttttaattcgactaaattataagaataataaatctgtgaaaatctgtgtaatctgtggtgaaaaaacaacttgcataaattaaaaataaatgaaacgaatcctttttactatgcttcttgccgcatctctttcggccgaagcccagacgcaaacatacgagacggaatttgcccgtcccttgaatgaagtactgacggatatacagaaccgtttcggagtccgtttgaaatatgacattgatacggtgggaaaagtgctgtcttatgccgatttccgtatccgtccttattccgtggaagaatccttgacgaatgtattggcacctttcgattataaatttgttaagcagaaaggaaatatgtataagctgaaagcatacgagtatccacgtcgtacagatgcagacggagagaagatgctggcttatctgaatacactctatacagaccaacagtcctttcaacttcgtgccgattctctgaaaaaagaggtacgtcagcgtttaggtattgatactttgttggctcaatgtgtcaaaaccaaacctattctttcaaagatacgtaagtttgatggctataccgtgcagaatttcgcacttgaaacacttcccggattatacatttgcggttctatctatacgccccaatcgaaaggaaaacatgcgttgataatctgccctaacggacattttggtggcggacgttatcgggaagaccaacaacaacgtatgggaactttagcacgtatgggagctgtttgtgtagactatgatttgttcggatggggagagtcggctttgcaagtgggcagtgcggcacaccgtagtagtgcggcgcacactattcaggcaatgaacggcttactgattcttgactacatgcttgcttcccgtaaagatattgataccagccgtatcggtgcgaatggcggttcgggtggaggtacccatactgtattgttgagcgtattggatgatcgtttcaccgcttcagctccggtggtgagcctggcttctcacttcgacggtggctgtccctgcgaaagcggaatgcctattcaactatctgcaggaggaacctgtaatgcggaattagccgctacttttgctcctcgtccacaactgatcgtatcggatggcggcgactggacggccagtgttcctactcttgaatttccttatctgcaacgaatctacggattctaccaggcaaaagataaagtaacgaatgtacatcttcccaaagagaaacatgactttggtccgaataagcggaatgctgtttatgacttcttcgcagaagtattcaaattggataaaaagatgttggatgaaagcaaggtcaccattgaaccggaatccgctatgtatagttttggtgaaaaaggagctttgcttcctgaaggcgccattcgttcttttgacaaggtagctgcttattttgacaagaaggcttttgctaatttaaaatcagatgcttctctcgaaaagaaagccatcgactgggtagcttctttagagttgaacgatgataaaaaagcaggttttgcagtaactgccatttataatcatcttcgtaaagtgcgtgactggcacaatgagcacccttatacaacaatccccgagggtatcaatcctttgacaggcaaaccgctttccaagctcgaccgtgaaatgatagcagattccgctatgccgaaagaagtacatgaaaggctaatgaaagatctgcgcagagtattgacggaagaacagattgaacaaatcctggataaatacacggtaggtaaagttgcttttaccttgaaaggttatcaggccattgtacccaatatgacggaagaggaaacggctttcgttctggaacagttgaaattggctcgtgaacaggctattgactacaagaatatgaagcagatttctgctatcttcgaaatttataaaaccaaatgcgaacagtatttcaatgagcatggtcgcaactggcggcagatgttcaaagattacgtgaataagcgaaacgcagaaaagaaggctcaaggaaagaaataaatgagggtaaacccttaacctcctacataaccggaaaatctccgggataatagaagaatataatagagctatgctttgcaactgacaaagcatagctttatcatatctaaagctatgctttagttcccctaaaacactgctataatttatttcttcacgattactaaacatctttttcgcagaaaatgtgttattttgtagatggctaacagaaatgtatatgatatggataagcaaaaagtagcattagtcctttccatgggtggagcacgtggaatagcacatataggagtaattgaagaattacttcgtcacaactttgagattacttccattgcaggaagttccatgggagcaatggtgggagcaatgtatgcttcaggaaaaatggaagaatgtaaagaatggctgtatagttgggacaaacgcaagatgtgggaattggcggatcttaccttaagccgggatggattagtgaaaggtgaccgttttattaaagaactgaaacaaattattccggacatgaatattgaagacctgcctgtcccttatgtagcgatggctacggatattgtccgcgatcaggaagtcaggtttgacagagggagcttacatgaagctattcgtgcgtctatttctatccctatgcttttccgcccattaagaaaagacggtatggtattgattgatggaggtattctgaatcctcttccattgagtcatgcgcaacgtactgaaggagacattctgatagctgtcgatgtgaatgcacccattgaaatcggaaagaaaaagaaaatgtctccttataatctgttgacagaatcttcgagaatgatgatgcaacaaatcactcgttaccagatagaacgttgtcagccggatatcttaattcaaatttccggcgatacgtatgatatgttggagttccatcacgcagcttcgattgtgaagacaggagcggaagttactcgaaacgtgttgaaagaatctcttggcaatgattaatcatgtggttgatgatctccattccttttcttcggggtatacggatactttcaccgaccgccaacatatcttcaatatccggatttcctttgttatttgctgaagtagcatgttcaccgtgatacccctctttgcagagagttaaatcataagcaggtgctaatgaccattttccttcacgacaaataaaactgaaatttttgacatggtcgtctttgttatctgtaagtacattaaacaccatgcgttggaacatttcatcaacttgttgtgaatcttgtgtcaaatatcctgttaagtgtaacaataccttgtaatctagttttggatttgatattgattcattgagtaacgcaccagcagtagcaatgtgtagtcgttttccattctctatatcaaaacgtttgctggcaaaatatttgccatctaataacttgtaatcaggaacatttattccacatttacgagctacttcattatatttatattccattctccctatatctttcggatcatatgtatggcggaatttcactaaccatgcaccttcacgatcatgccacaagcatttaggacggcagccaccggaattaccactattgaaatataaaatatcttcgccttcttcagatttttctgaaagtacttccagagccatttgttgtaagttgtccaagtcaggtagagatttttcttctccaatataagattccggcacgtaactaagtgctcccattcccgaaattcccactatacttaatcgctgaataggtgtaagcaaagcatcatttataccttgttttttgagtaaacgattcaacaaataacgaccatatccatcagggagactatcctcaaatattccaaaatttccccagaaaggttctggtttggcgatgaataaactagattctaatggtaagtctaatggagagatagaaaagcctgatatcagccatttcttatcgtattggaaagcgcaacatcggttatcgtgtgtcatggtaagttctcctatcttttgatcacgataaagtaccgataacttatttactaatttcatttcttcctcgcttcctgtttttatttttattgataacgtccaattcttccattgtactgtaaagtggttctgcaagaagtgcctttacgtctttggaatatcctaatgcttttgttaatgccacataagagctcaatgaaatagaaaacttctgttcaaacttagctatagtgggagaaggaacgccacttaacttggataaagcatctcttgaaagtcctttctccaatcgcctcttttgtaaattgcaggcaagtaactgcagaatatcttcgggcgtatctatatcaaagttgtataataaagacatatcattgtatctgataagtaacaaatatgattataatagatattattatatctgttacaaagatagtgtttcactttgacttattcaataaaaatagcagaaaaagtagcccacatagctttttagttctgttcttacaacacggatatcagataactcgtaaggatagagaaactataagagacaagtgtgaatatgtagtatataaaaaattagccactctctcaaggctatcttttactttatatgaacaaggacgtcctgatttgatagcggaattatttaattctgttgattcttttataaagtcaatttatactattgagtctttgttatctaatacttcggtatattttgaatataaaaccaatgtatggctttgtattgctaataacgcaattactaattatagagattattggatattttgtgaggctgcattgaaaaaatgcggaaaatgggaggaaatatataaaattagttcattcaaggcaatatacaatgcaatagataaagatgcactattagagtgggaaaatcaaaaacaatatgagattctgaggttactatatccacagttggaagtgcctgatattcgtataaaaggaaaaacagttagtcttttagaacaggctgattctatttttaagaaatcggaactatcagacacttttagttctttaggttatgctataagaaaacagcgtccggcatggggatgcaacgatatagaaggtagaacagctgaagaaaaggttttgtcattatggaatactcttccacatgatacttttttgatggcactactttgtctcaattctggagattcacatattatccttgagcaattaaaagaatatgcaaggactgatgttctggatattttatacagctcggagatacatcccaaattgcaaataggattagaagccggaacagtgggtaatttggattttcttttttcattatgggaattaggatatagatatcatacccaccaagaatggcaggtgcacggaaatataacaagtactaaacaaatgaaactttattgtttagacaagttctatgatatgagtttagatattgatttgaaagagataatgaatagtattgctcttagagcaatttgtatggtagaagccattaaaaccaatgatttgttctgcactagtaatcctaattggaaatcatatataaatggagtacgtggtgcaactttacaacatccattaaatcaatattggggatatattgatatggctttcgatgcttatcattttacagatgggcagagtatgagaagttatctttctcaaaaagaacccgggataaaattagaaaagggctctgaaaaaatagaaataaattcagctatttacaaagccttatctgttttgtatccagaagtatataacatgaattcgtaatgatgtttatgttgcgtccgaagatatataaatcatctttttcgtcattcccccgtcaatagtgatgttttctccattgatgaaatcattgttttcctcgcagagaaacagacacatgcgggcaatatcttccggtttacctacccggcgtgaaggatgctgtgaatggtcttccggttggagttgattataatcatgggtctgtatccatcccggagcaatggaatttacggtgatattccattcggataaagacaaagccaatgcatgagtcaaagaatagataccacctttcgaagctgcataaccttcacttcccggttcactcatcagataacgtgtagagcagatatttataattcggccgtatgggttgggagagggctgctttttacgatggatggcaagcagccgggaagtgatgaatacaggacgcaggttaatagaaagaattttgtcgaaatcctctacacttgtttctgtgatagaagaaaatttgctgataccgacgttgttgacaataatatcaatatcgttccattcggcaagaatggtttgcatacaactttcaagtgcgtttttatcacttacgtcgaccttatggaacatagccccggttgccttcgcagtctcctgtcccgatgtttcgtttatatcacaaaaggcaacttgatttccagccaggcgaaaagcttctactattgctttgcctattccttccgctccgcctgttataaatactcttctttttgaatcctccggttttgaaaccgttgaagtgtgagacttcgattcagccggacgtactgctgttagtttcttcttaccatatttttgtgcttgtttccaagcagcttttcgggcttcgtattgttcctgttgtctttctatgtaattatctgccatcgttattttttatttattggcaaatgtaaagtataaaatggataaatacaagaatcgaccgctcttttgcgggcaaaggagcggtcgatttcattcagatgatcgttcaatatttaaaacttcgtcggatctatctctgcatatttaattcgttgacggcgccatgtataaatggcatgcagcttcccgtctttcccctgaataatgctagggtaagagtattggctgatcggactatcttctaatgtaagaacaggctgccaattgataccatcttctgaaacggccacacagagcggagtacgcggacctttcggagttccgggcaatgtagagaaattattgtagataaggatatgtctaccgtctttcattgtcacggcatccgtaccggaattattattcgggacattcagcagcgttactttactccatgtgtcaccattatcactgctccacgcagttgctacctgtgcgttacgtgtacggcagagtatctgtaatcttccatccttatgcttcaaaatactgggttgtattgcataaacaggtttggctccttctccttcgatcgcttctccgccttcctggtcatccacattcacacctccctttttacgattttgggtggggacagataactcggcatccagtggtccgaccatcttccaggtcttgcctttatcatcggaaatctcgaaatggacacgccatccgttacttccttccgtactggaaggacagatgatacgcccattgatatattccggtttattcttaataggtccaagaaaacctttcggaagcgcttcgcgtttgctccaggtttttcctccgtcgcgtgaacggacaagccatcctgtccagtcgctcactttcaaacctattttataaaacagaatcaggtcacctccgggaatctggaaaagaaccgggttccagcaagcttttctgcgggcaataagtgttccttttgcatctttcaccggggtacaggttgaatcgattccggctaatactgcttgtgagtctttaagtgaaaacacaccgtcggcagcaactttgggggcagtccattctttagagcctttaggtttacgacatacccagatgcaacaatccggattgcgctctttggttcctccaaagaaagaggctacaagatcaccatttttcagttctactatcgtagctccgtgacattcggggaaagaagcgttttcgtataggaactcatcacttagaatagccgcattccgggtgggaatgtctacactgaaatgatattttcctgatccgattttttctttccgtccatccggaagatgtacttcccccgtcgtattggcgggaagttcgatatcccattccaaatgtgtgggagtctttgtccatcggctggttatttttccgtagatactcatgtacgatgcatccacgttactcaactcctgaatttcaaaagccggctggaagacgatatgcttgtaaccggacttccagcggtccgcacggatacctgccaagttattgaagcaccaaggcaataagtcacctaaaagcatcacgtgattaccgctattcatttcaggatttgccgtatcaccgttccataactcccaaatagtggtagcacctttttcaaccatatatccccaggaaggatatgttttattggtagccagtagataagctacattggcatgaccgcgacggctcaattcacgcaatagccattgtacaccgattactccggtacttatatgtcccttgttggttgtaataatggaagttacggcatttttagctacttcattgatgtagttctttggcactagaccaaaagcaagtggcaagatattggcagtaactgtgttgttaccatagaaaatactgtccggatataaggtatgtcccggtacgggagaagtaccttcttttatgtgtagaaaacgggcattgaatgcgtctttcatgcgatgttccaaatcttcccattcttctgcgtcagctttcagcccttgcaggcttgcaaagcggtgcatcagttgtaatacctttagataataagccgttgcgatcaaagctccgtcagtcttgcgggaagggtccttactatgaattaactccagtgattcgggcggaacgcaccagtcaccatatttatctttggtgatgataaaatcttctgtcatgtagtattcccggatatgagatacccacttcttgatagccggataattctcttcgatcggacgtttatctccaaagtttgtgaaaagcatgtcgcaggccattggtaaagcggcaggccaggtcacattgtccgagtagtagttccagtatgccggggctacatcaggaatacagccgtcttcccgttgtgcttcgcggatgtcacgcgtccatttggtatacatggcgtaattatcgaaaagcatgctttctccccaacagcccataatacggtcacccaaccatggttggcgttcattccgttgcggacagtcaaccggcatccctttatagttgctccggattccccaaaatgcattgcggataatcttattcagagtttcgtcagaacagttgaaagtaccgatatgctccatttcatcttctactacttcggcaacgaaatcttctgccttcgcattcggataatcgctgacttctacataacggaacccatgataaataaagcgaggtgcccaggtagcatcttttgtttcgcgtccactgacaacatatacatctgtagaacgggcatccctgaagttttttgtataaagttcgccattgtcttgcagactttctgcaaaacggagacggatgctatcgccagcctgtccttttatccggaaacgtacccagcccgccatattctgaccgatatccaggatatatttgttaccaagctttttaatagaaacgggcttcagggtttctgtaactttcatgcctggcatcatttgtgcgcgcaatgttcctgaaggaatactgacacgttgggccggcatccagtttttgtcatcatatccggtttgagtccaggctcctagctctttacgggcatcatattcttcgccatcatattcattattgctacggataggaccttcagtagtcaatttccatgaagtgtttgtagcaatcgtttctttgctgccgtctgcatattccacaatcagattcaaccggagtttaggataaccgaaagtcggtatcttatacggtttatagttctgacgcatcgtatagaagcgaccatttccaagagttactccaatagcattttctgtttgaagcagtgaagtaacatcgtatgtgttgtacagaattgttttccggtagtcggtaggagcaggtgccagtacttgattgccgatgcgttgcccgttgataaacaactcgtacaatcccattccggcgatatgtactgtggcacgtttcacatctttctttactgcaaactctttacggagataacgggctgccaaacggctccattgtgtttcgctgtctccgggagcggccctgtccaagccgatccattgcccttgccaatctgcttcattaaatagtccggtggtccagaaagccggagcactccaatttgttgcacctttgttggtgtctattttcactttccaatagtagggagcattacattttaatatttttccctgataagtgatccattgggaagcgtcagattcaatctttcctgaatcccaaatatctccttttccttgttccaatagctccggggaagatgcgacaagaatgtgatacgcagtttgtatcacattctgttcatccgattcgatgcgccaactcaatcggggttggcgcacatcgatacctgccggatttttcaactgctccgttcgcaggtcagtgatacctatggctgcgtatagtgaacctgcaaagagcagaagaaagaaaaatgatactattcttttattcataagtatgttctcataattcgtttatataataaatttaggcacggattgcatggattaacgctgtcgttttacttatctgtcattctgaaagccatgaaatccgtgtaatccgcgcctaataatacaaaattatttagcccatttttgttgtgcattgggtaattctgtccagtccttctctacatagttcttactactgtccactacaatcagaatatgatcgtttccactgcaataaccactgtcgtgttggaatttgtgcactccgttatcaaattctccgatgtattccagtttaccatctttcgtggtgtaccaccaagcattctttttcacgccgctaatcttgctgaaatcaacttccatcggacgtccggtatagttgtataccatcagataatcatttccacgtgtagcgatagcgcggtcataacgttctctattctgtcctgcgatgatagactgatcaggtatgcgttcgaagaacgggaaagtcaacatcaggtttttcagatacttcatctgattgtagcccggatcattcaaagcatcataccaaggcttctttgcaccataagcaccacctacacccggtttgataaattgcatgatggaattatgaccgtaagtatgtccgaaagaacctgcaaatacagaccaataagcataacgacgtacgtcataatccttccacaacagttcgttttcatcgtgcagaccatgaggtatttcttcatagatcggttcaccgtcaatcacaggcttcatgggtttcatggccaggctgcgttctacaaaacgccagttatcttcttccgtattttcttcgatagggtagtcaccatctccgaaacgttgtccatagcgacgatgtccgctttgaaacatgttgaaatccaaccagggagcgttattgaaccaagttgcggaagttgttcttccacgtggatggaatgtcatcaggtgatttttgtcgatagctttgatagaggttgccaaagcttcccattcagcggttttcacgtcgccacggatatctccaccgataaaccagataatattcggctcgtccttataacgctctgccaaaaacttgccgtatgcttttgcctgttctacagtcatctcgccccggttcaccgggcttccccaaatgcagaccatgccgatatattgtcccttcttggctgctgtacggataatgtaatccatgtgatcccaataaccatatacgcctttttgattgatgtttttgaagttgtatccgtcaatcatcgaatattgtccgtagatattcatagacggaacattattcaacgtttgaacctgaatcacgttgtatccgcgacgtttgcattgttccaggtaatattcggcttcatcccggttcaagcgttcgggcaatagccaaccggtttctcctaaccaaaagaaaggagcaccgttttcgtgtttcaggtaacgtccctcttcggaaactacgagtttgccgttgtcccaggggatatacgtcttttgtgttttcttctgtgctgcagccgaagttgccattgtcaatagcagcaacaaaaggggaagaatcttgaattttctcattgtattttatcgtttttagtttatttctttgtcattttctcatactcaatagcagccaagatgaatgaacctaccgatttcggatcattttctatgatcggttcactgatataatactcaaatgagccgtcacgatatctctttgaatctccgcccaatcctgcaacagcacagcaattggtaattgtatagctgccatcctcttccaaacgggtaaatgtctttaccattccgtcaaaggctttttgtgtcggttcgatatattcgttgccaatatatcctttattgatagctttggcaagcgtatagataaacagggcagtggcagatgattccaaataattaccttcacgtgctccctgatcggttacctgataccaggttccggatgaaggatcttggtatttcacaatcgcttttgccaatccctgcagaatttgtataatgctgtcgcgtccggcagtttcctgtggcaggaagtccagtacatctacaatagcagctccataccatccgatgctgcgactccaaaaattaggagagcaacccgtttcaggatttgaccatttctgttcgcgactttcatcccatccgtgataataaagccctgttgcaggatcataagtcttgctatttattagaagaatctgttttgttgcttcgtcaaataaagcgggttcattaaaagtagccccatattgaaccagataaggagaggccataaaaattccgtccagccacatttgatgaggatatctcaatttatgccagaatcctccctcactggtacggggttgctctgccatttgcttgcgcaaagtatccatggctattttgtaacgttcgtctccggtctgtgcgtaaagatcgaaaagaatctttccaccgttgacattatcaatattgaatgaaagatatttcatggttttgatatgtccgtcagcatcgatcagactatctgcatatatcttggcatactcataatatacgctgtccccggtatgtttccattcttccaacatggatttcactactaatccgtgggtatatccccagcgtggttttttagctttttcaatcatccagggttcggggaaacgtttcatttcggagcgtgccatgcgttcactccatttttccgtttctgttttttgaggtgctgcacaagctaggaaacaagcagttccacaggcgacaatcagtttcaataagtttttgttcatatcggtcgagttattattttccaatcaatacatattcttttcctgctttggtaggtaggtcatagaggtatgtctctgcaatttccactttgttcaagttggccttttcgttaatcaatggctccggaatggtggggactgcataaagagggttcggattttcacctttggcacgcttcaagccattcccggttaatgggttgagcgaacgtaaacgacaatttcctcccttatgagatttgacaaccagtcggctaactttcccgtttttccaactcaaatcaagttcgaaacctccacgggcaatgattcctttgatagaaccttctttccaaacggtaggcagtgcgggaagcaaatatataaaaccgtcgtagctttgcatcaacatctctgcaatgcctgcggcacaaccaaagtttccatcaatttgaaatggcggatgcgcatcgaacaggttagggtaggtgcctccttttttcttttcattgcgtacgagagtcagctggtcagttatcaacttgtaggcgtggtcgccatcaagcaggcgtgcccaaaggcaaactttccatcccatgctccacccggtcgacgggtcgccacgatgaatcagagaagtgcgtgccgcatcgaatagttcgggggtacggtaaggggaaatctgattgctggggaaaagtccgtacaaatgagaaatatggcggtgcacatccttcggatcatcccagtcgaacatccactcctgtaattgtccccaatgtcccacctgcatgggagccatttctttgagacgttgtgtcagatgagaggcaaactcctgatctgtatccagtatttgagaagcagatataattgctgtccaaagatcgaaaatcaattggttgtccatggtgcatccggcagctgtagtagctttcccgttacttcccgaatgtacattctccggtgaattactggggcagactaccagccagttgtgtacgggttctttcaccataatttcatcaaagaaacgtccggactctttcagtatcggatagacagaacgcaggaattccacatctccggtgtatagataacgctcccaaagatgtcggcaaagccatgcgccaccactgggccacatacccgaaggagctttgtcaactgctcctgtaatacgccatatatccgtgttatgatgcaacacccatccgttggctccatacataatcttagccgtctcttttcctgtgttactcacttcttttatcagacggaataacggttcattcagttcacttagattcgttacttccgaaggccagtaattcatttccaaattgatgttacaagtatatttgctatcccaggaagggaataatttgtcattccaaattccttgtaaattggcgggttgtcctcccggttgggaagaacagatcaacaaataacgtccgaattgaaaataggtggcaaccagatgtgtgtcattggtgtttttgaaattctccacacgcttatcggtggttacattcgcatattggtctcgtcccaaatcaagagaaacgcgtgtcagatattgtcggtaaaaatcaacatgattcttcttcgattcaatgaacggatgaaccattgctttcgccaaataattcttagcccgctctgtctgattaccggtgatgtcttgataattgttgaagttggtggcaatagatacatagaccgtagcttcatcagctccttcaacggaaaggacaccatcggcacaagctattttcccacctttatttttagcagtcaatctgccttgaaattctactttccctttgagcccctcatgcaaggaagagactcccgagagtgtcacacagtttccctcttcagaagcgatcataacatcctggtgaggcgaagtgagttgtgcattgaaagtaatttgtccgggacgattggcggtcagtcgtaccattactacctgatcggtaaatgaagtaatcgtttcgcgttgatactgcactccgtctacttcataacgtacgattgcacgtgcggaatccagacttaattccctgtaataattggaataacgtgtatgacctggaaaagcgattcgcaggtcaccaaaactttggtatggcattcctgaattagtctttgccattaccttttctgtggccagtgtctgagcttcaaggtattttccggcaaagaccagctcacgcactttcggaatatattccagtgcatccggattggcgttattattgggacgtcccgcccaaatgctttcttcgtttagttgtatttgttctgtgcctggtgttccatataccatggcccccaaacgaccattcccaaggggtaatgcctcggtccatacctgtgcgggacagtcgtaccataacttgtattcgggtacagaagacttctgttcctgcgcctgaatacaaccaacagacatcgtgacgaacagatatccgattaatctctttttattcatttccttccaattgcttttatacttttataaaaggacgattgaaagggatttttgtacccactatgcaggcagtaagaaagggagaagaataaaaataagttagcaaacttaaatgcagttataaagccattaaaatagatgaatttcgacaaacaaacagatatactgattgttgtcacattaaatcattcgtttttttattcacctaaaaaatacagattatggcaaagaattctcccgatgaaggaaaaaacatcaaaatggtagaaaagcaggcggttgaagcctctatgatcaacctcaaagagtaccgggcaaaaaggcaattcggtaaaacaccggaaccgatggcggagacggtggaaactcccaatcgaatgcctgtttttgttgttcagaagcatgatgccagtcattttcattttgattttcgtttggaagtggatggagtattaaaaagttgggtggtgcctaaaggtccttccatgaatccaaaagataagaggttggccatagaagcagaagaccaccccttgagttatgcacactttgaaggagttataccggaaggtaactatggagcaggtacggtggaaatatgggatagtggaacctatgcttacgttggtaataatcgtaacatttccgctgccattaaaaatggaatacttgaattcaagttacacgggcataaactcaaagggctatttgtccttatacataccaatatggatgatcaggataaagactggctgttaataaagaaagacgatgtatttgcggtcactcacgtttacgatgcgaagattattccgtcttatgatgaggtattcctgtaaatcatgatctgacagtacatatctgaagtctattattttcaaattatatacgcggctttataattctacttatttcattattttaatgattaagtggaattatatgatcgtatggctgtgttattgtatgataaaatatttgacaatcactacgttttgccaaataaaatgatgattttagaatctatcccttgatatttcggtaacaaatgatattgttaccacttttgatagaaaacacccattgcttttgttagaatccacctcatatgtggacgttgaaaagtttatacttgttccggatttagacacgttaaaaggtcatcaaacgtgttttgctgaaaatgtaagtattaatcaaatcctatataagtatgaatgattgttacctgagtttattattaaactttcgcgctttactttctatagatagtggagccaatttagtaaacagtaaacaagctattggcgtaattttgcctgatttgtcattgcttggttatgcagttcctgtagagagtttcggcattgggctatttattgttttgtttgcgtatcttgcggtagagtataatgttcagttgttgtcacatgaaaaacttaagatagctatgaacatgctccatactacgcataccccgttgatactattacgaaatcaattggaagaacttaaaaccggtaatcttcccgaatcgctttcccaacaggtagaagaggcattggggtataccgaatgcatcatatattgcaatcagaatattgtaacccttaataaggtaaacaaaaaaatacttcctaagacatcaacagtaaatttggaactctcttcttatattacttctattgttaatcaatgtcgtccttatgctgattcgcgccgtatacaactgactgtcagcgaatgttcggattgcgtcagttgcagaatcaatgaaaacattatgacggcagcgcttcagcatcttataagcaaactaattttgggttccgatttaggttgttgcatatcaatcaatataacacatacaacagattcctggcagttgcagattactaattgtgagatagcagacaaaagagtagggaaaatgtttccttttattccggtcatatttcctatatatgggtatagtgatttgtggactgtaagaaaaatcattcgcctgcatggtggaaaaataaacggatatagacatggcaaatcatttgctttccaaattgtcattccaacagattgtcattgccggaatcaggaatgttcggttatcaaacattcttcaacaaatacgaagaataaggctaaaaaatcttctgaaagtgataaagatgataccccgaatgctaaaacaaaagatacatcccatatcttattggtaatggcggacggggcattcaggaattatttaaggaaagctttatcgcggtattttcagatttcagttttgaaagatcctgatttgctgaaggatacagtagtccgccaaaatcctgatgctatcattattgacgataatgtaaacggaacaaatggagatgcacttagtttccggatcaaaacagataaaatgatagggtatataccggttgtccttttgataagggcctttgataacgaaagttatttgtcccatttaggaagtggggcggatcgtctggaattacgaacagaaagcatttgcaggctaagggcaaacatacgtatgcttgtagaaaaccgcatggttttgcgtgaacgggtcaaattgtttttgtcagatgctgtttttccaatggtccccaccaaagaagaaatggaaacagaaaatacggatcagatatttatggataaagtcaataaaatcctggaaaagaacctctctactgataaatatacaatagataaattaagtatcgatataggaatgagccgtactgctttttatagcaggatacgagagataaccgggaatcctccggaaaattatatctattcgttcaaaatggacagggcacttaaactgctagcctcccaacagtacactgtttcggaaattgcaggaatgctgggatattgtgatgctaaatattttggaaagaagttcaaagacttctatcatgtatgtcctacggattacattaaaagtattatagggtaaaagaatatatagtacatattttcagtttaactgatataaactaaaatatgtactatattcattgtaaatattagatagagaagaacatatagctttgctaattaaaggaaacctatcaagtatttgaacttagactgaaataatgtgttatataacaatatacgattcaatctgatatatagaaagaccgttctaaaaattcaatcatttcattttcgtgttctttagccaatttcattgtccaattttgatagttaaagtcagcgagtttacacattaaaaacatcttaatgctttgcagtgatttgttgctgatttgctcatggattcgggcaaactttatttgtatatggtcattactttgttgtgaattgaaactttgagaaatcatggcaagattgccaaatgaatgtacagcttcttcctcccattcttcattgtgtgattcgtcttgaggatgcagatgttcaatag

SEQ ID NO: 8210 - DNA, 22088 bp, Unknown
  gut microbiota DNA sequence
gcgcgttcgtcagattaaagaaaaagcaattagaagacttagacaaagtaatcgtagtaaattgctcaaatcttacttgggataagtaaggaatatcagtttctgaaaaaagaatttgagtcgcataagtcgcacttttcatgtagaagaatgtacttatgcgactttttatataagtcctattctataatttaatcttgtgctatgtgagttttatgaagaaatttgttctaatatcatttgttctggttgctttgggagcaggggtgatggcatacgcaagatatgcgacattgtcttctgacacggtgcctgttaaaatagagcaacgtttgcgtgaaaaagcgcaggcgggaagggcttattgtgataagaacgggtataatacaaattattgctttctggtagatttcagtattcattccggtaaaaggcgtttctttgtatgggatttcaagggagattctgtgaagtatgcaagtctttgtgcgcatggatacgggaaaaacagtacgctgtccaagcctgtattcagtaatgtggaaggtagttattgctcttctttaggaaaatataaagtagggatacggtcgtatagtaagtgggggattaatgttcattataaattgcatggattggaagcaacgaataacaatgctttcaaacggtatatcgtgttacattcttatactccgatgccggaaacggaggtgtatcctttgcatcttccattaggaatcagtcaagggtgtcctgtgatatctgatgaggtgatgaggaaggttgacaggctgctcaaggcagaaaagaaacctgtattgttatggatttatgattaagaaatgctatttatttgagataaatcgaggtagtctcctcttttttgttacctttgcgaagttaaaaattatatgatatgaaatacgtaaaaatactatttgcaattgcacttgtgtttaccatgtgctccgctttttctctgaaaaaagaccattctaaaccggtttatgcttttggaatttctgcttcatttacggatacggtagtctatttcacggatattcagatattagatagtgcgaaggttagcaaagaaggattcttggttcatcgtgaattatatagttatcagttgaaaaattatttggaggataaccaactgcagcagaatagtacatgtatgatttacttctcggaaaacagaaagaagttggaaaaagaagcaacgaagattctgaataaatataagaagaataatagaatgacggtatcgcgaattgattcagataaattccgctttacgaaaccggaagagtaataaacaataacttaattgttaatataataagagatgcaggtttgcatctcttatttttttatctttgcctcgtaataaacttgaaatctaatgaaaaagataaaaatattctccttgtttgtgtgtttggctatgctggtaatcgcttgtcataatgacgatgatgaaagaggagtccagatgcgtacagttcttgtttatatagcaggtgacaattctcttcgcagctttgccacagaggatttggcggaaatgacagagggaatgcagtctgtagatgataactcttataacctactcgtatacattgataccggatcaagtcctaaactaattcgattgaagaaggataaaaagaagaatgtcgtacaggaggtaatcgctacgtatgaaggacgaaactctgtagatgtctctaagatgaaggaggttatcaacacggcattttctgaatatccggcacagagttatgggttggttttgtggtctcatggagaaggatggttggcaaaatcgcagaataaaacccgttggtggggacaggatggtggttcaaattacatggatatttccgagttaaaagatgttctgcgtaatgcgcctcatttgagttttcttcttttcgatgcatgctttatgcaatctgttgaggtggtctatgaattgaaggaacatgcggattacataataggctctccgacagagatacccgcaccgggtgctccatatcagaaagtagttccggctatgtttgccaataatgcatcggctacggacatagcaaaggcatattttgaattttatgcagatgaaaatctttatactggcaaattgccatataattggggcttaggtgatccctggacggcaggagtctctgtttctgtagtgaacacttccatgttggaacaactggctaaaagcagtagtgagattattccgaaatatattaagggcagacaagcgatagccacatcgggcatactctgttatgattgtcggtccagtaagtattattatgattttgatggattaatacgttctttaggtagtgagactagcgaatatgaggcttggaaagctgcttatgatgctgctgtggtttattggaagactactcctaataattactccagttatggcggtagtttctcgatgaatggctctgcaggactttctacttatatatttcgtcagtcgtatgaagaggagataaatcctttttatcgtcagtcgatacaatggtactccgctgccggatgggatgagacaggctggtgataattaccatttcaatattctttagaagataggattctaactttttgtgaagatagtgtgaagaataagcaatccttatataagtggttatatgagacgtatgagaacgatttgttttcatacggcattgcttttggcattagtaaagaacttttagaagatgccattcacgatgtttttttgcatttatatgagcgtgagcacaaactttgggaaagtcagaatatgaagttctatctgttgaactgtttgaagaaccggattcggaccattaagaaaaaagaaatgaataccgaatttctggaagaaggttctgataactatagtttccttattgaagtgaacggctttgaactcatagatgaagaaaaagaaagagccgctatgcaaaaacagctgaaaaagatgctggatagccttacagaccggcaacgggaggctgtatatcttcgttatacccaaggacttagctatgaggaaatcgggaaattgatgggaatacaacctaaagcagcacagaaattagtgtatcgggctatcgaacaaatgcgtaaaattcagcctcaaattatttattttttccttttcggttattttctttaattttcgtgggggtatttttgttctttgcgtgtttttaaagtgaaaccgtaaaaagaacgagtatgcattcagatcgaatacccgaatcgacaaaacaatggctacaaaatgaagacttcatattgtggtgtctggctcctacccaggaatcggaagaatggtgggttaattatcaaaaagagcatcccgaagatcaagcatccctacaggaggcccgcaaaatcatattatctgcccggctgaatccggttcagcgcttacccgaagaatcagaaagattgtgggcacgtatagagacaagcatggagcgtcgtgataagagacatcgttttatcttatttacccgttatgctgccgcctgtgtactaatattaggtattgtttctttctggttgattcattcttttcagacgtccggaactgctgatgatctgcttgtcaatgtgaaagcagatactctgtatcagaaagtaatgctgataagagatgatgcggaagcgattcagatagagaataatgccgtcattacttatgatagcaatattactattcaatccgatggtaaggaaacagagataatcaaagagggagcggttcaacccggaaaacaaaatacactgatagttccttatggtagccattcatccattgtattggcagacggatcgaaagtatggattaattccggaagtaaattacgtttcccttcctcttttggtccgggcgaacgcaggataaaagtagaaggagagatttatatagaagttgccaaagatacttcccggcctttttatgtagagacaccccaactgacagttaatgtattgggaacaaagtttaatgtgtctgcctatgctgatgatgcattgcaatccgtggtgttggtagaaggaaaagtaaatgtaaaagcaaactccaatgaagattttgtccttttgcctaatcagcgttttaagttgagtgatgggatatccggcatcgacgaagttaatgcttacgattatatttcatggaaagatggcgtacttcagttccggggtgagacaatgaaagatattatccaacggctaagtcgctactataatgtatctatcacatgtacgccggaagttgcgcaaaagtgtacaatgggaaaacttatcttatttgatgatatagaacaagtcatgaaaaccttctcgttgctgtacgatgtccagtgtacaattgaagcgggaagtataaaaatcgagtaataaccctaaaaatttaatgcctatgaataaaccacagaaatgaagcctttgtaaaaaagaagttcggaagagaggcaactcttccgaacccgtgagatttaaatttttcaattacttatgaaaaacctaaaaattgatacgcaaaaatatggaaaattcctattacaatcatgcaaatagggcatattttctttgtaaatcatatctgtttgtgaaattttttgttatttttctatttatagcgaatgtaactctcgctaatggaaatggaacgagcgaactctatgatataaagaaagggactctactggaatattttaaagatatagagaaagaaacaggctacgttttcatctattcgaaagatatccgacctagtttaaatcaagttgtcagtgtagatctatctaggaagaagacaatcacagaaaaattgtcagccttgtttgaaaagacaaatctggtatatgaaataaatggaaaacagattgttgtaaagagaaaaacggcagtgaaaaagaatctttcttcacagccacaggaacctcggagaataaccggtactattaccgatacaaaaggagaaccgattatcggtgccaatatcaaggaagtcggtacatttaacggcataatttccgatataaacgggcgctttgccttatctgtaaatccgaatgcagttttggaaatcagttatatcggttatgtcacgacgacagtacctgtaaaagacaataaagtgctttctattgaaataaaagaagccgagcaaagtctggaggaagtcgttgttgtcggctacggaaagcagaagaaagaaagtgtgacagcatctatcgcttctatttcgaggaaagaactggtacagacacaacaatccaatattagtaacatgctggtaggacgaatgccgggattgattgcttttcaaagaagtggtgctcccggcgaagacgcttccagtctgttaatcagaggtgtcagtacatttacagacaacacggctcctttaataatgatcgatggcatcgaacgaactaattttgacggcatagatccgaatgaagttgaatcattgaatatacttaaagatgcttcggcaacagcgatctatggagtaaagggagctaacggcgtagtattaattactacccgtaaaggggaaagagggcgtccccggttgagctattcgggtaattttgctttgcagcaatctacccagctccccagttatctgaatagtgcggattatgcaactttatacaatgaagctttagaaaatgactcccgggtttcgggttctacctaccaaccgaaattcacggataaagatattgaattgtacagaaatggctttgatccgattttgcatccgaacactaactggatagacgattttcttagaaagttttctacccgcactcaacataacatcaacctttcgggtggtacagaacgtgtgaaatactttatatcgggaagttatttcgatcagaccggtatctataaacataccaagatagattcggatcatgatgtaaatccccgtaacacccgttataacttcagaactaatttcgattttcagataacgcgggacttttcggcaactgttcaaatggccgcccagataggcagagtgattactccgggctccggtaacagtggaatctggcaagctatttcttttgccaatcccttgagctctccgggattggtggacaataaaattgtccgcatacaggatggattgggaagcgtcaatccctggcaaaccttattaagcaacggttatcagaaagataatagaaataacatcaatacaacattacgtctgaattatgatttatcatctttgctgaccaaaggtttgtccgtacacgggagtatcgcgtatgatagctattattacagccgtaagaaatattcgaaaacctttccttattatcttgcgcgccgtgatgcggaagatccggattacatctatctgatcccccaatcagaagagagtatctggtctgtaagtaccggatgggataagaaccggaaagtatatatggagtttggaattgattataatagaactttcgggcttcataaaacgacagcacttattctgtataatcagagtaaatactattccccctcccttcaatattatgtacctaatgcttatcagggattggtaggacgattgacctatgaatatgcctcccgttatttggcagaattcaatatgggatacaacggaaccgagaattttgccaaaggcaaacggttcggattttttcctgctgtttcattaggttgggtcatcagtgaagaaaagttttttccgaaaaacaatatcgttaaatatctaaaggtgagagggtcctacggagaggtaggaaacgatcagataggtggtgatcgatttttgtatctgccgtcttcttatggagcagcgagcgattcgggtgtgaacaagtataatttcggtttggcttccaatccgtatacttcactgatgattgttgaaaataaaatcggtaatcctgatttgacttgggaaaaggcgaaaaagatgaatgtcggtgtagatattaatctgttcaataattgtctgactgcttcatttgatatattcaaagaaaaacgaaataacatattagccaacagatcaacatcccccatgattataggtgctaatcttcctgcatataattttggagaaatggaaaatcgcggttgggaaatggaccttaattttagacatcatatacaagatttccattattgggcacgcttcaattattcatttgcgaggaatgaaatcatctacatggatgaagtgcagaagagatatgattatcagatgactaccggaagaagaaagaatcagtttttcggactgatctttgacggatactataactcgtgggaagaaatcaatgcattagaccgtcctaaaagttcatggagcgggaatcagttgcaaccgggagacgtcaagtatgtagacgtcaaccaggatggagtgattgatgattacgacatggttccgataggatacacccccgtaccggagattatttacggtttctcattcggagcgcaatataaaggatttgatttctccatcttatttcagggagccgacaatgtatccattaaatatttcggacggtcgatgtggcctttcgcgaaaggagaagagagtgcgaaatctctgataaaagaacgttggacacaggaacggtatgaggcaggagaaaagatcacctttccccgtttgtctctgaatcccaacggagaaaccgatcacaactatcgtccttctactctttggatacgggatgccagttatttgcgattgaaaaacctcgaagtaggatatacatttaccggaggttttgtcaaacggcttaacctgaatagtgtaagattatatttcaacggttccaatttattcacgtggacagatgtggtagatctggacccggaagcaccttcgagaagtggaaatgttgaaatcaatacatatccgttgcagaaagtatataatattggtcttaatataaatttttgataatcatgaaaagaatagcatatatatgtgcaatacttctgtcgtctgtattgatgttttcgtgtagtgactatctggaagctccgccctctgtcgatttggatgaagacggtgtctttgccgacaggactttgacagaacaatacataacaggcatctatgcagaaggtatgccgctggggttctcgatgggaagtagcgggatcgaccgtaaattgtgtgcaacctcaaccctggcaggagcgtgtgatgaagccgaacaaggtgcaaactgggggaagggcaatgcctcgtggaacgtggacaatcataacaacagcagcatagactgggatgaagacccccgtcacaacacccgttggcagacattacgaaaatgcaatatcgtgcttgaacgtattgacgaagtgcccgatgatccgggagacgttgattttaagacacgttccagaggcgaagcctattttatgcgggctttggtcttctgggaaggagtatatagatatggtggactgcctataatacaccgtagaataaatccgtcggaagatggtaaactaccccgtaatacattttccgattgtgtagactccattcttgtcgattgtgaccgggctgcctccatattaccggactattatacgaattcgatattggtgggacgggcaaacaggatagctgccttagccctcaaatccagagtactcctgtatgcggcgagtcctttgttcaataccgacgatccgtaccttcctttaagtggaaataatgacctgataggatatggaaactatagtaaagaacgctggaatgaagctgctaaagcagccaaggcagccattaccgctgttgaatcttctggctattatgacttgtacgatgagggaacacctgaaacaaattacgaacatgtgtggactgctcccgataacaaagaaataattctggccaacaaaaaatatcggaatttcacaacaagcagtcatcccataacaagcaatataccggcatgggcgggaagtagttggagcgacggcggtctttttacaaccttcaatttcgtgcgtttctatgagaaaaaagacgggaaccaacaaacatggaatatggatggtggcgatgatctgcttgaaaagtacgacgaactggaccctcgttttgcgcaaaccattgcagcacatggagctaactggaatacagagattggaattcttaattttctgcccggtggagcccacaatgtagccaatgataaaacgaaacacctggttcgcaaatgggtacctcgcgtactaagagcaacggctccgcgcaactccactaatatggactggattgtcttccgggtagccgaactctatctgaattatgcagaagctttgaatgaatattatgaaactcccccgaaagaagcattcgatgcagtcctgaaagttcgtgaacgctccggaatgccgggctttccttccactttgaataaaaagcagttcagggagaaactgcgaagagaacgagccgtggaactggcttatgaagatcatcgtttctgggatataagacgttggctgatagccgatgatgaaggtgttatgaaaggtgccatgtatggattgcagctctccgctgttacaggagcaccgggtaaagtacattacaaaccttatgtctttgaaaacagattatggagtgaccgttcttatttacatcctatcaagcagaccgaaatagataaagggtatatgcttcagaatccgggatggtaaatatgttcaatcaactaaaaataaaaggtatgacaataataaacagtatatacaaagggaagcgttatgctatacttttgactactattctcactttttatgctcccgttttgtttgctcaacacatagccgattctgcacttgtagaagtcgcctatgggcaacaaccggaatggaggcgaacaagtgccatttcttccatacgtggggaagatttgctgaaaactacttccgcaagcttgggaaatagtctgcaaggacagcttcccggactaacattgttgcaacaaagcggagagcccggctatgatttctctatcgcgaatctctacctccggggacgtacttcctatgcaagcggacaaaaaatgctggtatatgtcgacggtttcgaagccccgattgaaagtctgtccactgcggaaatcgagtctgtaacattattgaaagacgcttcggctctggctttatatggtatgcgtggtgcaaatggtgttttattggtgacaaccaagaaaggatgcgtttccgctccgcaagtcagtatccgtttacaaacgggaatacaacaaccgttgggcgttcccgatcctatcaatgcgtatgattatgccaccttatacaatcaggcgcgtgtgaatgacggattgcctcgtttatacactccagaggaattgaatgcctatcagaacaacaccgatccttacttttaccccaatgtaaactggaaaaaggccattttgaataatacagctcctttgagtatggctgatttaagttttaaaggaggaggagatgtggtgcaatactatgtaatgatgaatcttttgcagaacattggtttctacaaagacaccgataaaaaacgccgggaaaactcgaatgcctattatgcgagctttaatttcaggtctaatttgaatatccagataagcaaacacctgtctaccggactcaattttagcgggagtgtaggtaatcgctctattcccggaggcagcagttctgccaacggacttttgggagcgatatggagaacagctccgaatgcatttccggtgtacaaccccgacggatcgtatggaggaaatgccgcttttaccaacccggtcggtaatatcgtcagcagagggctttataaagaaaacagccggactttccaactgatttttatgcctaaatacgacctggagaaactgacaaagggattaagtgtcagtgccggtattgcctacaacaactatatggcggattcatctataaagaatcagaattatgcccgttattctctttccaaaggagcagggggagaggtgctatatacaccctacggcgctgattctcctttggaatccgatgaaggattccgtactgactggagccgtctgaactttaaggcacagttggattatgatcgcgttttcaagcaacatcaactcactgccagcatctttttcctgtctgatttatatcagaaatatggaagtcgtgatgacattaaatacttgaattatgcagggcgggtaacttactcttataatcaaaaatacataggagaatttgcagcttcatatacaggttgtgatgattatgctcctggaaaaagatatggattctttcccgctttctccgccggatggatactgtcgaaagaaaacttcatgaaaaatatcaactgggttgaatatttgaaactaagagcatctatcggactggttggaaacaatcagaatgagaacggacgttatctgttcgaccagacttatagcagtaacggctcctattttttaggtacagggtcgtcatcaacaggcgggtttcgggcagatatgattgccaatcccgatattagttgggagaaggaacgtgtattcaatattggattggatgcagttttactgaaagggctgtcggtagaattcgattatttccataaagaaagatatgatatcctgtcacagccgtattccactattcccggatttgttggagcctcttatggcgacatattgccttatatgaatgtaggtaaagtaaagaatcaaggtttcgagggtacgatcaggtacgaaagcagtcttaaaaacaacttcaactattacgttgaaacatcggcgtggtatgcaaagaatgaaattgtcgatatggcggaagaagtgaaactctacgattatcaatatcgtaaaggacgttccgtgaatactccttttgtacttgttgctgacggactgtatcaggagagtgatttcgattcgaatggaagtctgaagtcacatttaccggtaccgcagtttggagaagtaaaccccggtgatataaaatatatcgataaaaatggtgatggagtagtcgattccaatgactcctatcctgtgggatattctaatattccggagtggaattatgctttgaaaataggctttgaatggaaagggatagacgttgaggctttatttcatggcgttgccaatagagacatctatttgagcgggccgttggcttattcctttaccgacaatggctctgcttcaaaactggctctcgacagctggacaccggagaatcccaatgcttcttatccccgtttgtctacccggacatttgaaaacaattaccggatatctacatattggaaaagaaacggaaactacttcagaatgaagaatatccggattggatataccttcccccagtcaatagcaagagcgataaaattgtccagattgtatgtgtatgctaatgcgagcaatcttttcaccgtgagtcatcttgacggattggccgacccggaaagcagttctttgattacatatccgttgacacgttcctacaacctgggaataaaaattgatttttaataggtaagaacaaaaatataataattatgaaatacccaataggtttatctatcatattgaatgctcttgctgctatcagcatattgtccggatgcagtgattatctggacagagagtatgattcgtttatcgacaacgagatgacctttacttcctatgaacgtacaagcaaatttctagtcaatgcttatcggtatctgcctgatggtttcaaccgtatcggttccgaagctatgttggatgccgctaccgatgatgccgaacatgctaatgcctcctgcaacatccagcacttcaacaccggagcctggaattcaaggtccaatccggatgatttgtggaataagtattacgcaggaattcgcatagcgaatgaatttatagaaaatgtagacagagtgaatctggataaatacagactcgatccggataatcagaatgaatatcagaaccgtctgaatgacttgaaaacatggaaatatgaggcccgttttttaagagcgtttttccatttcgagctggtgaaacgtttcggacctgtacctgtgattacttctacactatccgtcaatgcggattattcggagactccacgcccgtctatggacgattgcatctcattcatctccagcgaatgtgataaggtagccgaagtgctcgatttaactccgggacgaggaatcgattcggatttgggacgtgcaacgaagggagccgcattggctttgaaaagcagagttttattgtatgcggccagtcccttgtatctggactggcagaatttttcggaaagcgatcttccttccgatatggagaaatggaaagctgcggcacaggctgcgaaagacgtaattgatctgggcatatattcgttgtatggcagttatgccactttattcaagaataactttcagaattccgagtttattctgatgcgtcgttatggaaacaattccgactttgaaaaatacaactttcctgtcagttatggtggggtaggcggcatcaatccttcgttgaatctggtagactcttatgaaatgaaagatggcagctattttagttgggagaatgaggaaaatgccgttcgtccgcaattctaccgggatgacaggttgaatgctaccattctgctgaatgattccgtttggaaaagcacggcggtagagaattgggacggtggaaaagacggtctgggcgttaccaatgcaaccaaaaccggattctatctgaaaaaatacctcaatgaagatgtgaatatccaaaccggcggaggaagtcagggacatatctggccgttgtttcgtttagcggagatttacctgaattatgcggaagccttgaacgaatacgatcccgaaaatgcggatatagcagaatacgtcaatcgagtgcgcagccgtgccggacaaccgaatctgccttccggattgacgcaggacgaaatgcgtgagcgtatccggcgtgaacgtcgtgtcgaactggcatttgaggagcatcgttcgtgggatgtaagacggtggaagattgcgcaagaaacactcggaggagatttgctaggtcttgaaatcacccgtaagaatcaggctcgaagagctgttacccggaattccgtaataccggctaacgaagttccggaaggatggcattattacgatggagacgaattcaatgatttggtcataaacaactcatattggggacagtatggaagcgacactccggtaggaaactcccagtatggacaacccaccggaaatatccagacttatcgtaaaaaacagattacgattgagaaagggagtggcggattgagctttgcccggataacagccaccaaggacgacaatccaccggctccgacattaagcactgccagtacgagagaaggatggtggtcgggagctttgtccagccgggataccgacaaatatggttatcaggggaaatattaccctctgcattcccgcattgagattcgtgcaaaaataccttatatatatggtatatggatgggaccgtggtgtcgtcattatgcaggagccagtgttgcggaacttgacatcgaagagtttttcgtcaaggaatttgagaatacggcttcaccccgccggcttagccaggctttacatttgcatgataataaaacaggcaatctgggaatcaacgtgaatgggtacggacgacatacagtgcttgattttgatccgggagcagacttccatacgtatggcgttcaggtagatccggacccggtttctccggataagcatgctatcatcagctacctgttggatggtaaagtaaccaatacattcaagacgattgactatgatgacagatataatacatttataaccaaagcaatagcggagggaagagaaaagcgaacctgggacattgcgataaccggacaaatcggaggaaagaatgaaaatggtatcggctatcccgaagacaggaatgccaatttgagaaacgtttcgatggatgtagattgggtacgtgtatttacccgggatgaaacagaaccagagattcctgaaaagccggaatatcccgtcgagaagtttgattattcccgtgctgtggtagaaaagagagtgtttgattctaaaatgtattggtatcccatacctgaaagtgagattctgcagttgaagaactggaaacagaatcccggttggtaaatcattaaaaagaaatatcatgttgaaaataaagattctaataatcatattttgctgtatcggggtggtgaaagcccaaaccgttattcctccttcatcagaaacccctcccggatggatttattacgatggagacgagtttaacggagatgtgattgactcccggtattggggaatatatggttcccaaaaagtggggcgacccacctataatcaggaaaataaagccatgcttcagacataccgtccggagcaggtctttatcgaaacccttcctacaggagagaagatttgtcgaattcactcattcaaaagtaaagatgcgcccagtcccgttcatcccagtgtgaagagcaagaccggatggtggtcgggagcgctgtccagcagagattccgatacggagaaatattatcctcttttctgccgcatagagatcaaagccaaagtcccatatctatatgggctttggaatgcactttggttgaggcattataaaggagctggagtagccgaaatagatatactggagttttttaccaaagctttcggggaaaatccttatccggccaaagcgaatcaaaccttgcatttgttcaattcggaaacgcaaaagttgggaatcaatctacccaaaggtcagatacgatatactgaaatcggagaggataagccgggagataatttccatgtatatgcggttcagatagatcccgatcctgttgataacaatcatgccatcattacgtttctgatagataataaagtcaattaccagatacatacccgtacacagttgggggatgcatatactgattttatcactaaggctcgtaaagagaatcggctggacagagtttgggatattgctatcaccgggcaggtaggagcatttgacaagttggatgtcggctatcctgcggaggaattgcagcaatttgatttcgatattgattggataagagtttatgttcgcgatccgcatacccggatcgtcggaaatagtaaactacctcatactccggaagcggattcatttgttaaagatttgctctcacggatgactgtggaagagaagatcggccagttatcccaatacgtaggccgtacccttttaaccggtcctgaatcagaatatttgagcgattcattgatagcacgcggacttgtaggttctgttttgaatatatccggtgcaaagacattgcgtgatttgcaggaaaagaatatgcgtcattcccggataaagataccgattctttttgggatggacgtgattcatggatataagacaatctttccgactcctttggcggaatcgtgtagttgggatttagcagcgatcgaacgagctgccaagattgctgcgattgaatcctcggcagccggattacattggacgttcgctcctatggtcgacattgcaagagacgcccgttggggcagggtagtggaaggagcaggagaagacacctacctgggaagtgaaatagccaaagcaagagtgaatggttttcagtggaatctttgggagaataattcagtattggcatgtgcaaagcattgggtagcttacggacttccccaggcgggaagagattatgctccggtggatatgtcggaacggactttgtttgatacttatctacctccttttaaggcttgcattgatgcgggagtacttacttttatgagtgctttcaatgatataaatggtattcctgcctccgcacatccgttcctgctcaaagacttattgagagggcaatggaatttcaatggttttgtggtaagcgattgggaagcagtgaagcagctggtggcgcagggagtggcggaagacgataaagacgctacccgtctggctttcaattccggcatcgacatggatatgacggatgggctctataataaatacatgaaagaactgatagaagccggtaaaatcagtatggaagatgtcgacaattccgtcagtcggattctgcatatcaaatatgctttgggactgtttgttgatccatataaattctgtaatgaagaatacgaatcgcagacaatcatgaaaaaagaatttctggatgcagcactggacatggctcataaatcggctgtcctgctgaagaatgacaatcatacattaccgctggcaaaaaatgtccgttccattgccgtggtaggtccgctggccgataatcagaccgaactgctgggctcgtggagagcaagaggggaagatcgccatgtgacgactgtattgcagggcataaagaacaaaatcggcggtaacaaaacgaaagttggatatgcccgtggttgcgattttgacggagaagataagtcaggattcaaagaagcagtgaaattggcttccaaaagtgatatggtgattgccgttgtcggtgaaaaagctttgatgagtggcgaatcgagaagccgtgcccaactggatttgccgggtgtgcaggaagaattgataaaagaactggttgccacagggaaacccgttgtcgtcgtattgatgaatgggcgtccgctgtctatcgaatgggtggacaagaacgtatcggccattctcgaaacctggtttttaggtacttctgcaggaaccgctattgctgatatactgttcggtgattataatccttccggaagattgaccatttcttttccacgggtagagggacaagtaccggtttactataactataagaaatccggacgtccgggagatatgccccattcctcaaccacccggcatatcgatgttccgaatgctccgctctatccttttggttacggtttgagttataccacattcagttattcagttccgcagagcacccaaaaagaatatacgcgacaggagaccatctccgtttcggtgacagtaaccaataccggagacagagatggcgaagagactgtgcaactgtatgtgaatgataaagttgcttctgttgtgcgtccggtaaaggagttgaaggcattcaaaaaaatattcctgaaagcgggggagtcaaagaccgttcagtttgacatttctcctttagctttaggcttttatgatgctgccatgaactatgtggtagaacccggtgaatttgaaattatgaccggctgcaacagtaatgatttacaaaccatatcggtcaaactaataaattagaaggaggaaccgttctatgagaaattggataattgtattttttgtcatctttgccgctcggctttctgcacatgacggtgacagtataaagatcacacacggtccttacctgtgtgatatgagtaccgacggcgtgacagtggtatggactacaaacaaacctgctctttcgtgggtggaagtggcgcctgccggtgaagatcatttctatgggaaggaacgtccgcgatattacgatacggagtccggacgtaagcgggccaatgatacaatccaccgtgtacgcatcaaacatttggaacccggcagggaatacagataccggattttttcgagagaagttgtctcttggccttcgagtgactgggtaacttatggattgattgctgcttcaaatgtatacaagcaagaacctttcagattcagaactttcgacgaccggaagaaagaaatttcctttctggtattaaatgatattcacgggcggagtgactatatgaagtctctgtgtcgggaagtagatttcaaatctcttgatttcgttttgcttaatggagatatgtcgtcatgggtagaggggcaggagcagatatgtaaagattatattgatgcttgtgtcgaattgtttgcttccgaagtgcctattgttttcaatcggggaaaccatgaaacacgtggagtttattccgatgcgttgataaagtattttcctacgtctaccggaactttttattatcgtttcaacataggtaaggtttgttttcttgttcttgattccggtgaagataagccggattcggatttggagtatgccggtattgccgactatgacaattatcgagaagaagaaaccctatggttgcggagtgtggtggaagaaaacgattttaagcaatcatcccttcggatcgcattcctgcacatcccgccgacgataggcaattggcatggaaactatcatttgcagcaaaccttgttgcccgttttaaatacggctggaattgatctgatgttatccggacacactcataaatattatttccgtgaatcagaacccgataaagccaactttcccatccttgtcaatgataataacagctatctgctttgtaagataaaagatggaaaaatggtgattgatgtggtaggagcgaatggaaaagacaagaagcaacatcagtttgatgtgaaattttagtcaaataccattagattccaatagtatagttatttataatttaatgtaatcatgaagatgaaaactataataaaattattatttgtattttcgttgccatttattttctgtcgttgtgccgacgacgggatacactatgaacgggaaatcaatgttcccgaaggtatctatctgacggggagtgcgtcccaattctcggtagaggcaatcaatggtaaaatgaatgtgataaaagagggcactttggtcgcattgaacacatggctgacatccagcggagatttttatatctctttagtcggaccggatgggcaacccgtttattatgggcagggagcgcttttgcaaaacgacaacagtgaggtgtcaacttattctttggctcctggaaccggcggtttcagagtaatggaagatggattgtatcagctaattgtgaatcctttattgaaacaggttaatattgttccattcaatttccgtttgacgagtaaattcgaactgacagaagacggtgaaaacgaactctttcttcaaaaaccgtcttacgaccatattaaccatgtggctacctgggtgtccagtggcgagttagaagtgatattaccggcagagttttcgtttaattataccgataatacgtcttttgatgtgaaggaaacagatacggagaaatatacattctcttctatgtacaccggaacgggaggaagtataaaaatgaatgttttaactgaagaatatgccgaactaaccaaccagtcgcaagtgcagctcaatcttaaaaacaaaggtgagtataaagtaacgcttcaatatgaagtcttgacaggaaaattctttgcgaagatgacgggcaatgagatcatagaacccgaaccggaggggtatccggagaaactatatatgattggagatgaatttggaaactggaattggaattcgacaaatgtggtagagatggcccctgtgggacagcttggcaatggtgcattctggactatcaagtatttcaatgctggtcagggaattaaatgggcatcggaaaaatctgatgcggaaagttttgcctctttgggtacaaatgtcaattatgttgtaggcagtaacggaagagcgacggtagaaacaagcggcctgtatttggtatatgtagatatgaaccgtaatcttatagcttttgagaaacctgccgtttatggaataggtgagtgttttgacggacaggaagtatcgttcgatctttccgggcagaatttctctgctgtcactacaacacaaggcaatcttcagatgtatgcaacttccgactataacaatagagactggaacactatggaattcaacatctataatggacaaatctattatcgtggtgtaggtgctgcactggaaccggttcctgttgcttctaatataccaatagaacttgatttctctcaagatagaggtaaaatagctgtgacttttgcctctccaagtgatgtcccctcaacagcgaaggctatttatatggttggcgatgaatttggaaacatgaattggggctcggatggggttatctcattagataaggtttggaacagtgccgaccgatggatacatattaattatttcaatgccggaactaaacttcgtttctctacatccaagatatttggtgatggagagtttaccggactgactaataatgtgggcttcgaaatctctgacgaaggactggtggttatcccccaaagtggtacttatatcattttcgttgatttaggttcgaagaccatctccatccaaaagcctgtaatctatgggtatggaacggcagccggaggaaacaacgaaaagatcttgccttttacggaaagtagcgacgggaaaacattctctgttactttacctaatggaggacgtttcagaatacatccttatattcctgcttttgataatcttaatccttcatttggtgcttggaaacgcgaatatgctgttaatccggagactcttgaaatctatttgcgtaaagagggcatggatgaaccgaacaaagattatgtatgggctgccaacactataataactcttgatttcagggcagcgaaaggaacgatagtagttccttagcccggtctgctccaagaaaaattgtagctgattatatttttatatcacttttaccctcacaccctcacaccttcgttcaatccctttattcatcgtggttgcaaggtgtgagggaacgtgtggcagtagggtgagggtaaaaagttaccctcaccctatttaattttagttttacttttaatttattgatttatagtgaaatatacttctgtttggatgtaaacaactaatctcatatctcactattttgatcctttttctatcatataaatgccgaaagt

SEQ ID NO: 8211 - DNA, 8420 bp, Unknown
  gut microbiota DNA sequence
gaaagggcggaactgtatacaattatgccctttcagggcgcaaattcagattgtcgtttttacgtagggcgttgccctacgctatataattaagccttttcagggcactccgcaaaattatcatttagtggttatgcactatttaagtattaaacgattagaaaaagtatcatgaagaagttattgctggcagtttttagtatagccaccactttctctctgtatgcgcaaagggaagttccgcaggaacgaatggagcagatttacgaggaagtaaagacaccatacaagtacgggctcgcagttgccccggcagacaattatcataagattgattgtcctaccgtttttcgtcagggagacaagtggctgatgacttatgtggtttacaacggcaaaggtggaaccgatggtcgtggttacgaaacgtggataacagaaagtgataatttgctcgaatggcgcactttgggacgggttctttcttatcgggatggaaaatgggactgcaatcagcgtggcggatttcctgcattgccggatatggaatggggtggaagctatgagcttcagacttataaaggtcgccattggatgacttatatcggtggcgaaggaacgggctacgaagctgtaaaagctccgctttatgtcggactggcatggacgaaaggagatatttctacgtcacatgaatgggaatctctggacaaaccgattttgagcatccatgataaagatgcccaatggtgggaaaaactgactcaatataagagtaccgtttattgggataaagataaaacattgggagctccgtttgtgatgtattacaacgcgggcgggcatcatccggaaacgaatttaaagggcgaacgtgtcggcattgcgctttccaaagatatgaaaacatggaaacgctactccggaaatccggtctttgcgcatgaagctgatggaaccattacaggagatgcgcatatccaaaagatgggagatgtgtatgtgatgttttatttctctgcttttgaaccttcgcgtaaatataaagcattcaatacatttgccgccagctatgatttagtgaactggaccgactggaaaggggccgacctgattatcccctccaagaactacgatgaactgtttgctcataagagctatgtggtgaaacatgacggagtggtttatcatttctattgtgcggtaaacaacgcagagcaacgtggcattgctattgctaccagtaagccgatgggacgttcagctgtccgtttcccgaaaccggaaatcaagaaccgccggcaaattattgaattaaatgaaggctggaaaacttggagagttgagaatggaaagttgagagttgagagtgaaaagactgtgaatatacctcataactgggatgattattatgggtatcgccaattgactcatggcaatcttcacggaaccgttctttacaaaaaggacttcaccctcaacaactctcaattctcaactctcaactctcaacttaaaaaatatttccttcgttttgacggagtgggtacatacgccaccattacagtaaacggaaaggacttcggtcgtcatcccatagggcgcactacgttgactttggatgtcacagatgaattgaaacagggagtaaatcgcctggaagtgaaagccgagcatcctgaaatgattgccgatatgccttgggtatgtggaggatgttcatcggaatggggattcagtgagggttcccaaccgttaggtatcttccgtcctgtggtattggaagtaacggatgagattcgcatagaacctttcggtgtacatatttggaatgacgaaaaggctgctaacgtatttgtagaaacagaggttaagaattatagtaaaacaacagaaacggtagagttagtcaataaactaagcaatgccgatggaaaacaagttttccgtttggttgaaaaagtaactttagctccgggagaaatgaaagtgattcgccagcaggctcctgttgagaatcctgtcttgtggaatacagaaaatccatatctctataaattggctagcatgattaagcgcgatacgaagacaacggatgaaatttcgacacccttcggtattcgtaccattaactggccggtaaaacgaaacgatggagacggacgtttttacctgaatggaaagccggtgtttatcaatggagtatgtgagtatgagcatcagttcggacaaagccatgcgttcagtaatgaacaggttgccgcaagggtaaaacagatacgtgcagccggtttcaatgcgttccgggatgctcatcagccccatcatctcgattatcaaaaatactgggatgaagagggaatcttgttttggacacaattttccgcccacgtgtggtatgacactccggagtttcgtgagaactttaaaaagttgcttcgtcaatgggtgaaagaacgtcgtaattctccgtcagtggtgatgtggggattgcagaatgaaagcactttgcctcgtgagtttgcacaggagtgcagtgatattattcgggagatggatccgactgcaaagacaatgcgtgtcataacaacttgtaatggcggtgagggtacagactggaatgtgattcaaaattggagtggtacgtatggaggagatgtgacgaaatacggtcgtgagctctctcaagcaaaccaattgttgaacggagaatatggagcgtggagaagcatcgacctacatacggagccgggagatttccaggtgaacggagtgtggagtgaagaccgtatgtgtcagctgatggaaactaaaatccgtttggcagaacaggctaaagatagtgtttgcggacaattccaatggatatacagcagtcatgacaatcccggacgccgccaaccggatgaagcgtatcgcaagatagataaagtaggtccgttcaattataaaggattggttactccgtgggaagaaccgttggacgtatattatatgtatcgcgccaactatgttccggctgcaaaagacccgatggtttacctggtatcacatacatgggccaaccgctttgaaaaaggacgtcgccgtgccactatcgaggcttacagcaattgtgattctgtattgctatacaacgatctgacaaatgaaaaggaaaccttcctcggacgtaaaaagaacaacggaacaggcactcattttatgtgggaaaaccgggatattcgttataacgtgcttcgtgcagtaggctattataaaggtaaaccggtggcagaagacctgatcctattgaatggcctggaacaagcccctaacttcgaacttctttatcaggatgataaaaagatattgaaaggagaggcaggatataattatctgtatcgtctcaactgtggaggggatgattatacagatagtttcggacagttatggttgcaggacaatacgaattattcccgttcatgggcggagaatttcaaggatctgaatccttatcttgctagtcaacgtaccaccaatgatccgattcgtggcacccgcgactggacgttattccaacatttccgcttcggacgtcatcagttggaatatcgtttccctgtggcagacggaacatatcgtattgagctgtatttcacagagccttggcatggtacgggcggaagcgcttctaccgactgtgaagggctgcgcatatttgatgttgccgtgaatgattctgttgtattagacgacttggatatttgggctgaaagcggtcatgacggagtttgtaagaaagtagtatatgccacagtgaagggtggaatgttgaaaattcatttcccggaagtgaaagcaggacaagccttgatttcaggcattgctattgccagcacagatcgggaactgaaaccgacggtattccctgcgtccggctggagttgggaaaaggcggataaagaagtaatggaaaagactccgaaagagttacttccggaagacaaaaatgctcgtgtcagtatatcatacgaagcagaaacggctgtactgaaaggcaaattccaaaagaaagaacatcgcaaacagatgggagtgttttttggtaaaggaaaaggcaacagcattgaatggaatgtttctaccgggttggcgcaagtgtacgcccttcgctttaaatatatgaacactaccggaaagccaatacctgtcttaatgaaattcattgattcaaaaggagtagtattgaaagaggacgtattgagcttcccggaaacaccggataaatggaagatgatgagcaccaccaccggaacctttatcaatgccggacattacaaagtattactttcggcagaaaatatggacggaattgcttttgatgcattggatattcaataaatctttctatcaattgatttcaataaaacgggatacggataaggtaaactttccgcatcccgtttctttatattcggatcattttcttagaaatagaatatagatgttatttttttatgattcaatgttccgattttaattatttaaaagataggaattaaataatctctatctttgaggacaaacaaaaagagcaataatggaaagtaatataccaaagtatgatttgccgattgattatattgtaggagagggattcgcaaaagatttactgaagagctataagaattttccatgtaagattgaatccggcttatttattctttgtataaaaggcactatggaggtgacgatcaataccaatacccatcatattagtgaaaatgatttaataactttgccgcctaattgcatattagaggtgcacacattctcatccgatatccagatttattatgcgggcttttcatctcattttatagaaagtataaatttgatgaaagctacccagcaccttcttccggtaattatggagaatccgatagttgctttatctccacttcaggcctgtagttataaaatgttttatgaatcatctattctttcatacgcttcacttaggacgcgcgaaaataaggagatagtaaaagctgttcttaccatgtttatccaaggggctacagaaatatataagttacagaataattggtatttgtcttctcaatcaagaaagtatgagatttatcaggagtttttaaaattagtcatgaaacattatacaatccatcacggaacatctttctatgctgatgagttaggacttagcctgccccatttctgttctacaattaaaaaggcggcaggaaatactccattagaggtgattgcttctgtcattttgatggaagctaaatcccgcttaaagtcgaccgatgaacctgtaaaaaatatagctctatctttagggtttaataatatctccttctttaataagttttttaagcagcatactggtattacccctcaagaatatagaggacgctaatcttctgtttttctatcaaatggtaatgtaacggtaaaacaactacctttcccaatctctgatttaacggagatatctccttgcaggtgttctacaattgttttacagatagaaagtcctaaaccggttccctgtttaaaagtatctactttgtagaaacgatcaaagatttcattcaaacattcttgcggaattcccgaaccggtatcttctacaaatatttgtactgaatccgcatttctgttatcaagcgtatacccaaaatgaatatatcctttttgggtgaatttccgggcattattaatgaaattgcatattacttgtttcaggcgtgtaatatctgtgttgatataaacatcttcatccggtaataatgactttatttcaatttcggaaataggtttcattgcctgttctttctctatgtccatcattaaagagttaagggaacagttggagaaagtaaatttaatcgtatttgattcaatcttggacaaatcaagtatgtcgtcaatcaatcgtactaaatgttcgctattgatgctgattagtcgcacgaaatcggcacgttcctcttcacttaactcatcataagtggaacctataacatcagaaaagccgactattgcattcagcggcgtacggatttcatgactcatattagccagaaacgccattttaagacgatcgctttcttctgcttttttacgtgcctcgattaaggtgttttctatgtctttatattcctgaatactcaagcagattcccactaaccgatagggatggccggatatgtttgcaatataagttgactgcccttcaaaccattcccaagtaccatccccccggcgcagacggaatggaactgttttgtcaaaagttgtattaccactaagttgtacaacaaaggcatcagccataggttgccgatcgtccggatgaatcatattcacatactcctccattgtcaaagtattattttctcctgccggaatacctaaatgttcaaaataacgatcgtcaagagtaaattcactccgacttatatcataataccatggatagattctggttctttgcaaagcagtattcagaatatattcctgtgtaagctctactgtaatattgcggaaaaagaataagatcttgtttaaattagttctatccctgatcgttgcaaattctcctcttatgggaaattgtgtgtaatcaacctgttcttgcatgaaggtatgttcaggtaatgaatacgtattttctccctgacgaatcttttccagaatagtcgaaagtatatcttcctttttatttagcagtttaaataaacgattggtaggaaagggaagcatatcattgaccgacggatgaacatgcagttctgcaaaagcctgctgattgagttgtataacttctccatttgtatcaaatataatcactccgtcgggtaaaatgtttaataattcatcgttatagagtgtctgtttgtaatcttccatttcttttattgttttgtactgaatataagatatatgagacatatcttataacaaagaaaaccatttctgtgaagattataacatatttacagctctttttgagcgacttatacggttattttaaattgcaagatatttaatgttaatacaatattcttattttaatattcgatattcaaatattaatagagagaatgtgccaaaactcctttatgattttattttggcacatttctttttctttatctagtaagctttatcccatttatttgccaatcgtttttggctgttccttctgtgaaattgaatgatttagttttgagaggtaatggtttgaaagttagggaaaattcggcttctccgctttcaggcagaaagaaatgcttaccgggagtaatgccgtcagctttttgtaatgtgtatgatgtaccttgctcgtctactagtttggcatttacacttacttgtatccagtatttgggtatgtaatatgcataaaaatgaacgatagtggctgtatcagtcaattctacctgctttacttcaagaatatcagtattggttgattcaaaacttggatagttaactacttttctattggtgtccccggtgatactcatctcacgctttggcgcatccaaatatctacgcatctttaatttcaagctgcctttaccatagcccgaccacattttcacgattttgcctttgggagagataagaacataattcggaataccgttgacgtcatacacagcatatagtcctgcagtttgtttcaaatcacttaagttttgccaagtcatttcatgttgcgtagaagcagctttccatctagtttgcgtatccgaactcaaactgatgatggtgagtcggtctttatattgctcttgaatctctttcatttcgggcaaagccatgatgcaaggaccacaaccactgctccagaaatcaagtaacatatattttcctttgaagtcagccaaatgatgaacttttccatctaaatcaaaaagatcggcgtctgccatgtcatctccttctttcactgttttaggagggaagagattaaccctaatttcttgtccttcaatggaagctttctgctcttcgtttaatctgtcatacaaagccagtatttcttccttattggtaaaccttgaattgtatttcaaagacatactcaaacggagtaatttttccatccagacattggaaatagggagctccttcatcaactttaattcccgttgattaataatagaagatatactatcactctttgttcgaagtgcttttcgttcggcttctgaagctgaacgcatacttctttctttgatagccaaacgttgaaattcgtcccataaatcacgggaatcctcaatgaatctattatgttcttgttgttcttttaccggactgtctaccctccatgtataaatcagagggtttgtgcccgttacttttatttttacgcctggagttgcataaatatc

SEQ ID NO: 8212 - DNA, 6839 bp, Unknown
  gut microbiota DNA sequence
agtgcttagtttcgcaatatctgttccctctaaaggtattccatccaatacccacaacgggtcttgtgttccattcagtgaagccgtaccacgaatacggatacgtgcaggagctcccggtgcaccggaagttgtcgttacagccacaccggcgatttgtcccgctaatgcctggtcgatactttttgctgcgcctaccattccatctgtaacatctactttggcaatggcagcagtcagtttacgacgttccagttcttgataaccggttactacgacgtctcccaatgtgtgtgcagaagcttgaagtacaatacgataagtatcttttcctgcttgcaaaacgatgtcttgttcttcaaatcctatataactacaatgtaacctagtcaccttttccggaatggaaatggagaatttaccatccatatcagtgatagtacctagagaagtctgtgatgctccggccttttttaagtcatctgcgttaacatatacggaagcgccgatcagaggttcattatcttcaccggatataacgactccggtgattgtacgattagcagcgctggcaaaggccagcgcatttgcaaagaggcatataagaatgcacaagtatttttttctcattaatgtagatagttaaagtaataagtggttttatttgattcctaaagcagtattaatacgtagaatcatgtcctcataatgatagcgtgcagcagtatcggaagttccgagacggttctgcaacaacttcttgatacgtaataattcaccgcgtttcacagagatagcatctgaaatacggttgagctgactgccatagaaattgagcacacgtggagcacccatccggtcttcctgacgaagtgcacgttgttcggcagcgtaacagctacagaaaggagtagcgtggtcaagcaagaaatgctcgtttgcaatcttcttgttgattttaacggcttccggttctgcagcggctgtaagtaatgcatcgaggaagtttttctgcaaagaacgttccataacattagggataccaccgcgttcggtaacaccgaaaatattcttatgaagtccgtccataagttccactactgtaaaggctttctttccgttgacagattcattctctatcatacgcatcaaacgagtattgccaagtaaatcccaaaggatataggcttgggcgttctttaagatttgtgtaggagcattctcctgttttccgatgggagtattgcgaagtagataagtatattgccccacttccgtgtcaaacagccatttagggtatgtcaaaacttcatccatcagaaatttcagtgaagcttgttgtttctctttctctacgaatgtgtaagttttaacgccgtctcctacaattgtattttcaatgtagataccgccaatattggcaaggacatgatataaatagttgttccattggttgattacagcgtagtagaggcgagatgcttcttcataagtttgtcccttctcaccggtagtagtccattgaagaatttgtggaacgatacgtttcagattctcaatgccaagtaaagaagagcgaaccggatcatcacctaaatcttcgttctgtgcacgtggatctaccgcatcgcggacgtcctgtgcctcactatatttataaagccgatcagtatgtttgctcaagaaatcgaataaaatatctttttcttcttccggagtactctttccgtaccaacgatatccatattcgatagcgaacatatcgtatggaccgatatgcggagaaagaactttcacgccatctccaggctgtgcgatataattgaatcgtgcataatccatgatagatgaagcggtagagttcattctggaagtgaatgcttcggaacgtaatgaatctgtcgggaaagcccatgaacccatcatattgtggcggagtcccagagagtggcctacctcatgacaggcgacgaatcgaatggcatctcccatcaaagcatcaggcaattgtacattacgtgcttccggacacactgttccggtctggacagtaatccattcacgtaccatagaaagcacattgtgccaccacataatatcagcttccaggatttctccggaacggggatctaacagagaaggtcccattgcatttttcttttctgaagcagcataagtcagtacggagtagttgacatcatccatgtctacatgcatactgtcagtgatttctttggcgataatcgcattcttgaaaccagccttttcaaaggcaatctgccagtcctcgatacctctcttaatgtacgaacgccattggtaaggagttgaattgtcaatgtagaagacaatcggtttggcaggttccaccatctgacctttcagataagcctcccgatcttccggtttgggttccatacgccagcgggtgatatactgtgtcttatccgtacgctgctgcgcatcactgaaacttaataacggattcgtgaaataaccgaccttctgattgtcgaatcgtcccatcatcggcttctcgggcaataagagaatagaagaactaacttccaccgttacataaacagtggtagtaccttccgttacccgggtagtcaactcggaagttgccacgacattgtttgaaaaggatttgatggatagaatacgtgataaattcttgatagccgaagtacccagattaatattggtaaatacgttattgatactggtttccgtaccatcataaatatcattcaccttgattactaataccgtagaatctgcattgactgcttcgatcttgaatgcggcaatcagcggagagataaaattatcctttaccgaacggaagatagcgtccgtttggggggccagaggtaatgggcgttgttggcgtaacattagtttgcccgtcgctttgtcccattccatgcaaaccatctgattctcatagtttactccgcggtttacgcccgcatcattaagttcggcaggaactcgttgcagcttattgacaactaataagtcacgtcccaaaagtgaggtgggaatttcaaaataataatcatttttcttttgatgtacagcaaacatccctttggtcgttttactgtcttccactaatttctcgtagtcgcttttactcttctcttctttctcttctggttttttctttttctttttaaaccaactcagattttctgtagcgggggtagttgcaaatgccgagagcgcttctccactcagcaatatacatgcaatgaccgctgccattacttttacatacattctcattgagtctctaacttttaattataattaaaaaacggctacaaaagtactaatataaataacataatgactactaatttgcaatgaatataacattaaaaagaaatattaactagtatctacggtcatcattctcctcggatatttcatagtttagtgggaatagtgtacatttgcgggagtaaaaaagtgaacggaatgatgagacgatatatcactgctttgatgttggcttgctgcatcggagggtatggacaagagaagaagcaagtaacctttgtacctccttttgactttcctcttacattgagtgggaactttggagaaatccgctccaatcacttccacggcggactggattttaagacaggcggagttatcggtaaacccgttcgtgctctcgctgatggctatatttcgcgtattcgcgtcacgaatggttcgggatatgtacttgatgtctgttatcacaatggctattcaacgatcaaccgccatttgagtggttttgtttctcccattgccgaaagggtggagaaacttcaatatgaagaagaaagctgggaagtagagattgttcccgaaccgggagaatatccggtgaaaggaggccagcagattgcatggagcggaaataccggatattcgttcggtccgcatcttcacctggatgtatttgaaacggaatcgggagattatattgaccctatgcctttctttcaatcgaaaataaaagatacgcgtgctccgaaagcggatggtatcctattttttccacaactgggtaaaggagtagtggatggaaagcaagagaataaaaccattcttcccaatagtgagcgtccggtggaagcatggggagtgataggtgtggggatcaaagcatacgattacatggatggagtgaataaccattatggagtttattcagttgtgcttacggtagatggaaatgaaatatttcgtagcaccgtagatcgcttctcgcaggaagagaaccggatgattaattcctggacttacgggcaatatatgaaatctttcattgatccgggcaacactttgcgtctgctaaaagcatcgaatgataaccgtggcttggtgacgattgatgaggaacgggactatcagttcttatatacattaaaagatgctttcggaaacacttccaaatatagtttcaccgtacggggtcggaaacagccgattgaaccgttgaatcatcgggagaaatattattttacctggaataagactaattatctgcaagaaccgggattaaacttggttgttccgaaaggaatgttgtatgatgatgttcccctcaattatcaggtgaaggcggatagtggtgccgttgcttttacttatcaactgaatgataaggcggttccgctgcatgcagcttgtgaactgtgtatcgggttgcgtagaaaaccaattgccgatacgacgaaatattatgtggcccgcataactcccaaaggaggaaagtacagcgtaggcggaaagtatgaagacggatacatgaaagcatctatccgggagttgggaacttacactgttgccatcgataccatcccgccggagattatccctgtcaacaagaatcagtggggaagaaacggaaaaattgtctatcgtttgaaagatcagggcgcgggaattgcttcctatcgtggaacgattgacggaaagtatgcgcttttcggacgtcccaatattgtgaaatcatactgggaatgtacgttggaccccaaacgcgtaaagaaaggaggcaagcatactgttgaatttacagtgaccgactattgtgggaatgaaacagtagcccgtgaaagctttgtttggtaaattattaaaagtgaatcatatatttattatgaagagaagaattattctttgtgccgccgtattgatggcggctgtggcgaacaccttcgcctgcaccaacctgattgtcggaaaaaatgcgtctgccgatggctcgacgattgtttcctattctgccgactcgtatggcttattcggagaactttatcattatccggctgctacctatccaaaaggtacgatgctgaaagtttatgaatgggataccggcaagtatctgggagaaatagagcaggcacgccagacttacaatgtagtcggtaatatgaatgaatatcaggttaccattggtgagacaactttcggcggacgtccggaattggccgattctacagggattatcgattacggaagtctgatttatatcggtttgcagcgttcgcgcactgcccgtgaagcaattaagatcatgaccgacttagtgcagcaatacggctattatagcgaaggagaatcctttactattgccgatccgaacgaaatatggattatggaaatgattggtaaaggtcccggcatccgtggagcagtttgggtagctgtacgtgtgcccgatgattgtatttcagcccatgccaaccagtcacgtatccaccagtttgatatgaacgacaaggaaaactgtatgtactctccggatgtcgtttcttttgcccgtgagaagggatattttaatggagtaaacaaagactttagcttctcattagcctatgcgcctcttgattttggtgcccgccgtttctgtgaggctcgtgtgtggagctattttaataagttcacagataacggaaaagattatcttccttacattgagggaaagaccaatacgccgatgcctctttttgtgaaaccgaaacataagttatccgtgcaagatgtgaaagatatgatgcgcgaccattatgaaggaacgcctcttgacatctccaatgattttggagccggaccttataagacaccttaccgtctttctcctctgaacttcaaggtagatggtcaggaatatttcaacgaacgtccgatttccactcaacaaagcgggtttgtatttgttgcacaaatgcgggctcataagccggacccgataggcggtgtactttggtttggcgtggatgatgcgaacatggctgtatttaccccggtttattgttgtgctactaaagtgccggtatgttatacccgtgtagatggggccgattatattactttttcctggaattctgctttctggattttcaactgggtatctaatatggtctatccgcgttatgatttgatgatcggtgatgtacgggaagcgcagaaagaaatggaaactactttcaacaatgcacaggaaggcattgaagaaatggctgccaaactgctggcaaaagataagaacgcagcggttgactttctgacaaactatacaaatatgaccgcacagagcactttcgatacttggaaacaattgggtacattcttgattgtgaagtacaatgatggagtggtgaaacgtgttaaagacggtaagtttgagcgtaattctatcggacaacctgccggagtgatgcgtcccggatatccgaaagaattcttgcaggaatatgtcaagcagactggtgacagatatttggtaaaatgaagaattaagaatgaaaaatgaagaatta

SEQ ID NO: 8213 - DNA, 6579 bp, Unknown
  gut microbiota DNA sequence
tatatttttaatagctgtaaagctgatgcgggataccatgcgggttacgctaacaggcaattccgtcattttaatattattaattgttactgtggcattttttccgtcgctacgggattccacataggcacgtatcacatttccatacatgggcggaggagcaatgatacctacggcagagaatgtcactttttctattttattttccagtgtaatagcagagagcttttcggtaagctccgatgtttcattgcagatgatataaatgttgttatatccccgtgccgctcttatagaagcggtgtatgtgccatcgacatttatggaagcatcagaaacgtcgttgtataccagctcgttcttgtcattaaacacaattgcacgtacggaatttatgacttcatctttgtcggtggtatcattgcgcgtccccattttaatactcatcggtatcttttctccttcgtaaatacgtgcgcctgttacttcgttctcttttgtacaagagtaagtaaacagggcaaacattgttaaaagaaggacatttgccgaaaattttatgttgatagttatattcatccttaatcgtgccataattccacttcaaaaaacgatttacatatctgttggttggaaccagtaggtccaattattgatggttatactcaatgcaatgtagccattctcttccttatctccgattcgaatgttgatatcccattcgtatctgcggtcgaggtattcttgatcgcccatcatttccggtttgctcatcaacaggtagtcaataaggtttatagttgtttttcctccgatgtctatcgtttttcctgacgctttttcggtgatagaaaaagtcatgtcagcatccttaataaatctaagagtatgaaggcgggtttgtagggcggtcttactgtctttctcttcaactgaacaaggatggtaaattatattcttgctgctctcacctacattatttttatagtcataagaattgtttgcagttattagttgtatgtcatattttgaagcatccaccggattatttcctcgtataatgcctatcgttatatcattagtattgcgcaccaagctgacgttttccgtattactgatattttccgaagaaaacattaatagaggaccgctatgccataatgcatcaagatggttgttacttatgttgttttccggctcatatttcagcgttaatttatttattggatcacctgtatccattgtcggaagctgatagaatttatccgtttttccagcccatacaacagctgtacagcctttcaaacgatatggtatcagcatacaatagtccggactttttagcgaatggccattatcagtaagtgtctgtatatattttccttgcgtatcgaacacgaaaacctttacttcttccacctgttcggcgaaccagtctttatttgccatgttatagtcatatcggaattttagaaagaggtcacattgatcaaggtcgtcatgaaggacatcgcaaccggtaatccctgccactataaaagcggcaaggattattttgtatttctttatgtgtcttttaattcccatttatcaatgcaaatcaacaccttgtgtccagtaagtccatggattgatagtgatttttacagaaaggtaagcatctgattcgtcatcatcagttcccggaggtgtaggattagtgggatcagggtcagacggatcgggaatccacggtgttccgggaccgctcacgctctgaaggtcaaggtgataccagttattgcgcactactccgtatcggcctaaagccatcttttcggttacattctgatcgtgacggatcaggacatcgtaatagcaaacagattcatgatagtaacgcacggcacaaaaacgtccgatgataccagttttcgcagtaagtccgttcgcttgaaggtttgtaataaaattgtctatagtgctttgatcggcatctccagccacgagctttgctttctttaagaatataggtaagtctgtttttagtccgccactaggagtgtttttatattcagttttaagctgttctaatgtataatagtttcctttccaagaaaaatagctactattttcagtcaaactattaggagtgtactgtgcctttactaccaccttggtagtgaatcctaattgttgtgccttagcttccattgtattttcaagacaatacagacttgttcccttactctgtgcaacagcaggcatctcctcactttcgctatctatattttttagataattgaaagctgcatccatattagtttccatagtactattatcactaatatcaggttgttcgctctttaaatagttcttatcccgacgataaaccgctccaggcgtggcattatcgtaagtgataagttcgctatacagtttcacacttttattggtaacgcttaattcccaaccgccaaaagtaaatttggcaccgtcaggttttgtagaaaaaggatccttaaccgcaagttctacttttgcactcaatcgatccacagagatttctgcaggatggtcttttgcttctttttttgccgcatctattttgtcttgggtatatccatccggcttatgcaccgttactcccatcaatgctccttctatgccagctccttcgcctgcactcgccatcatgaaattatcattggtagcgatgttggcaataactgcttcaatagcagtgttaattgcagaccaaggtttaccttttacagcatccgtagttaaattccaccctttgctcccgtcggtgtaaggattgataaccacaaatactttttttgttttctctggtactaattttgcatcgctagctacagcttccggggtccctgttccaccggattctcctccgctattcccaacggtcaaaccatcaaaatcagccacatcaaggcacacatcatcctcgtcaaataataaaactttgacggcccctgctttactttccccagaacttcccggtttttcttctacattcactgctcttgaagtagctgtgtgactttgcagcgaaagcgacagatacgctttgccatccagttcaccacccggaatattcccttcccgggcatcttcactactacagccggcaaatataaaaactgccaatgtagataatagaaaacttcttgttttcatcattgttaaatgtttaaatgttgtaaataaaaagataattataatatataaaaaatcaataatctagtttactcatcaattcgatattctcttcttttttggctaattcctccagattgagatttgcttgtttcaatccggattcagcagccttatttagatgtaactttgcttgttcatagtcacctcttagcagatgtaatactcccacggcattttcgtattccggtgtggaagtctctgctctctttaagtatttttctgccaaaagagtgtctttacgtgaaagtgcagccgaagcggcattcagattggcaatcttatcatcaggaaagacgctaacggctgtttcaaataattcgataaactccggtgaaccatttttgtaagttagagcaaccaaataaatttcattcagactcaaattttgtggccgactatgaatcagcacttttgcttgttctatattaaaattctgaacatcgtactctattttacagattgctttacgcagatgtgggtaatactcacgcaacataaaccgataaggattgccatgtttatataacatcaacgatttcttgcgactggtattcgttcggtagtttatttcaactggtatgtgatctataatatgaagaattccatccttttctgccatgtcagaccttgcaaccattttacgtagtccttcccagttttcgccaccatattccaccttgtataattctttagagaaagggaaacgagggagaaggtaattaacaagtgcctttgcacgtccttcggaaagctgtttgttaaaaaggacagaaccctccggtgaagcataaccaatgactgatattccacgaatggtaatggctgtatcatttttcacttcggcaagcatggaggatatcttttttagttcaatcggattattcatatagtccggtttaatgtcggtttttgatacgacaaagtccagaaatgcttcacatgacatctcacgacttttgactggttcaacttttggttgtacgtaactaatatgtggagtgatttgataagggacgggaagtttctccaaagtaacagcactaaaaagaggaatagctgatagtaacctgcctggcctgcaacagcccatcacttctttctttacattcagatatgcatccttcatccatggctcgaatggaattatcaacgagtaccgaatctgttcttttccagtcattccatacccttttaatatggagtatggagcttctgactggtaaaaagcacgttcctgcgtattcatcaaagcaagtttacgtttcagattctgatagttcttacgacctttaatggatatttccggcaattccatctgatggtttgcagcaatcaatactggtatcagttctatagaatgattggagctgacttgtatattatcaaagttataaagtatttgaatatgcaatgaatctcccgcttgctgtagttcaagagctgttggctgtataattcctgtataccatttcttgggattttcttctccgtatgataaagaagaaatggtcaggaatatgattaacaggtataggaatgatcttaattttgtcatggttgtattattttataagaaatataagtgagattgcagctttagttggtccaaaataattgcggttttctgttccgaccttttcaccacaagttttacaccggaacttgtcataatgtagccgcacatatcctgcacctatatttgcttcaaggctccaacgattactaagaaggaagtgataaccatacgagatgcctcctcctgctccccatccttcatatcggtaatggctggaattatccccgaataaaagtggcaagtgatgacccgctatgttatattgtgttcctattatatgtattccccaaaaatgtccgctaaatctttcacatgtccaataacgatattccattgtaccgagccagtgcaccagttttttatttgaagatgctttattgggtgtaaaccagttaagtccagcgccaagttctattgtagtgcgtggagaaagtccccactctactcccaagttaggagtacctgaatatgcaccgtagaacaggtttgtttttactgctaccttttgggccgaacattttaaaatgcttccccaacatatcaaaagtagaattgctatatattgtattttcatcagatgcgtatattgaatattttgcttttgcttgcgttaataaatgattatcggatgcgaaattacaaaataaatatatattaaagtaaaacgttctgaaattgcacatggattccgaagtttcgtccaaaatagttctataaattactaaaatgagggttagataactataaaaaggacttatcggataaacattgttaaattattatccaacttattcaattatcttttgtgacatactaaacgtttatacacgcgcaaaacaaacgatgtgtaagggtggttatttatatttacatattacttgtggtacttcaattatgcgttttgaaaaatcagaatattacagctagttttgttcccggattttaaggaaccatccgtttctttaaaaggaacaaggcgttcctcggtgagaaacaggtcgttcctttaaaaggaacggctccttggttttaaaccaaaaaacagtatctataatacactgtatatcaatttattataaaaaagaagaattccgtcccgataaccatgggaatattctcaataaaccaaacggaattcacagtccaaagggctgtatatacatacttttttattacaaacttaaaaaaaaatcccatggttacagttacaattaatatcaagccatatttggctggatatatgtatgtccgatatcgacaaagtttagaacccgatccagagaaccagtctcattcttcctctccttcttcttcttccaaacgacttatccctatccatctctcccacattactccagtttatcacttccttcatcaactatctgtccctcatccgcaaaatacttcatggaaagaaattggaaatatttgctttgtactgcccaaaccgcgtaatgggaagaatccggaagtctataattatatcggaaacgatagtgcattgattatagaaaaggaaatagaaacggagatgaaagcggaattatactcctttctattggaaaataagttcaataaaggagtgatgtttaaaaagtcaatagaacaattcgtagagcactacgaaatggtaggactggtacaggaagaaacgctgatgagggcatttcaaagatggaggaagttggtgaaagaagaaaaagctataatgaaagtatattgattttgatttaatattctataaggaaatgcgatatactataccaattgcatctctt

SEQ ID NO: 8214 - DNA, 10108 bp, Unknown
  gut microbiota DNA sequence
tacggcaaagtttagataaatgatgagatatgaatttcgttcgggagtgggatgctttcctatgtacaggtcgccataccatttctcaaacttgtccgcctctaatatgttataataatggtggagcatagagatcgttaagctctttccgaaccttcgtgggcgaatgtaaaagaaatacttgttcgcgttttctataagcgggatataatgtgtcttgtccacgtaataacagtcgtcttcgcggacatcgataaagttcatcattccgtacggaatacgtttgcgctttactggttggttcataactctttcattttctcacaaaagtaacaataaaaaatgaatattgatggatggctgttatataaatgatagaatatctttggaactatccgggtggtaatagcgagaatacttgtatctttattgtcgaataaattaataaattgagaaatgttgaaagtagtaacatttatgaagcaggtagccatggggctacaggtggagggaaacttcggtactgcgcatgtttatcgtagcagtctgaatgccatcattgcttattgtggggaagaagatttgctttttagtgaagtaacttcggagtggctgaagggattcgaagtttaccttcgcagtcgtggttgtagctggaacaccgtttccacttatctgcgtacgtttcgtgcggtttacaatcgtgctgttgatcttgggaaagctccttatgtgcctcatctgttccgttctgtttataccggtactcgtgccgatcataaacgtgcgttgtgtgatgacgatatgaagaaggtgtttgcaaaattgtctcgtacgtccggtgtgccatttgctgtatgccaggcgcaagaattattcattctgatgttttcgcttcgtggtatgccgtttgtcgatctcgcttatttgcgtaagagtgatttgcgtgataacgtaataacgtatcgcagacgtaagacaggacgaccattgtcggtgacattgactcccgaagcgatgatcctggtgaagaagtatatgaatcgtgatccttcttctccctatttatttccattgttgaaaagccgtgaaggaactaaagaggcgtatcgcgaatatcagttggcattgcgcagctttaaccaacagttgatgttgctaggtgaattattgggattatccgataagttgagctcgtacaccgcccgccatacctgggctacgacagcttattattgtgaaattcatccgggcattatttccgaagcgatggggcattcgtctatcactgtgacggagacttatttgaaacctttccggagtaagaaaattgatgaagcaaataaacaagttcttgacttcgtgaaacgctctgttgtaggcgtaatcgcttgaaaattattctgttactttgtaggtaacgggaatgaatatcggtgcaaatatgagcatatttcttaaaacaaccaaacgaaatcatacattttttctaataaactactcaaaataggaattaaccaaataaaacacgcggattctttgtattagggctttgttaacttctaaattttgcaaaagatctccctccctctactgctgttcagaagcaggggtaaaaatgtttcattgcatatcataccatttttcagtattgactactctggaagagcaggcacaaaggtttccccgttacctacaaagtaacgggcagtctattattgaaacttagtgtttaataatatattattaatgtaatttttaagtagttatgaaaagaaaatttgtgaaagtgatgctcttcggggcattgacgcttgcagtaagtacaactataacaagttgtaaggactacgacgatgatgtgaaaaatctgcaggagcagattgataagatcaacacgtcaaatcccgttagcattgaggatatgaaaaccgccattgcagctgcaaaaacggagttggctacagaaatcgacaaactgtccaaagctctggagaacaaagatgcctctattaaagcattggaggctgaaattgcagacttaaaagctaaactggctgccgcacagggggatgctacagcagctaaagaacttgcaacgcaattgtctagtaaacaaaatgaactgaagactttagtagatgctaacgatgcaactctcaaagcattgaaggaaagctatgacaaactgactggtgccgaaggtgatattcagactttgcagaattttgtagccgactacgagaacaacaaagtaatcagcgcagctgcaaaaactgacgaattgctgtctgcttttatcaatagcacaatcgcagagaaacttgatggtaaagatcttgtagaatatatcaatactgccgtaagcactgccattgcaacagaacttacttctgtgaacaatgctattacagctattacaggaaaagatggtgcgttaactaaaattcaagatcagctcactaaagcattggatggtgatgcaacaaacaaaggtattcttgctagattggatgatttggaagatattcaagatgctataaacagtttcttggaaaagaatccgggacagtatgccgatttcgcggcagtgctgaaccagatcgagacattgcgttcaaactatgagacgatgtttactccttccaatttgaagagtaaagtagaagatgctatcgatgaagctatgaaaactaccgacttcactttcgagcagttggttggtgacgtgaaacaacatggtattgacatcgaagctatcaaagcaatggtacagagcgtggtatatgttccgaagaatacagccggtacagaagagtttaccactttgtatgctaagaagaattcgagtgctacaagctattctatcatctcacgcagtgaagacttgactgttacattccgcgtttcgcctgcaaaagcagcactaggctttgagacaggaaagtatagccttcttatggatgcgcaaaagacacgttctacgaatacgaatatcttcaaagtaggtgaggtgacagtagagaaagagggtggtgaacctacagggcttatcactattcctttgagtactactagtgcatctgaaaactatgcattgtgtctgatggtgaaggataacagtaaggaagtactgacagagattacatcaaactacttccctgtgttgatgacgaccaaatatttatctcctggctacaaggttaagtatataactggtgaaacggacagaagcattatatataatgataataagtcaagtctgacattcagcaaagatggtaaggaacaagctgtcttctatgatgataagactactgccgatgctgatgcttcaactacctatacggatatacccgcaggactcaagggagtattcaatacaacctttgaattgactggtgctaacaagcaatattttgctattgatgcaacaacaggtaaagtgacattagcggagactgcctttggtcaagtaggattggtaggtcagactgttgatgttgatgcaaagactgcaattacaggcgttgatgatcctgtcaccactgatttgactgctaccgataaagtgactattacacagaaaacggaaaataaagaaatagcatatagcttcgaaggtacttggaaaggtaatggcgtgcagacatatactatcaatatggttgatttgtataacaaaggagctattacggaggctgattataaagctttggcagctagtgcttttgatgtaactggtgcagataacagtgtaacttttgctcgcggtaatgagaacgccttgacaataacagtgcctagtgctacaaaagtcggcacttataatcctacagcagtgataactgtatcttctgtgaagacaattacagtgaaggccgccgttacagttaagtctttggcagacgttgctttgactactgtagcttctcctcaaaaggtcgatgcaggtgtagatgcagcacaggctactgaaattgctgtagaagtaggagatgtttctacattattccctaactatagtgatgtatacaaaaaggtagttacagatgcaggtggtactattgaatttgcagcaacaggtactggagtagatttctctggtgctccaaagctaattattaatgaggactatgcagcacctgtaaaagtgacagctacagtgaaatgtggcgaaaagaaaaatgcggtatatacagtaacactcgttcctgatgctaagttgagcggcacatggactgcaccaactaagcttacacaaaaaatagcatctgataaaacctctactgttaatttagctacaggatctgtttggaaagactatagaggtcagaagatgtgggaagccggaactggtgtaactggggatggttctaatggatttgctaattcggttgatgctcttgatatgtatggtcttacagctcctgctttcaaagttgtcggagacaatgccgataagtttgaagttagtgctgccggcgagttgtcatactctcaagctggtaaggatatgccatctagagacggcttgacggcaactgtagaagtaacagttaagtctaaatggggaggagtaatctcttcaacaggtgatgttacgacaataactgtaacggttgagtaaatatgataataactcttttctaaaagatatctcttttatttcattagaagagagagtttttgaatagataacttttatagataataaaacccttcttcaccctcgtgtgaagaatatgccgagaagaaacaaagtgaaggatatggcttgtgaaagtcaatccttccatctttgttcttctttagaaaagggtgcctcccacatttcccacaggtatccctttttatttttactctcggagcgtctttttgttgtactagaatcaaattactagtcccccatttccctataggtaaaggaggcgttcccaagatgcagaaaacccgggcttgcgaaagtccgggttttcttgattaataaccaataacaattaaccaataacaactaacaatagaatatgtaaatgaaaaaagaaacctattctttatcccactccttgctcgcttcgaaacaaggacaagccttaatccactcttccggctcaatctcaccgtctccgtcaagatcaggactaagatcacgatgtccgcagacacggcatcccggaaaatcctttaataaagtcaggataagaacccgtagcgagtgtttctgccaacaagttcgcgtgtctttcggctgtcccatgcagtccagtccgccttcgtagcagataccgatactttcccggttgaaaccacggctatgcgcaccgatccgttctaacggacgggtagacttaatatccccgttcttacgaatataaaaatgataacccacaccattgaagccgcggcgacgatggcaaacgtccaaatcatgttcggtgaaagatttatcctcgcgggtagcggaacaatgcacgacaatcagattaatagttctcatgcgttaggcaggtattaaagaagtggatgatgatgcagattcggaaccattgttgcgctgaatacactctttattgacacactgtaaagtgacagcttccgaaagtttgccttttaatgaaaaaatctccgagtgcatttccttcacacggtcgctcaaatcgaaataatccttgagcaccttttcgagctgtttcataaggaagccatactgctctttcaccagttcgctgaactctttgacgtcctgcatcatttgctgacgttttttgcgacctccgaaaaaagggaggatggctgtaataatatcaatgattttgtctaacatctttcttgaattaaagattaaaaattaaagattgagaattgagaattaaaaaataagagaaactaaaaataggaaaactaaaaaacacgagaatgaaagaaaatggagaaataaagaaaatgagaaaatgcgggaaagagaaaaacagaaaaacagcaaccacatggcaaggaaccatacatggatcagttcctgaaaccatgtgatactgttttttctaaggatgaagtttcattctgccaaagaaggtagtgcgggcagcctatttacgctgctggatccggtgcttctccaccgcccggtttattgccccccgaaccgctgccggaatcatcgtccgaaccaccgtttccggaatcgcttccatctccctttccgcccaggacgaagtccacgttgttttcgcttcgtgtactcgtatggctcgaattcatcagcttcaacgctttgtcggcaacgaagcggacattgacacggcggatgctgcgcaccgtacaatctttcatactctccgtaccgtcactagtcagcgtgatgtggaacgtacccaatccgtcaatcttcactttgtcgccctgggtgagcgacagacgcaactgttccacaaatgcctcgatagtgtgtttcacgtctccggcagtcagtgacgatttactttcgatggcggtagccatcgtatcaacgtccatcactcttacattgcccgatttctgacgtatgtaatacagtaacggagcatcctcctgatttacatactttctgcgctgatagcgttctactaatacatccataaatttgaaaagttaaggtttaagtgaataattatatgttttctttttgatactacaaatatacaaaatcagagaggagaagtcaagtaaatatggttttattttctctgataatataaaaagttttgcaccggatatgtatcaataatatttcgataaattatcttgattatttatacaatagatcgttttatttagcatgtttttccaaatattccaatggtggaacatagtcatatatttttgtcatcgacggattatgcccgaaatatacattcccagtctctccattacgctgcttggcaacgataaccacccccagtccttctgtcgggtaaccgctttcccggtcggtgacgatgcgttgcatcgctggtcggtaaagcaacatcacgacgtccgcatcctgttcgatagctccgctctcgcgcaggtgtgccagttccggacgtcctccggggcgattctccgactcgcggttcagctgactaagcagtatgacgggaatatgcagctccttggccagcaacttggctttccgggtggcttgtgccacttcctgttcgcggttgcggttggcctgcttggtagccatgtcgcagagttgcaggtagtcgataataattgcgtcacactgattgcggctcttcagtagccgggcacttgagcgaatgtgatccatgctgacagaagtgctgtcgtccacgtagatggggagtcctgatagttctgaagctgcggtgtgggcattttccatctcttgtgaggtaggtattccgtttctccaccggtaaggattaatgttgctcactgctgccagccatcggtcggcaaggcgttccccttgcatctcaaggctgtagacggccaccgcattgcccgccattgccgcgctgcgtgccaggtgcagggcaaaagccgttttacctacggaaggccgggcggcaatcactatcagatcactatcctgcaaaccgcctgttttctggtcgagttcggtcagtccggtggggatgccggtgacgccgttcacgcttttggcaatacgcaattcagcttctttcagtgtgtcggtcattagggtgtccatgcagcgcatgtggtcgtggtgtccggattcgccttcgagacggtcgagcaggttgtgcgcgtcgatgagggtgtcgtcgatgtcgattgtctcatccatggcgcaggtgaggagtttgttgaagccgactacggcttcgcgtgccagatatttctggtggacgatttgcgcgtgatactcgatgtgggcggaggaggctacccggctgcttagttgtacgatggtatacggcccgcctatcttttcgagcactccgcgacgggtgagctcttctttgacggtgagaatatctatctttttgtttgcctgatacatagctatcaaggcggcgaagatcagctgatgatgatcgtcgtagaacatttcgggacgtagcttgtcggctacgagtggcagagcctcctgttctatcaggcaggctccaatgatggcttcttcgagttcgctggcgtgtggttgcatttcttttcgatgttttttagtctatatattcgtttaagaaagccttgtctttcaggtaggtggcggcaagggggatgaaacgtgtgtcgttggtgtggtagtagacttcctcgatgtggtcgatggctgtctgctgttcctcttgggtgagcttgtcccattcgcggcgggcacgggcgacgtactgtttgggtttttgcatcgtttcatgatatttatcccagaaaacgtcgaacacttcggatttttctttctttttttcttcgcgggcttccggagagatgcagccggtccagaaatcatagttgttgatatgaatgtggaagattcctttctggtgtgggatgatcttgataatgccctcttcctggattttttgaaagaagcggagggttttggatcggctccattggaagagtcggctccagtgttgctggctgatgacggattctccgcgttggcatacgatgtcgatctgctgaatcttgtacgtggtttccgagtagttggcgtgtatcaggacttggaggagcgcttccagttctcccggcgctttgtcgtttatctgacgttttaacagtgctttgggaatcaggatgtagccttcgtgcaggaggttgtttggaagttgtttcattgaggcgtatttttatttacttgttgttgattgcgggttatccccattgtgcatacattgtcggatgcggctgcgaaggtagtgcatgaatggctgttcgtgcaaatcttttttggctggaatgggggtgttttgaacggtatggtggtatttgggctgtattgggggctgtaggacggaaataatgttgttctgtgtcacaccgcgcgggtgtaaaagatgagattgggggaatgaatagaaaaacagaggttctgttgggatgaaacagagcctctgtttattagaaatagaacctctgtttgccgtaaatagaggctctattcggggacatgcggttttctttttagtattttttttgacaaaaaatcgaacagccaaacgaacaccccctgaaggtggctcaactgcttgtctgtcatgcgtttgcaacgctcgaaaaaaagtaggcgaaccaccaaccgaacatatataaatactaaaatataataatctatataatatagttcgttcaacacgttttttctgtgttttcggaggtgtcaggatgcagtaaatctttacttatgggtgatgcgctaacgtaggattattttttccggtccccaggtcatgaaaaggatctgctgttgcttcggacttagacgtgttgtttcgtgtacgtagtgtgcggcttttaattcgtcgaagagcagtttgtcgagttctatttcgtttctcattcttttgctggctgtgtcagcgttagaatattcgggaaaatactcttgcgctacggcagagaaggttttaaaaccattgataacccattctcgttcttccatttcttcttcgttttcgtttgaagtcttcatttgtgtaaaattaaattgtttattaatgcaacacttcttgtgttgactttgcaaagttaatgaaaatatatttgttgtgataaaataatcgatttattttattatcatatttgatctatgtaataaaatattgtatctattaaactccttttttaagcgtagctttttgtatcataaaatttgacttgttttgtattgatatatttgctaaactttttttcttctatacgcgtctcaaattaaatcgtatatttgcgaaaagaatcaagattgggaattatgaacgaaaacgtcttagctaaactgaagatacttgcggaatctgccaagtacgatgtttcttgttcttccagtggtacggtgcgctccaataagccgggcacgctgggaaacactgtcggaggatgggggatctgccacagctttgccgaggacgggcggtgtatctcg

SEQ ID NO: 8215 - DNA, 32177 bp, Unknown
  gut microbiota DNA sequence
gggaaaccttcctgttctgccacgtcggcaaagtgaggataatccagtgaccattcttcatgttcacccgctgcggcagcgcgaagattttcaagtgtattaccaattacaccggccggatagctggcagtgatttctaccataccgccttcgaggaacttaaacatacgttttgcatgttctttttcctgatcggcagtttcagtgaaaatagccgcaatttgttcgtagccttcttttttagctgcacttgcgaaataagtgtaacgcattctagcctgtgattctcctgcgaatgaagtcaacagatttttctctgtttgagttcctttaatactcttagccataattctatatatattttaaattggttgattaccaaacgtaacttgtcgtactatttataacgcaaatataagccatttgttcacaataaaccaccttttcttaatgaataaaaactatcacctcattgatgaaatctatcaacagacaaatagtatgttcaaaaacatacttatttcgattattttatctaattttgcaacctctagtttgcaaaaaagtacagagtacacgtataataacatctaaaaatgaagctatttgaatttaaacccaaactggtttcttgtctaaagaattattcgaaagaaacgtttatggcggacctgatggccggcatcatcgtaggtatcgtggcgcttccactggctatcgctttcggtatcgcttcgggagtttcacccgaaaaaggtattatcaccgctatcattgcgggattcatcatttccctgttgggaggcagcaaagtccagatcggcggtcctacaggagcatttatcgtcattatttatggcatcatacaacaatacggcgaggccggactgattgtagccacgctgatggcgggcgtactccttgtattattaggagtgttcaagctgggagcggtcatcaaattcattccttaccctatcatcgtcggatttaccagcggtatcgccgtcactattttcacgacccagattgccgatattttcggtttatctttcggagacgagaaagtgccgggagacttcgtcgggaagtggatgatttatttccgtcacttcgatacgatcaactggtggaataccatcgtaagcattgtcagcattattattatcgccatcactccgaagttctcaaagaaaattcccggttcgctgattgccatcatcgtagtcacggtagccgtttacctgatgaaaactttcggagggatcgactgcatccagacaatcggcgaccgtttcaccattaaatcggagttgcccgatgccgttgtgcctgcgttggattgggaagctatcagagaattgtttccggtagctatcaccattgccgtattgggagctattgaatcactgttgtctgcaacggtagctgacggtgtgataggcgaccgccacgattccaatacagaactgattgcacagggagcagccaatatcatagctccgctgttcggaggtattcctgccaccggagctatcgcccgtaccatgacgaatatcaacaacggaggtaagacaccgatagccggaatcattcatgcagtagtattactgttgattctgctcttcctgatgccactcgcacaatatatcccgatggcatgccttgccggagtactggtcatcgtatcttacaacatgagcggatggcgtgtattcagagccttactgaagaatccgaaatcggacgtcaccgtattgcttatcacgttcttcctgactgttatcttcgacctgactgtcgctatcgaggtgggactggtgattgcttgcgtcctctttatgaaacgtgtcatggagactaccgaaatctcagtgattaccgatgagattgacccgaacaaagaatcggatattaccgtacacgaagaaaacctgatgattcccaaaggtatagaggtatacgaaattaacggcccttatttcttcggcatcgctaccaagtttgaagaaacaatgacacaactgggagaccgcccgaaagtacgtatcatccgtatgcgcaaggttccgttcatcgactccacaggtattcataacctgactgctctctgcgaaatgtcgcagaaggaaaagactaccattattctttcgggagtcaacgataacgtgcataatgtactggagaaagccggattctacgagttgctgggaaaagagaatatctgcccgaatatcaacgtagcattggatagagcaaaaaatctggtagaatagcactaattatcagccacttacaggagctatataccgtgcgtgttggacatatagatccaatgtgtacggcatatatgacctgcgtgttggatctatagctccaacacgcaagctatatatagcctatttaatcaatcgccaccttactagacttaaaaaataatccgcgcttatgcgccgccctccacacctgcctggcttgtcttactccagcatcacttcatcaaaaaagattctcgatgtctgtcccggtctcacatgagatgcaggacaaactcccggacctttggcggtcacacgtacataacgggcctgtgtgcctcccagtttcaatgacaggttttctataaaattcccttcacggaaaatctcttcagacgtgaagctctgcacaacggcttcgcggaacttggagttatcatccgaaacttccaccctcacggatgccggcttatggatagccattccattgttcgtgatgcatcccaatatcaacgtgttcagcacttccggcttcagcaagtcaatcgtaaaagagacagagtcattgtccgcccatgagcaccactcgaaatccgaatatttcaggcttccgcgtattccattcgtcaggagcttttcggccggattggttcccagtacaggtttggcggtagccaggttccatcggacaggaagtatcaatgtctttcccatctgtctgccgtgcgcaaaagttgcaccttttagggtaagcgcctcttttacaggcactattttttcgtagagcggtgaagttgccgtaggttcgctgccgtccgtcgtataatgtatctccatatcggggcggatacattccagtttcacctcaagcattccgttgtttggagttactgtatgctggatattgtacattgaatgggcgtaaacgatgcctttagctgtcagatgttcattataggcatccagtcctttcaaaaacgcagtccagtccttgtgttcaggctgtgtccatgccacttccgccagggcggcaagacgggggaacactaaataatcgacatcttccggcttattgcagaactccgtccacatagatgcctgtacgccctttaacaaaggagcatattccggtttccagtccgcttgcacaggttcgtaatcgtagatgtctttcagcgtgttatttccaaaataagtttggggttcgaaccattgcgggccttgataacgaatcagatacaagatgcgggcaggggtcataatgaactgatgtcctttttccgcggctttcaaagcagccgtaccaagtccgcgccagccttggatgataacaccttccggcaggaaactgctatttgtcagttcatcccaacctatcacttcgcgtcctttgctgcgtacatagtcgctcatccgtttcataaagtaaccttgcaggtcttcttcgttggcaaggtgctctttctttatccgctgctggcaaagcgggcattttttccagtaccctttctgcgcctcatctcctcccagatgaatatatcgcgaagggaagattgccatcacttcatctaaaacatcttgcaagaatgtaaaagcactatcgtttccggcacaataaatcactcctgaattacttccgcccaaacctggaattactccgatgtaactgtctactacggggcaggccagttgcggataggcagccagtgcagcgttgctgtgagccggcatatctatttcggggataatttctatctggcggtcggcagcataggagaccatttctttaatatcttcctgtgtataaaatccaccgataggagtgggttcacccggttcggcgttacggcggaaatagaagggaacgtccatgcggttcactctccatgctcccacttccgtcaggcggggatatttcttgatttccaatcgccagccgttatcgtccgtgagatggaaatgaagcgtattgattttgagcatgcccatacagtcgatgatacgcaacacgttttccttggggatgaagaaacgggcggcatccagcatcaatgcccgatagccgaagcgtggctcatcctgaatggttactgcggggatactccatcggatattcttagcctgttgattgccttcaacagccgacggcaacaataggcggatggtctgtaatgcatagaaaaagccttttatatccgatgcctttacctgaatctgttccggagtaactgccaactgataggcttcgctttttaaagaagagtcggttgtaaagcagacatggctcttctcactaccacctattgccaactgtgaggtgatccccgagcttctcttcaataagtttataaagttgcggacgatgacagcctgctcatggttctctaccgaaaacagcgtttgagaagagaaggtaaagttgccctctcccggcacgacctgcgccggacggggaactattgaaatagggggagatgtcaagttggcggcatgcatactaatcaaagacgtcaatagcacgagaataattaagatttctttcttcatggtaataaaacttttaagagtgaaaatgtcgaaagagatgcataaacacctgacttccgacattttatcaattaatctattgaaagcagaacactatattagtagaataattgacctgcatttgcccagtatgtcacaccttcgtccgaatacgtgctattcgtataaaaacgaatccaatcaatttccatcataggtgtattcggatcggtcttaggttcggaaatagccttcaatacactatcccatccgtccggacgattgtctgccggagcaaaaaggaaatccaaagccaagccatctgcaggagcaaaaccccaagaacttgtcgaagggacatctacattcgtacttccattgattcctacttttattccatctgtagtcaattctacccaataaatattataatcaccaattttggggagtgggcttgttttagtaccatcttccattgtcgagaaaacaccttgtgtcaccaagtttcctttcgtatttctaagaatatcgattctctgtatttgtttatcaaatacgcccccaggtgcatctctaagctcaatgaccggaacaatacccgtacgatctcccgtcacacgcactctcatttctatacgcattcccggattgatgtgtataaaacgggtagaagcacctgaaccgcctcttccaatatacacagcagccgaaccgtaatctctactcgcaccaagtccgtctcccggtgtggaaccagcttgtacccacaattgataagtaccgtcttctgttacattagaacatttatcgcgattagcagcaaacacatcttgtattgatttagttggaatataattaaaagaccaatgcctatagttaccaaacgacgtattcggcttcgtcggcatactccacccgaaagagctttgtataaaatggaactctacgccactccagaatttccatccttcctctgctaatttctggttgggatgcgaagttaacgaagcataatcagttccaggtttagcacccgtttttccggttatttctacagacgagcttctgtcactcccccaccaagcatcgaatttgcttttattgcctttagatacaaatggatattccggatgttcatacaccaagatcggatcatacatattcggattggcaagagattcgaggtcagtcatcataattactaatttatcagacttcatcggattagcttcagagtttgaagtgaaattcaatgtcaactccttgtctcctgtcttcgctccatccataactaaagatatagggtcagtttttgcgttcagcgctcctgcaggaatagtcagttcactgggcaaattttcaaaagagctctcatcctccgcttttgcgctgatacttaccacaataggtattgccctcggtttatccagactggctaccaacacaaatttatcaccttccgttactatattgtccgcattgccttgtattgccatatttacccgatagtaatcggacactttcataggaaaactagggttaccaatctcgtatccgcgggaaaaagctacaaaattaaagtttttacttccttccaatccagtttctttcagagggaactcaacacgaatactcttctcacctttcggaaaagtaacgatgttatgaaaatctttgaatacgccggacacatcctccgtaccagttttagcggtaaaataaatatcaaaatcttcgttagccaaaacctcgcttccatccttatccggattaatatccaaatcgacaactaacttttcgcccattacaaaagtcgtattattgacagtcatcgtaaaaggaacagcttgtggtaaaggcaaatacttagtttcatcttcacatcccatcaagcatacacccaatagagatattgaaaatagtttgtagaatatattcttcatgtttttttctttataattatcaatgaacttaagttgatgcttctcaatttttgcgccaccccggattctgtgtcagttctttattcaatgatatctcgctcggtggaatcggaagtagataatcacgtcccgcatcaaactggaacccacgtggaagaacatttttcagtggatccaagtaatcgttattgtctaccagaatttgagccaattcttcattcttcggatcaattgatttatataaaacgctgccggctccaaagtaagcgcctccgccacgtttcccctggaataacttatgtgctctccaacgcatcaaatcatccaaacgcattccctgcaatggcagttcagagcgtctttcccgacggatttcttgcagattggcagaaattgtataaccaaaatcagggaaattgggatcaatagctgatggagcgagataagtgactccggcccgttcgcgtaatggctttatagtcttctccaaaacagcagcgtcacattttcccaattcttccgcagcttctgcataagccagcaaggcttctgcataacgaatcattggagtggcagtttctccctgcccacttacgaatgtagtatcaattcccatacggatatgatagccggtagtattactctgatttccggtacttacaatttgaggaggattgattaaatctttatcttcctctgaataagccttcaccagcattttcttagctcctttcactgtcatcgatttgtatttacagtccgaatgcattacagtggccagcaaccgaccatccctatccttaaaagattcattgaaatctttaaattttgcggctgtgggatcaataaagttgccatccacacttaaataattatctactaatgattgagaaagtccggctggtccttcagcatcacacattccactggataaattcgtatttaaactgtgaaccaagttgtcggcaattgaatatttcttccaaaacaacacttcctgagtagccgacaaatcttttgaattgaacaggtttccatacgcatcatcaatattcttcactgatttatcattctcttttgtgtttaatgtaatacccatttgaaacaattcatcccccaaagtaagtacttgctgcaaaaaatcatctgatttatactcggcagcggcaaagtcagtacctttatgatatttctcccacgtaccttcaaagagtgccactctcatcgccataaccatagcagcttctttacaaatacgcaatccctgatatttgctgcgggaatatagcaactctttagctgccttcaaatcatcaagaatgaattgtgccactgccgaacgatcacgtgccggaatctgtaacccgccaacggtagcgtttccatcccaaaacttgtccatcacaggaatactgccgaatttagtcaacaagtaatagtgccaatatgcacgaaagaaataggcttctcctttcagagataatacttccgccgtttcttcagctgccggtactttataatattctaagaagtaattgacactacgtagattctggtatcctttctgccattctgttacgcctccgatagattcttgcaactctccgttcatacgcctgtcatacaccatggctaccatattatcactattcttttcttctcccattattcccatgccataggcacctgcagaaggaagagcaatatacaaaccattgacataattagtcacggcactttgattcgtcaagaatgtctcgctactgggcaccaccaaaggcactttatccagaaagtcagaacaggaagtcaataaagtaccggctaaagctactgctaataaatatatttttttcatcattatcctctatttaaaaagtaaaatcaagtccgaatacaaaattccggtttagcggatacaccataccattaccattagatacgaccggtgaggttagacccggagcctctgtagtagtacctccagccattccgttcacctgattaagcgtttccgggtcaaactgttttggcaattttgttacagtaaacaggttatcgcatgctacatacaatttcagtcgactaataccgatatgttttagcaacttcttatcgaaattatatgatacagtcaggttcttcatacgcatataagctgcattcaataaatagcgagttgaattataccctgtatttacataaaagtcctgattatttttccagctagtcagacgaggcaaaaagccattcggagtctccgggctgaaataatccagatgctccttgaagttgtagctacctgcactaaacatatagctacttcccgaaatcgggaaatccctttttgccactccttgcaataaagtagatacttcaaaacccttatatcccacattcaaattgataccgaacgaatatttgggagttgtattaccaataatcttcaagtcaccatgattgtatatcgtaccgtcaccaccatctattttcccatcattattggaatctatatatttcaaatctccacgacgccacatgtcatccggcttgagcgcactcatatccacctttcgcaagtaatcatcaatctcacggtttgtcatgaaaaggtcgtcagcctgatacccccaaatctcaccaagatccatcccttcataatatcctttattaggaccatacccggtgtgattattgtaaatggttccatctggattattatatttggtaacgacagccttatagctaaacacattgaatcctacgccataactaaatccacatttcagctgatcatgccagttcaccgaaagctcccatccgcggttacgcaatgtagcattatttattttagagcggttttcggaagctataccactaatatcgggaatagcttcggccggaccaatcatatcccttgtcatgcgctggtatatatttgcttctaaagaaagccgattgtcgaacagcatcaaatcaagtcccaagtttgcattatccactttttcccatgtaataaacggacttaccattttaggggtctttgctatcgttcccttgatagcactggcagaagaggcagtaggcaataaccaaccattagatcccaaagcatccaatgacatagtagccagataatcgtataatccggctccattctgattacccagacgaccataagacacacggactttcaattgagacaccggaagtttcagcctctggaagtaatctgttctggcaatatcataaccagcagagaatgaagggaaaaatccccaacggtttccttttgcaaaacgtgaagagccatcataacgcccgctgaactcaaagaaatatatattgtcataattccagttcaacttaaggtaagcccccattgtagcccaatgtgtacgatcttctccggctatgacgttcccgctggcatttgcaaaagaaaagatatcattactcatcattccatctttatacatatactcattggaatcttctttcatttccatttggaatcccgccattgccttgaaagaatgttttccccattgctgaatatacatactggacacattaggcgacaaataataattgaacagacttccacgggcataagaaccgaacttcattaacttccaatcgatattcggataagagaatccttgcctgcgtccagtagcatcacccggttttagcgtccctaaaggagtttcatattgcggattctcatatagaatcatattgttattttctacatcaaaacgtatcttcatttcagccgtaacatcccatcctttcattagagtagccgtagcggatactgacaaggcatctgaaagccgattattttcataattcgaattttgcatgaaaagcgtttcgttccagctgggaatattatattttgaatcaatcggcaaatgtgtaacttgtgacggacgatgcgaacctatcttattataaataatagactggttgggcatcggacgttttatcatttgcaaagttatattattatttaggttgaatctcaaccagtcagtaggcttcgcctgtagctttgtattcagattatacttgctcaaatcatccttaacatgatccagaaagccctcctgatagacatatcccataccgatatagtagtttatcttctgcgatccaccctgtacactcaaattatgtgaatgacgaatggacttatccttgtaatagtatttaaaccaatccgtattgccatactgggcataatatgcactagcccagtcttctccgttactagatacatctattcccggaaattcctctgaatatggattctgcatgaatcccttaatcttttctataaccgagtctgagattctattaatccccgaagcagatgcaccggcatcatacaaagcattattataataagcaaactccaaagaattcatcatctgtggagtacggataggagaactaaaaccaactgttcccgaataacttactttagctttttccgaatttccacttttagttgtaaccaataccacaccataggcggcacgggcaccataaatcgcggctgccgaggcgtctttcaacacactgatactagcaacatcggcgggattcacattctgcatactttgttcgattccgtctaccaatacatacggttcgccaccattgatagagccaacaccacggatattgaattttatatccgtacccaactcacctcctttagctcctcccattgcatccgatgcgaaatttaatcctgctacattaccttgcaaagcgctggtgaggtccgttatgggacgattgacgatatcatctcctttcactacagataccgccgccgtaattgtatttctcttttgcgtatccataccgacaacaacaacctcatcaagcacttccgtgttttccttcaatacgaatcgattgttttgtaattttgtaattttcacatccaatggagtatagccaacataacttatagaaagcgtttgccccgcttttccctgaacagaaaaatttccgtccaaatccgtaattgttccggtttttgcacctttcaccatcacactggcgccaataacagcttctccctgttcgtccactacttgccccgtaatcatcttttgttgggcaatgacccctatcggcaataagaataggaaaatcagaagaaaaacaagtcgttcttgtatcttcattaatttttcttttttcataatattacatttaataattaagattacatttacttgggattattaatctcataagcaacaaactcctcttgtatcgctttcaacaatgatttttcattatttaccgacacatcggacccccaactcattattcctctatagccttcctcacaagcatacttcgcttttttacgaatcgtattctgaccattaagagtatacgttttgccattatacgtaaattcatccaaagcaacatccgaaagtccaccatttataaaatcagagtaagagacttgttctccatttacaccggtagtcccgataaaaggcacaccgagaaccagtttatctgccggaatcccgtactcaacagccatttctgcatcttttacaaattgctcgtaagaatatcgcatcactgccggtccgtagcattggtaagacataaaatccaaagcttcaatcgcatttttcgaaattttataagcaaccggatgaagggatacggagaaacatacgtctttgccaagtatctgtctgattttcacaatcgtcgcactgtagttagcatattctgtctccgtagtaggccattcaatatcaaggtctactccatcaaattcatattccttcaaaacactcttcaaattattagcaaatgcggtacgcgtattatcagcactcatcatttgcctccattgcccgctgccgaatcctaatcgtaattttcggctgtcattacctacctgagctgccaaggtttcgcgtatttttttccaacggtccaaccaagtgtgagagtccttccccggattggtagaatcatcatattgccaataagccaacacttttgctaccatattccaattatcgaattttataccattcttcccaccagtacctgctgccatactccaaaaagaagtttcatccaaacggcctttgaagttttcacctatataaaaatcggcacgggcagtaggcaatacgatttctttgtcaagcgtagaagaccacgcatctacaaaaatcctgaattgctttttattgccatcataatctaccgccagataatgccaagctcccggagccaaacccttggcatccacataggtacctgctgtcactgatgcatttcccaacgcccagctcacagtctgctcgttagcacctaattgtaaggcagccaacactttatctccacttgtttttttaaagatatatgctccgggcacccactcatctataaatatataggtagcaaaagtgaaacttttattaaatgtctcttctgtagaatgcaataatccatcttttccattcatttttccggttccgtcaaattttatcacaccgctacgtccctcataagtagcttcatgcgaaaccccgcctgtaaaagttgcatcatttataggcaagtcaaaagctatatctccattagcataaggacgcgcagccaaataaataagatcattgctgacaatcagattttctaccggaatacggtttaattcgaaagggtcaccaccaatgtattgacaattgattaatgttttctcagccggatcatccactcccggctgtccggtgattgctccttcagggggcattccacccggaacttctacccatttagtgtctttacaagctgttagcgatactaacacgaaaagacataaaaagaatttgtttctcataaatttaagttattaagattttctattcgctgacaataagagtctccattaatcaaacaattggtttttctcctaaaatcaacgtcacaaaaataggtacaacaacaaaaatcaatatttaaaaaatagccattaaatattcacttttcaccaaatcaacccgttccatcggagaaatggttcttatctcaaaaagacaatgattaaaacacccaactatccggttctgaccttgccaaaaccctcttattgaatattcatgttataatccggtttcagccgtttcagtgttgtctgcaaacgccttgataggaggaaatagcggctgaaagcggaaaaagacatccctcgcagaaagatactgcaaacaaggtagagtgctttcagcgcattcagttttctcaaattagctgatggatctatatattcagcgtagtaggtatatatactcaccacgctgaatatatatgcccaacaagcggggtatatagattcatcacgtgggcaaaagtcggtggaatgtgggcttgggttcctttgagtgggggatggagtactacatacaatgaaatgatgtaagagacttgagcaagtcaagtacatggctctgcttacttcagtactggtttgaacaagttcatccacacatagttttattccttaccgcatcaccatcgagcaagattagtaaagctatttcgtaattagtttcaaccctatttgaaactaaaagtttcacgccgggaaacaaagtgtttcaccgtatgaaacgaagtgtttctcggtgtgaaacggattgtttcaagccttgaaacaatttttgaaactaatcgccacaggtgaagagatggtgaagttattgcacttcacccgcaaactccttattcatcggagagacagagaaaaggtgaaaggggagatggaaagatggaaaataaatatccagtggggaaatttattcgatactgtaatgattcagtactataccgaaatgaaatattactttataggctctctacttcttttcctgataattaacaactatccagtgctgtatctcaagaattcacctcctcgcaaactctcatttccatccctttatacactaccacaatcttgtgtagttgcgtagtgccaatagcgttcttcaccctgtcggtgtcagcatagcggttggcctgggtaatagcttccgcccgcaattcctccacccggctttcggggtctttgtatctggcatacttcagctcgataatgtagctatggctcatgtcagggtaaatctccagcatgggagacaggaaaatgtcaacatatccggattgcgtgtctgcttcggaaatgggacggtagaaacggttttgcgctgtcatggcaagcgtgaagccatgtacgaaggactctcctttctgcttgtcgcgctgagaggcgtagcgtttcagacaatcggcgatgtagttgaagtaagattgccatgcgccatcgtaagccaaagcagaggataactcatctttttcatggttgttgaaactgaggtcggcttcattgtatgtattcagcagataagtatagagttgttcacgcaccacttggttgggaatgataagtttagtcttacctttgtacgttccgctcacggtgagcatgccgaagtaatagagcaggctcacgaaattatcggaatctacaatgttggcagctgggaaaccgtctttcaactcgccggtgatgtatccctggctcactaaagtctggataatggaggcatcgtgcgcaaactctttatccttgcggataagcatacgcagcttctcgtaatcgatacgaatgttactttctatcatatttcgcggtgcctttccgttattatcaatatagttcttaacgaaatagagcaccatattggagttgtacaaggttggctgatcataacactcctgcgcaaagcaatagttgtcataccacggtttcataagttctatcaactcatctacagtgtgatggaatggagctttagtagaataataagtcagcatttcgcggacttcgtcctcggtgaaacccatcattgcgttgaatttcggtgtgagggaatagttggtgccaatattaaatccactggtgaggtcatccatcgtgacgggactcactccggtgatgaagcaacgcttgatgctggaataggttccggctttcaccctattgaagaaggcgcgcaggtagccttccttgtgggtctcttccgtatatcggtgaatgctttcggcatccgagaggatggcattggtgaagtggtcatattcgtcaatgaaaagatatatttgctgcccggcaagttcacactgatgatatagataatccaactgctcaacagctcctgctttttcattcaagacttccttaatgcctttcggcaggtattctgcataaatatcacagaaataatcgaagctggtattgcaatgtgcatccaacccttgacggtagttgtgcaactctccactaattcctgagaaattgagatacagcaccagataactgttacggtctcgtgtgggatgctttccgatatagaggtcgccaaacagggcatcgaacttgtcacgtgtacgcacatcataatagtgttgcaacatgttcagcgtaaggctcttgccgaaccggcgcgggcggatgaaaaagaagaatctgtccgattgttctattacagggatgaacgaggttttatccacgtaataataattatcaagacgaatatccgcaaagttcatcatgccgtatggcagcaactttctttctgatgatacatattccataatccggtgtatttatgagttcactttttatcagtgcaaacaaagatacgctctttccgctactttcacaaacaaatgattttaaaaatgttctctgccctgatactcttccatgagtactgcaagaaacaatagatcaaaatggactcatcatcgttgctttcttacacaccttatctataaacatgttcattggggtcgatattgcaatgaggtccttatatgcttcggcatataattcttcccggctcatacctgtcagatacatacttgtttttatataggaaacaaaggtagtatttatctccagaccggacatcatccgtcggagtgtttttctttgaaaattggatatactgaatgtaaaccagacccggttcttcattagaaacatcttaccaaacccacaaagaagcacttttagcgatttttaaaagcctattggtaaaaattgaaaccaacccgctagacagaatcttaaaaaacaagtacctttgtatctcacattcctttaaacaacacatattatgaaaaaactctgccctcttattctttgcacacttttttctctttccgcagcgtccatagagacggtggattatactcaagggctttccgtatggttcgacactcccaacaatctcgatggacaagctatctggctacgtgccaacggcacaggggcgaatccggacaaagcatgggaaagccgttcgctacctatcgggaatggcagcctgggagcgaatatcatgggctccatatccgcagaacgaatcacactgaatgaaaaaactctctggaaaggggggccgaataccgccaaaggcgccgagtattattggaacgtaaacaaacagtcgtcaggtgtactgaaagaaatccggcaggctttcctggacggggattctaaaaaggcggggtatctcacgcaggaaaacttcaacgggctgggagcttatgaagaaaaagacgagactccgttccgcttcggtgcttttaccacgatgggagagctttatgtggaaaccggactcagcgaaatcaatatgagcaattaccgccgcatcctgtcgttggattcggcgatggctgtggtgcaattttacaaagacgggatacggtatcaacgtaaatacttcatatcctatccagacagcgttatggtcatgaagtttactgccgacaaaggcggaaaacagaatcttgtacttagctattgtcccaacaacgaagcaaaaagccatctggaagcagatggaaacgacggattagtatataccggcgttctcaataacaacggaatgaaattcgctttccgaatcaaagctatccacaaagggggaacactgaaagcagaaaacgaccggattattgtgaaggatgctgacgaagtggtattcctgcttacggcagataccgattataagatgaactttgccccagacttcaaagacccgaaagcctacgtcggcaacgacccgtcacaaacgactctggctatgatggacaatgccctgaaaaaaggttatgacgagctttatcgtaatcacgaagccgattataccgcgctgttcaatcgggtacgttttgaaatcaatccggaaatcggcactcccaacctgccgacctacaaacgactggctagctataagaaaggcgtgccggactatcagctcgaacaattgtactatcagttcggacgctatctgctcatagccagttcgcgccccggcaacatgccagccaacctgcaaggattgtggcacaacaataccgacggcccgtggcgggtagattaccacaataacatcaacattcaaatgaattactggcctgcgtgccccaccaatctctctgaatgtacatggcctttgattgactttatacgcagcttggtaaaacccggcgagaagacagcacaagcctatttcaacgcccgcggatggacagcatccatctctgccaatatcttcggattcacagctcccttatccagcaaatctatggcatggaacctgaatcctaccgtcggtccgtggctggcaacgcatatatgggagtattatgattatacccgtgacacgaaattcttaaaggaaatcggctacgaccttatcaaaagcagcgcacagtttgcggtagaccacttgtggcacaagcccgacgggacttacaccgccgctccttccacttctcccgaacacggcccggtggacgagggagtcactttcgcgcatgccgtagtacgtgaaatattactggacgccatccaggcaagcaaggtgctcggaacggacgccaaagaacgcaaacaatgggaaaacgtactgaccaaactggttccgtaccgtataggacgctacggtcagttgttggaatggtctaccgacatagacgacccgaaagatgaacaccgccacgtcaaccacctgttcggattgcatccggggcataccatctctcccgtgactacccccgaacttgcacaggcagccagagtggtactggaacatcgcggagacggcgctaccggttggagcatgggttggaagctcaaccaatgggcacgactgcaagacggaaaccatgcgtataaactatacggcaacttattgaaaaacggtacactggacaacctctgggatacccatgcgcctttccagatagacggaaacttcggcggtacggcaggaataaccgagatgttattgcaaagccacatgggattcatccaacttcttcccgctttgccggatgcatgggcaaacggctcaataagcggaatctgcgccaaaggaaattttgaggtttccatctcctggaaagagggacaactggagaaagctatcatccattccaaatccggaatcccctgtaacgtaagatacggagacaagacgctcaagttcaagaccgtaaaagggaaaaaatacgaaatcaccttaaaaggggacaagttagccgtattataaagaaggcatctgtcctcataaacaaacctgctttacatgaaaaccaaatacgctgttctgtcaagccttttctttatcatacagttagtcggtgttctccctctccgggcagaacactattactttaaacaaatctctctgaaagaagggctgccttccaacgtgcgctgtattctccgggatgagcagggtttcgtatggataggtaccaaatcgggactgggaaagttcgacgggcacgaactgaaaagatacaaacaccaggcaaacgacccgaactcgcttctccacaacctgatttatcagattgccgaagacaagcaacacaacatctgggtactgactgaaaaaggtattgcccgttaccaacagcagagcaacgacttcacgttccccacggacgaggacgggaagaatatcaccgcctattccttctgccttgtcccggacggaatcctctttggcggcaaggacaggatttacaaatatagttataacgattcttctctccggcttctgcaatatttcaacgccaactcttttaaaatcaacgctctcagtatgtgggattcaaagacgttgctttgttgcagccgttggacaggcatatacctcgtagacctgcataccggagagcacagacggccccctttcgactgcgggccggaaattaccaccatgatgaccgacagccggaaaagaatatggattgccccttacagcggcggacttcgttgctactcatacgacggcaaactactggcttcgtactccacccgcaactccgcccttagcaacgacatcgtcctaagcctcgccgaaagggaagggcaactgtggataggaacagatggcggcggaatcaatatcctcacctccgaaaccggggaaatctcccaactggaatatatcccgggacgtgaaaactactctctccccgccaactccattctctgcctgcacaacgaccacaataacaatatatgggcaggaagcacctgcaacggattaatcagcatccgggaagtgttcatgaaaacctacaccgacgtagtccccggcaacgaccgcggactaagcaacagcaccgtgcgaagcctttaccgccaatcgaccgacagtatctggattggtacggacggcggcggtatcaacctctttaacccgcgtaccgagaaattcacccattatctttctacctggaacgataaaatagcgtttatcagcggattcactcccggaaaactactgatttcccttttctccaaaggagtattcatattcaaccccgcaaccggggagaaacagccttttaccattgtcgacaaagaaactacgacacaactttgcaaccggggtaaatcggtcaacttataccagaacacccccaacaccgtgttattactgggcgaccatgtctaccagtatcacctgaaagaaaagaaattcgacaaggtcaccggagaagaagggaaaagtattgtcggcacgctcgtccccttcaagcacgagaacaatcggacttatatcaacgacttcaaacatatctacgaactgcatgacggggattccttgctgaaaacaaccttcgaatgttatcaggataccgtaatcagttcggcgtcacacgacgagcacggtgatttctggataggaagcaattttggccttatccactacaaccccgtttcccaaaagcagacgcacatccctaccaacctgtttaccgaagtcaacatggtgcaatgcgaccagaggggcaaagtatggataggtgcggataatctgcttttcgcctggcttatacaggaacagaagttcgttctcttcggagagtcgaacggagctatccaaaacgaatatctgcccaacgcccggttggtaaacaatgagggggatgtctatatcggcggtgtaaagggtatgctgcgcattgacggccagctgctgctgaatacatcggaaatgccggaactgcaactgttggatattatcatcaatggtgagcctgcacagaacaagctatatagtcatccggcagcaatctctgtcccatgggacagcaatatcaccatccgaatcatgtcgaaagaagaggatatcttccgtaagaaagtctaccgctatcggatagaggggctgaacgaccagtatatcgaatcgtaccagccggaattggtaatccggtcgttaccaccgggcaattacaagattatggcttcatgcacagcgaaagacggcagctggattcccaaccagaaaatactagaactaaccgtacttccgccatggtatcgcacgtggtggttcattctcggttgcaccattctcattgccaccataatcatcgaaactttccgcagaacattgaaacgtaatcaggaaaaactgaaatgggcgatgaaagagcatgagaaacagatgtacgaggaaaaggtacgttttcttatcaatatcagccacgaactacggactccgctgacgctgattcatgcgccactcaatcagattttgaagtcgctctcttccggagacagccaatatctgccgttaaaagccatctaccggcaggcacaacggatgaagaacttgattaatatggtgctcgacgtgcggaaaatggaagtaggggagagtaaactgcaaattcagcctcatccgctcaatcaatggattgaacacgtttcgcaggattttatcagtgagggggaagcaaagaatgtgcatatccgctatcagctcgacccacggatagagaaagttagtttcgataaggacaaatgcgagattatcctaagtaacctgcttatcaatgctttgaaacacagtccgcaggacacggaaataacgattgcttcggaactgctgcccgaagaaaaccgggtgcgtatctccgtcatcgaccagggatgcggactaaagcaagtggatacgcacaagctctttacccgcttctaccagggaacgggagaacagagcggaacaggaatcggcttgtcttactccaagattctggtggaactgcacggcggctctatcggcgcacaggataatgaagaaaccggagccagctttttctttgagttgccgttgaggcaggaaccggaagaaatcatctgcgagccaaaagcttatctgaacgagttgatgatggatgataacagcgggcagccgtccgcgaaagaggtattcgacaccactccatacactattctcgtagtggatgacaatccggatatgacagactttctgaaaagaacgttcgaaggatacttcaaacggataattatcgccggagacggggtggaagcccttcaactggtcagaagccatgtccctgatattatagtcagtgacgtgatgatgcctcggatgaacgggtataaactttgtaaaacgattaaagaggatatcaatatcagtcacatcccagtcattctgctaactgccagagatgacaggcaaagccaaataagcggttacaagaatggagcggacggctatttaagcaaacctttcgaagtggaaatgctaatggaacttatccgcaaccggttgaaaaaccgggaatataccaagaaaaggtatctgaatgcaggattaatccccacaccggaagaaagcaccatcagcctgacagacgaaacattcctgattaaactgaatagtatcatccaggaaaatatagaaaattccaatctgggcattcagtttatctgccaggaagtaggattgggccgttcttcgctttataacaaactgaaagcacttacaggcatgggagcgaacgagtatatcagtaagctccgtatagaaaaagctattacattgatatccggcacggatatgcccttctctgaaattgcagagaaaaccgggtttaccactccgagttatttcagtacggctttcaagcaatataccggggaaacacctagtcaatataaagaaagaaaaaagaaaggtctggctggtaaataataccatcattattctttatgctggctgaagtttccggctgcaagccaattcgccgcatattgaccgattaacaaacgggctgccacagaatcacttctccggcagcccttctttcattaaattagaaaacagagagtatgatacagtttattcctgacctcctcctaaagcacggtataggttaattaaactttgtatttcagtaaaatgattggccgtctgcgagagttgcgcactaagcaacgactgccgggaggtaagcacttccagataggttgtattaccatgctccatcaacagagtagtgcttcgcaaagccgtttgcagggaagtgatctgtttatccaacaagattctttttccctgactggtttgataggcaatcaacgcatcattcacctcactaccggcattgagcaacgtttgctgaaaaccgagcgccgcttcttcctgttgcgcacgggcaatgcggtattgtgccaccacctgtcctctgttaaagagcggctgcgtaagcgaacctaccgccgacgcgagaaacttgcccggattgataatcatcgccccggcggagtttgtccatccggcgcttccgcctaaagtgatggaaggatagaaagccgaacgtgccgcattggtgccatagaacgccgcttccagcgtccgctctgccgagcggacatccggacgggaagaaagcatccggacaggaatccctatcgagaagtcagcaggaaactgctgctttgccagcatcccacgttcatagttgcgtggcgtctccgccaataataaggcaagactattctccacctgactgatctgctgctgcaaatcgaggatcgaaccctgcacctgataataggccgcctccatctgcgacacagccgattcgtttgccagtcccgcattcatcaatgcacgggtagacgcaacggtttctttccatgcctcttccgtctgacgggagatgtcgagttgttcgtccagcatcaacagggtgtaataggtattggcgatacctgctatcaactgcgtacggactgcctgacggtaatcctcgctttgagcataaagcgctttcgcctgtttcttggagttgcgcatacgcccgaaaacgtccaactcccaactggcagtaacgggcaacgaataagtctgcgtagccttctgcgtatcgaaactgctcactattccctgcggagcaagagcaaaagcgggcagaaaagcaagtttggcggacatcagtacggcctgtgcttcttccacacggagctgggcagactgataatcggtattggtctgcaatcccacttcaatgagggattgcagataagggtcggtgaagagttcccgccagtccatattacccagaccggcagtgtcttcggtcaccacttccccgccgtaaagatcgtcgggcacgacagtggcgggttcgtatttggtatagatgccacaaccgctcaacgacagactgatagcaactaatgtgatgatattcttcttcattctttctttcatttatttacgttcgcgttcaacttcactcttttctttctctaaaagcacctgcacatctggttcctcttccatcggtttacggattttctcctgcaaaaactcaaagatgatgtagaaaaccggaacgacaaagagcaatgccagtgtcccgacagccataccgcccacaacacccgtacccaacgaactgttgccattggcacctgcaccggaggaaaacatcagcggaagcataccgaagatcattgtcaacaccgtcatcaggataggacgcaagcggacttgtgcggcagagtaggcagactctacgatgcccattcccttgcggcgacgttctatggcgtactccgtaatcagaatggccgtcttagccagcaaaccgatcaacataatcacacccgtctgcagatagatattattctccaacccgagtattttggcgaaaaggaacgaccccatcagtccgaacggcacggagaagataacggcaaacggtatgaggaaactctcataaagacaggccagaatcagatagataaggaagatacagatggcgtaaatgaaaaccgtctgcgcaccaccgctacttgcttcttcgcgtgccataccaccatattcatatccgtagcctgccggcaaagactgtgcagccacttcttcaatcactttctgcacctcgccggaggagtaaccgtcggcaggattcacattggcggtgatggtgctgtaaagattgaagcggttggccgtttccggtcccagcacttgcttcagcgtcacgaactggctcaccggagccatctgcgtaccattgcgtacaaacatattattcagtgcctgctcgtcgaggcggtattcaggcgaagcctgcatcatcacacgatatactttaccatactgattatagttggagatatacgcgccaccgcaataactgcccaccgcatcgagcactgcactcggcgaaattcctgcacgcttacatttggcagcgtccacttccaccgatatctgcgggaagttgatagcatacgatgtatacgccatcgctacctccggacgctcgttcaaagcaccgaggaactgtatagccgcttcatagaacgtagccagttctccacccgtcatgtcctgaaggttcagttcgagggagttacccataccgtaacccggaatcatggcaggctggaagctgaatacctgcgcttcctttatcgcctggaattgtccgttgaggcgtgacaccacagcatccgagctatgctccttgccctttcgttcgctccagtctttcaggcggataatgatcgtaccgtacgaagttccctgaccggatatcagtccgtatcctgctacgcgggcgtagtgttctatttcgggtgtatctttcaggatattttccaagcggtccatcactttcgtggtttcttcgagcgtacttcccggtgaaatgctgacattcaccataatgacaccttggtcttcctgcggcacaagtcccgttttagtggtactcatcaggtaaaccagcaaagcaacggcaacagccagtgaagtccacaccatccagcgatggcggataaagaacatcacacctctcttatatttacccaatacggcattgaacgaagcattgtaggctgcacgtacccgtccgttgatgctcttggcgctcttggttccgtccgacggacgcatcatgatggcgcacaaagcgggacagagcgtcaaagccgaaatcatcgaaatacctacggcagttgccatcgtgataccgaattgtgtatagaacacgcccgaagtacctcccatgaaggttacaggaataaacacagccataaatacacaggtacaggagacaatagccatcgtcacgtcgcccattgcgtctttcgtggcaagataggcagacttatatccggcatcgaacttggattgcacggcctccaccaccacaatggcatcatccaccaccgtaccgatggcaagcaccaatgcaaacagcgtcaggatgttcagactgaagcccgcagccaccagacaggcaaacgtacccaccaacgacacaatgatagagatggagggaatcagcgtactcttcagatcctgcaagaagaaatagaccacgaggatgaccagaatgatggcaataatcagcgtctccaccacattgtgtatggaagcgaaaaggaagtcattggaactcatcatcgtgacgaactccgttccttccggcagattcttctccatccgctctatctgcgtagtgatttctttgttgacagcggtagcattggaaccggctgtctggaatatcatataaagaacggcaggctgactgtccatctcactgcggaagctatacgtcatcgtacccagttccacctctgccacatcttgcaggcgaagtatcgaaccgtcttcccgcgaacggacaaccgtgttccggaattcttctacgcttttgaggcgtccgcgatatttcatcgtaaactggaaaacattcttcgagctctcgcccagtgaaccggtaggagcttcaatgttctgctcacccaacacggcggttatgtccgacggaaccagtccgtattgtgccatccgttccggtttcagccagatacgcatactgtatgtatcgcccagctccatcacgtctcccactccttcgatacgtttaatctgcggaatgacattgatgtccagataattggccaggaacgtctggtcgtatcgaccgtccgtgcagaccaaagcaccaatctgcaagaagctggtctgccgcttcatcgtgctgacgccgactttcgttacttcagccggaagcaatccctgcgctttcgctacacggttctgcacgttgactgccgccatatcgggatccgtgccctgcttgaaataaacctgtataatggccaaacctgcattggaagcactggaactgatgtacatcatgtcttccacaccgttgatactctcctccagtggcatgatgacactgttcatcactgcctcggcatcggcacccgtataactggcagttacgtataccgttggaggtgcaatgtcaggatattgctccaccggcagcgtgaagagcgaaataagccctatggccagaatcagtacggagatggagatagccatcaccggccgttttataaatatatttcctttcataatcagtctccttcttattttacttgcatgccttcgcgcaccagtccggcgccttccgatacaatttcatcacctgctttcagtccgtccagcaccacatattcgcgtccgtcattgtttgcggccactgttatcagggtagatacagccttcccgtccactaccttatatacaatcgtcttatcctgcatcttcacggtggccgtttgcggaatggcgatacagtctttataaatgctcggcactaccaccgtgcccgatgctccgctatgaagcaaccgcgattcgttgggaaacaccacgcgtgccaccacagtacccgtttgccggtcgatgacgccgctgatggattcgatgacacctttcttatcataaaccgaattatcattgaggcgcagttccacttccggcatgttcttcaacgcttcgtccatgtcgccatactggcgggtgagggcaagcaactgattctcggtcatggagaaatagacgtacatatccgaattgtcgctgaccgtagtaagcggatagggcatattggcacttaccaatgcgcctgcacgataaggcaatgcacctacgactccgtcactgggacttttcacctcggtataagagagattgttgcgggcactgatctcttgtgcttcggcctgcgacagttgagctttggcggtgagataagaattctcggccgttttcaggctaaattccgaaactactttctgcgcatacagttctttgttgctcttgtaggtcagttcggcagtacccagcgcggcacgtgctgcttccacattggcaatggcggttttgagcgcggccttgtaaggcacttggtcgataatgaaaagcgattgcccgcggcgcactttttgtccttcggtcacacagagtttctcaatcgttcccgacacctgcggatagatatcaatatcctgccgcccacgtatgctcgccgaataggaagaagaaaattccttatccaccgcttctatctgcactactgcataagaagaagatttcactcccgcatccgatgcttgcttgcaagatgccatccacactgtacaaccgacaatccctatcagccgtatccattttttgcttactgtaatcatactttctcttttgatcttttgttaaatcctggacaaaagtaggagaaaagaacaaggcaagagtgaccaatttccctccataaatgtcctattttcgccatttacgtttattatagctaactatttggcaataaacgacatatcaaacaaatctgaagaagtatgggacattctgttttcccgattattcaccaactttgcaaaaagtaaaaaaggaaagaacatggaaaaagagaacattataacggtggatatagaagattttaaggacagtcagcacgtccttgattatattgatgatgactttgcgatagtcaacagtctggaggggactccttatagtaatgatacaatcaaactgaattgttttctcatcgcggtttgtatagaagggtgcatccagctggatgtcaactaccggacctataagttgcaggcgggcgagctgctgctcggtctacccaatacgattatcagccatacgatgcttagtcctaaatataaagtcaggcttgccgggttctctacccgtttcctgcaacgtattattaaaatggaaaaggaaacgtggaatactgccattcatatccacaacaatccggtgaagtcggttgacaacggggaggatcaaacagtcttcggattctaccgggatttaattatagccaagataaacgatgagcctcattgttaccacaaagaagtgatacaacatctcttttccgctatcttttgcgaaatgatggggcagcttcataaggaaatggaagccgccggcaatacggaaggttcgaaagaaggcatcaaacaggtgaattatattttgcggaagttcatggaactgttatcgaaggacaagggtatgcaccgttcggtgagttattttgccaacgagctttgttatactccgaagcatttctcgaaagtcatcaagcaggcgtgtggcagaactccgttggatttgattaacgaaactaccgtggagcatatcaaataccgattaaaacgttcggaaaagtctatcaaggaaattgccgaagagttcaacttccccaatcagtcctttttcgggaaatacgtaaaagcgcatttgggaacatcaccggccaattatcggaacagaaaagaagaatgacaaaaagaacagattcttatgttagacaaatctttttggggatcttgttcatcttaatataaaaaaagagtaataatgtgcacattattactcaataacactaagatagctcccgactcttgacttatacataagtctatattgctttttcaattctttagagagaaaagaatgttcaatcagttgatcagtcaattcatatatcttactatatttttcgagacaagagtttaccaaacgctcgggtagacctatttttaagccaaagtgataaaaagtcttcccagtaaccgccgatgcaccaccgaaataatccggttcaggattaacaaacaaacctttgctcatggcaaagataccatcgtttatatggagatgagtattcaataaatcgtaagcaggagataggcggaatcttcctttcttctcttccaataaagaaaagttctttaaatgggcatcgccgttagaatagacaaagttgaacaagataagttcaaaaaaacgcaatttatccacttgggggacagagctgtatttatctataattcctgcaaactcttcataggccagattgtcatatttataatcggaacctccatttttcctggtaagcccggctaaagaagcaaaatcctccttttgtaactttcctttctccgacaaatcaaaacgtcgtacaaaataagcaggggttccgtcctgaaaaaagcataatccattaggagctgtcggaatcccatatacttgcgcagctatctgcattgtcaaatgttcgttggcaggacaaaactccttgttacggagattattgggaacaggctttaatatgaattcgccctgttctccctctttggtcaatcgcaatatcccgtcatcggcaactaaagaatacttaatctggactccagaaacggatatgcgtttgctattgttattgaagagatcaataccgacattatcgtcaaaatgcctgtaaggtaattcacaagatatatttttcccatcagaaagctgcttcaaggctttgggtgaatatccgctttctccaccagtctcccgtaaaagtgagggacaaatatgaatatcagtttccattatcacatttttttaattgttattgctccgattgtatctgtatgggcagtagccagaagaataccaaaatcatcctcttcatcaatatgcaggtttctagcttgaataatccgattatccccttcagatgtcatattaaaaaagacagggaaaagataggaagaggtatattcctgctgtgtcttgggcatggtcagtgagacagctgggagttgtggattattataatagtccgtatcataacagaatgaatagtgttcgcgatctatttctgttaacagaccggcataaatacctttgatatagactttggctgaccgactcatatacgtatgtatctattattgaatatgaatactaagtcctaaagttttcaggacattaaaaagcacatcgaaacgggggttaccacttccacgttccaaacggaccaaagcattaatccctattcctgcaagagttgccagcgtagcctgatccaaccccaactccttacgcctttcgcgaatctgttttcctatctctattaaatccatcattcaccatatatagtgattttatcacaaagatagaatcttttgagtataaaagcaagcaaattcaccatatacagtgaatttttttatatatagtacagtattaaagcatactatcatgcttttcaccctatatggtgatttaagagggatacatacatatagaggaaagac

SEQ ID NO: 8216 - DNA, 4385 bp, Unknown
  gut microbiota DNA sequence
agacgagaacaacaactctaataattttgccactggcatcgtagaactacctgcacttcgcaatggtgcaaacgatgtgtttgtaacacactgcaccactttcaatgggcagaaagtaacctctttcagtatggaatacgataagagtaagaagcattcccgttgggttgcttttcgattcgataatcaaactagactgcaaggggcaactcgtggcgataattttattccggacccttctcttgatatggaatatcagcgtactcaaacagattttgggagaaaaggttatgatagagggcacctctgtgcttccgctgatcgactttataaacaagatgctaacgaccagaccttttattatacaaatatgagcccacaacggaacaattttaatacaggtgtttggttagcattggagggacaggtgcaatcatggggacgtagctgtacatcttcagatactttgtatgtggtaaaaggtggaacgattgataaagaagaacaagtcaaagaatatataggtggcgaccgtagcaagcctgttcctaaatattattatatggctttgttgtttaaaaagggagattctttcaaagctattgccttctggatggaacatacagacaataaacctgcaaaaacaataaaacttgttgactatgcattatcaatagacgaactggaagaaaagacaggaatcgatttcttcccgagtctgaatgataatttagaaaatgcgcttgaggctacgtattcaacaaaagcgtggtcgggattggaataagatcaccacgttaataataacagtctctttgtcaaggcggggtatacttcaggattctaccacccatttctcgatattacgggttttctcactgaagttaatccctatcttgaatagtttgcgtccatccgcttcgaaaggcagtgcatagtgtttgtcattaatctgctgcaaagcctcttctgctgttccgtttagcttgaattccattatataaatgaacttctctgtctgtagcacgagatctatacgcccgtcattagtgtggtattccaccttggtatagaagccaactagcttgaaaacgatgaaaagtacgttctcataatgtagttcctgctcccggattacttcgtaagtcgtatcggcaaagaaactctgcaggcggtggaagaaagaatcataatctcccgtttctacttcacggacgaatttttgaacttcaaatggggattccaccttattcacattcgcgtaaaaaggaagcagaaagcgaatgaatccttcttctacttcacgattggggaaacctaaacggtatatgccaaaacgttcgtcatatcctttaatggtgaggtatccgctttggtaaatcactggaatcgggttggttgattcggagtcgatgctattcagtacttgtgcatcagtttcttcgtgtgccatccgttccagatcataatgatgcttttttagtaacttaaccagataggtaggtgtccccgtctcaaaccaataactgccgaattctttatatttgaaagcgttgagcagactaaacggattatatataccgatagaattatgtgtaaaatgatagccatcataatattcttttagttttgtacagagtttgtcatacgacaaactttgcgtctctgcaaactcatgaagttcgatatctaagttttcatgaagctcctgatcgctgacaccgcagatttcaatataatcttttcgcattgagatgtcatccaaattattcaagtcgctaaacacactgactttgccgaactttgtaacgccggtcaagaacgcgaactttatatagccatccattgttttgagtgccccatagaatggttttaaggtattccggaattgtttttgcaactcttcattgccgatagcttgtaacatgggtttgtcgtattcatctaccaaaataactacgcgttgtcctgcctgcttgcaggcgcgttctatgataccggcaaaacgcaaagaaaatgagcgttcggatggctcggcaccatagagcttttcccatgcagtcaacgatttttcgagtatattatccagactttccggcgtatcatatttttcgatattaaggtccagatgtagtatcggatatttaatccaatccttttccaacctttctacagccagtcctgtaaacagttctttttttccttgaaaataggcttcaagagtagagatgagcagactctttccgaagcggcgcgggcggcttaagaaatagtaactaccggtttttaccatttgatacatcaatgccgttttatcaatatataaatagccgtcattacgaatcttttcgaaattctgtatgccgatgggataaattttagtgctcatatactccggttttataaatcaattacacaaaggtaataaatttccgggtacttcattgcttttaaaaagaggaaagtataagtatagttgcttttaactgaatggagtgtagaaaacagtacgtactgtttgaagtctatattttaatgcctatatttgtctacatttcaattttataagaataggcattatggatactactgatactactttcagaatatacccgatagggatacagaattttgaagacttacgcaataataacaacgtttatgtagataagacggagttgatttatcgtttggctaataccaataaggtttattttttgagtcgtccccgtcgttttggaaaaagtttgctggtgtccactcttgatgcttattttcgggggaagaaggacttgtttcaaggtttggcaatggagcgtttggagaaagagtggaatgtctatccggtgttgcaccttgatttcagtatgacaaagtacacagcactttccgaccttttgggacagttgaatctgaacctatacgattgggaaaaactctatggaaaggaagaagtagaaggtacgccggcggaacgtttccggggagtgattcgtcgtgcttatgaacagacgggcaaaccggtagtagtacttatcgacgaatacgatgctcctttattagacagtaaccatttgccggaactgcaaaatgaacttcgagaagaaatgcggaaattctttagtcccttgaaagcgcaaggagaatatcttcgtttccttttcctgacaggtattagcaaattcagtcaaatgagtattttcagtgaactgaataatttgcagaatatcagcatgagagatgattatagtgctatctgtggcataaccgaacaggaattgcgtacacaattgaaaactgatattgaaatgatggcacaggctaataatgaaacttatgaggaggcttgcacgcatttgaagcagcagtatgacggatatcattttagtaaaaacagtgaagatatttacaatccattcagtttgtttaatgcatttgctcaaaagaggtatgccaatttttggttttctaccgggacgcctacttttttaattaatatattgcagcagagtaatttcgacattcgcgagttggatggtgctatggctactgcagagcagtttgatgcgccaacgagtgttatttctgatcctcttcctgtactttatcaaagcggctatcttaccatcaagggatatgatccggagttccaactctacacattggcttatcctaacaaagaagtgcggaaaggattcatagaatctcttatgcccgcgtatgtgcatttacctgcccgtgagaatacattctatgtagtttcttttatcaaggatttgcgtgccggaaaactgaccgaatgtctggagagaatcaggtctttctttgcttcgattcccaatgatttggaaaataagcaggaaaaacattatcagacaattttctatttgttgttccgtttgatggggcagtatgtggatgcagaggtgaagagtgcaatcggacgggcggacgtagtagtaaagatgcaagatgccatttatgtctttgaatttaaggtagatggaactccggaggaagcactggagcaaataaatagtaagggatatattattccttatcagcctgatcatcggaaagttgtaaaagtaggagttaacttcgatagtgcgacaagaagtattggtgattggaaaattgtagaggaagtataattctttctttccctattgattttgtcaatacctctttcaacctatcaccatcgttctgaaactctttattcattgtatttacagagtggtgatagattgaaagaggattttcatttttatgtatgagagagcttgctggcgcagtctgaaaattgggggatttgattcaggataatcactccttaaaaatagatttatttggtgcagaaatgagctaaatgataattttgc

SEQ ID NO: 8217 - DNA, 8776 bp, Unknown
  gut microbiota DNA sequence
ccggatcatcatagttctcacaggaagtgagacctgcgccacatagcagcaatccggtacataatatagatagtaatttcttcataattgtttcttcctttcttattgttttggattgataactacacattcttaaaatctataaccaatgttcaagaaagcgttgaacgggaatgcgtagaaatacttagagttcttagaaaacttgtaaacacgtgcgtcaccgtctttgtaattatcatcacggttttgttcgaaaccacctgtacgcaaatctgtattgttcaagatattagtcaaactcaaattaaggctaatgctctttccattgcgtaaacgaatgtattttccgatggaagcatccaacataaatccaccatctagtttctcctgactcggtacatggagaaccggatttccattagcatctacgccggcaccatttttatccaatacgctgccaagacgacgatagcttgagaaatcgatatatacacgatcataatagtttccggtcaaattgaagaaccaaccttttacgttataatccaaagcaaggctataagcagaaagcggagtaccattagcacgcatacctttagcataaacacgatcgaggtttgactcattctcactttcatatgtcaatacagcatccggattattggtgtatttagcttcactccaagtaccgatagccgtcaatgaaagttcacttgtcaacttaaaggtagccgctgcttctattccccaatgttccttttcaatgccattcatagaaagataagtgaaccgtgcttcgctatcattataaaaagcatccatttctacctgattctggaagcgagtgtaataaccagtcaaacgtcccatcacccatggagtgttgaagttataagtcaaatcaccaccaatgatgcgctctgttttcaagtctctcacaaagtcattcttaatacgtggagcgataaaagagttataagccaacggtgcacgttcttcatatccggcattcagcgtgaaagaatggttaccattgatagcccaattcaaaccggcttttatacctccttcaaggaatttagccgtaccgctgctacctagtgatttcaacggagcacgtccgtttctcatcaatccatcgcggaacatctgtgtagatcctatcttaccggaagcaaaatagtttaatgacccgccattgttaccctgataacgcacccatgcactctgcttattcacatagatgttataatcataaccaaatttatcaccttcaccaatacggcggttaggattatcaagatcattttgcaccatactggaactagctccatgatcgcgcactgcaaatttgtcgacgtcagtataaagctgtccgcccagcaaatccttcatttttttataatgcatacctttggttgtattcacggcaactcccgcaatgtagctgttgtgttcattccattgatgattgaataccgaactaaggttgaaagccaattgatcgtcatgacgttcttctacataataaagtgtctctttacctaatgcattcgcctgtttattggcaaaataaagagcatcccaatctaactgacgataagctttattatttttccaattatctgtgacttcattaaactgctgcaattcatcggcagtaggaacagattcccatacatcaaagattgagctaggcaactttttataataatccgggcgtggatcggccgcattaccattccagcctagagcacttttcccatagttggaatatttgaatccggcacttgtcactaacttcttattatcatcaatagtgaaattccatgaagcaatagccgatggttcgaactgacgtacaatacgtgcatttcgtttttctccattctgatatccccagttcggattataataatgactgttcgctaaataataagcttcttcggttgccgccatttgctgtcctctctctgtcggtgttccccaagttgccaaagagagactatggcgttcgttgaatactttctccgcaccgaggaagtaagaaaaagaattatatttgattccttcaatatttccctcattaccccagcgataacccaatgatccggtaaatgcccaaccattgttcatcagacctgtagaataagtatacattccacgcaaaatgtagttgcggttactacctgacagtgttagttttgagccggccgcatattggctggcacgtaaattgatattggtggcacctcctatcgcgccaaaagtaaagttgttaaattcaaaaggaccgatcccctccttattacgggtagcatcgttcaatcctcctattaatccgtagctgaaacgtcctgtttctgcatcattaaactgtaccccattgatatacatgtcactgtactgggaatcatatccccttacacgaaatctcattgggctaaacagataacctacatttgacagataaacatcattgttagaagtgaccaatgcagatgtgctctgtgctgcatcatcatcctcattcaattgtgattctgtaaacatgaaagaagcattgtcctcacgggcattttgctttaccttttgctgtgcaaaaagtgctggcattaagcaaaatagcacgatcgctaaccctagtcgttgtttcataatttaatttatattaatgttaattggtctttcattttgcgacataaaagaaataagctgttacgcaaaataacaaagaattttatatataacaatggtttttgcaaaaaaagtaactagcaatggtggtttttccgttttctttttagatatttgtcatgcaaatgacaaattacccacttttaaaatcaattttaaagatgaaaaaaagcttaatgactttaggtgtactcgctctttttgtcctcatggcctacggacaagaaaagaaatttgccctctatagtgtagcgttctacaatatggagaatttgtttgacaccattcatgatgaaggtaagaatgactacgagtatcttcctaacggtactaatcagtggaatacgatgaagtataaggctaagctgaaaaacatgtcggaaatattaagtatgttaagtaccgacaagttaccaatgggtcccgccattatcggcgtttctgaaatcgaaaattacagagtattggaggacatactgaaacaacctgctttagcggacagagggtaccaatatgttcactacgaaggagcagaccaacgtggtgtggactgtgctttcttctataatcccaaattgtttgaactgacaaatagtaaactcgtaccttatgtatatatcaatgatacggtgcataagacacgtggtttcctgattgccagcggtaatatcgcaggtgagaaaatgcactttatcgtcaatcactggccttcgagagcagctgcttctccggcgcgtgaacgcgcaggggagcaggttagagcgatcaaagactcactgttaagggaagactccgcagccaaaattgttatcatgggggatatgaatgacgacccgatggataaaagtatggccgtagcacttggagctaaacgtaagcctgctgatgtaggacctacagatttgtacaatccttggtgggatactttgaaaaaaggatacggaactctgatgtacaaaggcaaatggaatttgttcgatcaaatcgtattcacagggaatttgttgggcactgaccgcagtacactgaaattctataaacatgaaatcttccgccgtgattttatgttccaaaaagaagggaaatacaaaggttatcctaaacggacgcaagcaggtggtgtatggctaaatgggtatagcgatcacttgcctactattatttatctaattaaagaagtgaaatgacaaaagcattatttaaactattcatcctgttcatagcctgtagcactgcaatctcatgtagtgagcaggattcgcctgaacttccggacaatccgggcaataccaatcaaggaattgcctctattgaccaaacgcaaatcaatgcaaatggaggcggatttatcatccgtgtaaaagctgatggcacatggcaggcttcaagcagtgagacttggtgtacattgagtagagcatctggcaatggaaatggctctatcagtggatatatgaaagcaaataccggagctgaacgaagtgtcattattacaatcatagcagggaaagaaaaagcagagtttacactcaaacaattagcaggcaatggctcaaatccagatcctgatccagacccggaaaagccttcaggatatgcagggaggattgaaattccagctttgcgttctggagatatgtataagttcatcacacacactactaaagagaataacaaagagattattacttatagctatgagtatgattgtaacaaaatgcattctcgttgggtcgcatgcacttttagcaccgccacttctgaccaagatgcaggaagaaatgagaactttacagaagatctttcattacctccagcatacagacttggagaaaaagctttttctggttctaactacagtagaggacatttaatagcttccgaagacagacaatattcagtagcagccaacaaaaaaacattctacatgtcaaatatgagtccacaaattcaagatggattcaacggaggtatttggctaaatttagaaagacaagttcaaagtaaaggctatagcattactaattcaaaagatacattatatgtagtaaaagggggaacaattagggatgaccagatactaaaatatatatctgatggctctcataatatagccgttcccaaatactattttatggcactgttatcccttaaagatggaaaatattctgccatagggtattggtttgagcataaatcttataatagtaaagaacccttttctaaatatgaggttactatagacgagttagaagctaatacggatattgattttttccctaatcttccttccgatatagaaaaagacgtagaaaagagtaaagacaactggaaatggtaacaagtcataccactacttaaaggtattcaacaaatatctcaaccttgaatttaaatgaagagtaagttcctttttaatgaaatttactcttcattttttatccatttcactttatcgagtatagtcgataaaaacacctctattttatcgattatattcgacaaaatagaagattactagaactaagaccaatgaaaaacgatcaattgctcccttttcttaaatataaaagaacagcaacaaaacaagattacaagcaattaccacaccgaatcctcccaaaatccaaggacgaagtttactccccttccctgcaaagaatagagcatagaacatgtttaccattatattgctaataatagcctgcatactacaagcagtaattatcagtgcagccacactgcctgtattttgcaacaagtttaatataaaaggagttatatcactaaaaccggaaacaaaagacaagagatttaatccgcctgtgcccgcatacactaacgtatagtgagttaagaaagtgaatatcacaaagagtacggcaaaaatcaaagcaactttaaattccaacgggttgctactatcatcttcttctgtttcagcaggctggtcttccggtcgtttttgccgggaatggataaaccaggcaacaatagccgcgactacagccatagtcaacagatatggataaatagacaggaagatttctctactgaaaataagtatcagtatcataaatcgcagaaacatcatgctaacagccagcaacatggcagcaacataatcagtcgcttcctgctctgatgcttttcggcttttacgggcaagtaccgagatcgtagccgtactgctgtataatccaccaataataccggaaactaacgttccggattcatggaatacatatctctttaatagataagagagataggaaatgccggatactactaccgttgccaaccagatagaataaggagtaagattaatatccggaatcagattcttatgtggaagcatcggcaagataataccactgatagctaggaactttgccaacgtaatcatttcatcattcttcattcgttgcgcaaattccgtaaaagtatgtttgagttcagtcagcaggagcacagtcacaactaccataacataaaaccaggaaggttgggtagctacgataggagccatacaataagtaatcagagcaataatgatggtagttacaccaaaaacatgaaattgtgattgctttacataatagtttaatcccaacagcaatcccaataccgctccacctcccataaacagacgcatatccgtagggtctaagatataaagcaagtaacccagtataccaataaaggtaaaggtgcggtcggttccgaaaagagtagtttccccctcacgcttcagactgattcgacgttgcgaaagtccgattaataaagaaaacaaggttactaaaacaaaagtaaccaattcacgcggcacataactgtacaactgttccatatccatacactgctctcttttttatataagaacaaatatacggtttatttgttaacgctcaccacgttttatacggttttttcattagctgtgagttatagtagcgtatgtcgcccgttacctcctcaccgataaagtcgggttttacaaaagcctcatcttccgattccaactctacttctgccacaataagtccttcattctcaccataaaactcgtcgacttcaaatacatgtttgccactacgtaccaaatagcgggtcttgtcaataatccccggttcgcaaagcctcatcaattcttctgcttctgataaggccagctccttttcccattcataacgactggtaccggaagcattagaagctccctttattgtcagataacctttttcatcccgaatacgaacccggacagtacgcccgcgagcactactgatatacccctgcacaatatgactctgcgcaaaagccgaagacttgaattcaccgataactaaaaatttacgttctatttcctgtgccatggcacaaagataaattaaaaattgaaaattgagaattaaaaaatgatagtttgatacctcacatcatgtatcagaaaactacaattctcaattttcaagtctctatttatttcagaatctcgtcatgaactcaatcacgattttgtcccgttccgattcttttggaacgccggagttcttatagaaatatttctcgaagttcagtcggaggtcggcaatgaaagctttggaaagacttaatgtgattccgcctgtcacacgatgtcgggcataatcatttataatcaaagcttttgtcgtttcatccatcttaccatcactatgatcggtcatcatatcatagcgagccaggaaggagattttattgaatactttctttaatggtaaatcgtaattaataaaactattcaccgcatgaacatctttaaatgcttcgtgaccgtacattttatataaatattccgcctcaatatgaaaacggtcattctgataatagacaccggcatcgtacatattaatccgcacattttccggttttatcatttgggtgctaagtgtcagattccagttcttattaggcagtaactgcgcttttatggagtaattcagcgttttatgccattctttctgatttgtcagaccggagccgttaaacaatcccccttcaagaataaatgggaaaccgtctttattcgtataaccagccgtcaaaccgacatcacgcacatttcctacttgcttggcaatgaatgaacggttggcaaaatactgctgatgtggtgagcggtgagcatctatcgtgaaaggaacgcgcatctgaccgatcgtaaaattcaggtctttcaccggaaaaacacgtgcatacgcatcaagcatcttgatagagccttcatcggaaaggtcgatttccgctttataagcaactatcggatgcacatttcccgaaacactgaagcgtgcattacgtacttcaaaacggctttcacttgtttctgtctggtattcgtactttccccggattgttccgtgaatctccggcagataatccttaaactccatggtctgtttatccagcatcttaccatcccctgcatcttcttttgcctgtccaaaggccattgtcgccagcaaaagcataacgacggttgttctgattctactcatttcagttgtctgctactaaattcacggcaaaagtacaactgtgaggatacacggagatgacaaattaactacgggaaaatgacagaaaagttacatttatattacagagaacacaaatgcattacaaaacaaagagttcgccacaaattacgcagattaacacagatcggatttgatatttatcctatcaataaccaaacaatctgggttaaccgtataatttgtggcgaacttatcagccgaaaaaggaaaatgcgatcagcataatcaatgccaaaataattaatgagacgaacactattttgacaaccttctgggcttgttcttcttctttcttactaattgctacttttttcttcaccttacccataatagttagctttaaagttcaacgctaacaaagtaagtacaaatctattaactttccaaaaataattcttgctaattttattttttatgattcttgtgaagaaaactccatcagataagctttgataaagccatctattttgccatccatcacaccgttcaca

SEQ ID NO: 8218 - DNA, 865 bp, Unknown
  gut microbiota DNA sequence
gctggttcccctctttcagagccttaaccaaagcttgggcttcatcctgtgagtatttctgggacatcttaatcattttaaatatgaaaataaaaaacttattatattaagtccttattttcaaatatattaattctttctgatatagcatgaatcgcgagcaacaaataaaacaggcctcttatttatttcaccagtctttgatatttgctgaataaaaaggttgagaaggataataatccgtcagttgctgaatgaatatcttttcgaacatctttccgatcagttgcatttacccaaccttcttctatttcttttaattcatcttcaagttgcttctgatccacctctacacctttctcggccgctttgatgaatgtatcgatatacacctcccagcgctttgcataataatcacttatcagcccggcccacgaacggctggcataatcgttcaggcttcctccccaagtcgtaatcaagttgcgagcgttcttttcataatagtctttcaattggggagaatctcccatcttccgcgcatcatcaatccatttatccagcgaacagtaaggatgaaaggcattcagtttatccaaatcattcaatatctccttcattttctcgccgcaagctttcaaagcctgatagtctttagcttcaaccatcctatcaaactccattttcacgtcaagaaagtagtttccaagcacctgtctgcctacagttatcaaatccaggcgaaaagcatctctccggtcagaaggtgcttcgttcagttttctccaaacctctagtagttcaatattgctgtacacattacttgtgcgtttttcactgttcttattcaatgcagggcgatacc

SEQ ID NO: 8219 - DNA, 15351 bp, Unknown
  gut microbiota DNA sequence
aaacgaacgcgattattttgaaatcaagatgacttataatgagctgactagtgactatgtgttggaaattaccgatttcgcagagccggatgaagtggatgatatgaaagaattgtgggagtcacaagtagctaaattaagaagaacttgtggtttttagttaactttcaactaaaaattttcgatgctcctttttttgtgctaattttgcatcctaattgcacgaacctattaagatgctacgcataaagaaattagatatattcatcgtaaagagttttttgatgctctttattggtacattcttcatctgtctgttcatattcatgatgcagttcctgtggagatatgtagacgaattggtcggaaagggattggagatgagcgtaatggctcaattcttcttttattccgcgttaacattagtgccggtatcgttgccattggcagtgctactggcttctttgattactttcggtaactttggcgagcgttatgaattgcttgcgatgaaagccgcaggtatttctctccttaaaatcatgcgtccgcttgctttcttcgtttgcgggcttgtcggtgtctcattctatttccaaaatgtagtaggtcctatcgcccaggctaagctgggaaccctgatcctttcgatgaaacaaaaatctccggagttggacattccggaaggagttttctattctgaaatcaaggactataatttaaaggtagctaagaagaaccggaagaccggtatgctatatgatgtgctgatttatagtatgaaagatggctttgagaaagcacgtattatatatgctgattccgggcgtttggagatgaccgcggataaacagcatctttggctgcatttgtatagcggagatttatttgagaatctgaaagctcaaagtatgaaatcggagaatgtaccttaccgacgcgaggaatttagggaaaaacataccattattgagtttaattccgatttcaatatggttgacggtgagattatgggtaaacagtccagtgctaaggacatggcgcagttgcagagttccattgactcgatgacggttgtgggagacagtatcggacgacagtattacagggaagtggcagaaggaaatttccgtccttcttatggattgacaaaagaagatacggtcaaaatagaaaaggcggatattcatgaatataatgtagacagcctttacgaagtagcctctttaacgcagaaacagaaggtgatttcttctgctgtcagtcgtgcggagaacgtggctaacgatcttgggttcaagaaattcacgatggagaacaatgattatagtattcgaaaacataagacggaatggcataagaagataacaatttcactttcttgtctgctgttcttctttatcggagctccgttgggcggtattatccgtaaaggaggtctgggaatgccggtcatcgtatcagtgttggtgtttatcatttattatatcattgataatacaggatataaaatggcccgcgacggtaagtggattgtttggatggggatgtggacaagtagcgcagtccttgccccgttaggaatcttccttacttataaatcgaataaagactctgtggtgcttaatgcagatgcttatatcaactggtttaaaaagattgtgggaattcgtagtgtgcgtcatatatttaagaaagaagtgattattcatgatcctgattacgcacgtctgacgggtgatttggaacaactttcggcagagtgtaaagcgtatgccgccaggaaacgattggaaaaagcaccgaattactttaagttgtggatggcgagtgaggatgataacgaggtgatggcaatcaatgaaaagctggaagcgttggttgaagaaatgtccaatacgaaatctgccactttgatcggtgcattaaacaattatccggttatttccgtttctgctcatgtgcgcccgttccatatatattggttgaatctggtggccggagtcattttccctatcggtttatttttctatttccgcatctgggcgttccgcgttcgtctggctaaggatatggaacggattataaagaacaatgaacaaattcaattcatcatacagaaaatcaataaataagtgttatgaaagagactattaaaatggatagaatagaagatgcgattgccgactttaaagaaggcaagtttgtcatagtagtggatgatgaagaccgcgaaaacgaaggcgacttgattattgcagctgaaaagataactcccgaaaaagtaaatttcatgttgaaacatgcacgtggcgtactttgtgcacctgtcacagtgtctcgttgcaaggagttggatttaccgcatcaggtaagtgataatacttccgtgttgggaactccttttacggttactattgacaaattggaaggctgtacaacaggtgtttccgcttccgaccgtgccgctactattcaggcgttggctgatccgacttctacaccggctactttcgggcgtcccggacatatcaatccgttgtacgcgcaagaaaaaggagtacttcgccgtgccggacatacagaagctacgattgatatggctcgtctggcaggactttaccccgcaggtgccttgatggaaatcatgagtgaagacggaacaatggcacgtttgcccgaactccgtcagatggcagacgaacacgggctgaaactgatttctatccatgacctgatcgtttatcgcctgaaacaggaatccattgtagaaaaaggagtagaagtaaatatgcctaccgaacacggaaagttccgtctgattcctttccgccagaaatcaaacggattggagcacatggctatatttaaaggaacatggagtgaagacgaaccgatcttggtacgtgtccattcctcttgtgctactggagatatccttggctcacaacgttgtgactgtggcgagcaactgcataaagcgatggaaatgatcgaaaaagaaggaaaaggcgtggtggtttacctcaatcaggaaggacgtggcatcggtctgatggaaaagatgaaagcatataagttgcaggaagacggtatggataccgttgacgcgaatatttgtttgggacaccttgccgatgagcgtgattacggagtaggcgcacaaatccttcgtgaactgggagtacacaaaatgagacttttgacaaataatccggtgaaacgtgttggtttggaagcatacggattggagatagtagaaaatgtacctgttgaaacagttcctaatccgtataatgaacgatacttgagaacaaagaaagaaagaatggggcatactttacattttaataagtaaattgccaatttgttttcatatatcaaatattatcgcttattttgcaacgattttcactcaacaacaataaaatagatacaaaatgaatcaattatcagatcgtttgaacagcttgtcgccatcggcgacgcttgccatgtcgcaaaagagcaacgagctcaaggcacagggtgttgatgttattaacttaagtgtaggagaaccggattttaatactcctgaccacatcaaagaagctgcgaaaaaagccatagatgataacttttctcgttactctccggtaccgggttatccggctttgcgcaatgctattgttgagaaactgaaaaaagaaaacggtctggaatatacagccgctcaaatttcgtgtgccaatggtgccaaacaatctgtttgtaataccatccttgtattggtaaatccgggtgacgaagtcatcgtgccggctccttattgggtaagctacccggaaatggtgaaaatggcagaaggtactcccgtaattgtttcggcaggtatcgaacaagatttcaagattactccggaacagctggaagcagccatcactccgaagacgaaagcattgattctttgttctccgtctaatccgacaggttctgtatatacaaaagaagaattggccggattgtcagcagtattggctaaacatccgcaggtgatagtaatcgctgacgagatttacgaacatatcaattatattggtgcgcatcagagtatcgctcaattcccagaaatgaaggaacgtacagtgattgtaaacggtgtatccaaagcttacgctatgacaggatggagaattggtttcattgccggtccggaatggattgtaaaagcttgcaacaagttgcaaggtcagtacacttcaggtccttgttctgtttctcaaaaagctgctgaagtggcatatacaggaacacaagaaccggtaaaagaaatgcagaaagcattccaacgccgtcgtgacctgattgtgaagttggctaaggaagttccgggatttgaggtaaacgttccgcaaggtgctttctatctgttcccgaaatgcgatgctttctttggaaagagcaacggcgaacgtaagattgcagattcggatgatttggcaatgtacttgcttgaagaagctcacgtggcttgtgtaggtggtgcctctttcggtgctcctgaatgtatccgtatgagttatgctacaagcgatgaaaatatcgtagaggctatccgtcgtatcaaagaagcattggctaagttgaaataagagttcaccgcagattacacagattgacacagattgaaaagagattgtctgtctgaaaaatattagattaataaaatcatccttactacagtatgcagtaagggtgattttttgtttaaggaacttctttgtatttttctatccgtttgattgtgaattaatctgtgttaatctgtgtaatctgtggtgaagaaagagcaataaaaaaggctgccttccatagaaagcagcctatactctttttgtaacttgtattattcagccgggtgaattgcttcagacggacaaacgtctgcacaagtaccacagtcagtacatacatctgggttgatagaatagatatcaccttcagagatagcttctaccggacactcgtcaatgcaagttccgcaagcaatacaatcgtcactaattacgtatgccatttttctaagatttaaattattagtactaatttctccggcaaaaataaggcttttattgattggttgttatgcttctatgtttaaattgacttaatttgtacgtcttctaaataagctacctccctataatctgctatatttttcgtatttttgcactcaaattactaatatatagcgattatgcctttaaatttacccgataaactacctgcgatagagcttttgaaggaagagaatatttttgtgatcgacacttcccgcgctacgcaacaggatattcgtccgctacggattgtgattctgaatctgatgccgttgaaaattacaacggaaacagacttggtgcgcttactctccaatacacctcttcaggtggagatttcatttatgaagatcaagagccacacgtcaaagaatacgccgatagaacacatgaaaacgttctatacggatttcgaccagatgcgtcacgagaagtatgatggtatgattatcaccggagctcctgtagaacagatggacttcgaggaggtgacctattgggatgagattacggaaatctttgattgggcacgtacgcatgtcacttctaccttatatatatgctgggctgcgcaggccggattgtatcatcattatggagttcctaaatatccgttgaaagagaagatgttcggtatctttgaacatcgggtattggaacctttccactccatcttccgtggttttgatgattgtttctatgtgccgcatagccgtcatacagaagtacgcagggaagacattctgaaagttccggaattgacgttgctttccgaatcggaagatgccggtgtctatatggcaatggcacggggcggtcgtgaattctttgtcacgggacactccgaatattctccgctgacactggacacggaataccgtcgcgatctcgataaaggcttgccgatagagatgccccgcaattattatatagacaatgatcctgaaaaaggcccgttggtacgttggcgtgctcatgctaatttgttgttctccaattggctgaactacttcgtttatcaggaaacaccttacaacatcaacgatattcaatgataaagcagcgtaaaatagaacttctcgctccggcgaaaaacctggaatgtggcattgaagctatcaatcatggggcagatgcagtatatatcggtgctccgaagttcggtgcccgtgcggcggctgtgaactcattggaagatattgaagcattggtgcagcatgcccatttgtatcatgcacgtatttatgtcacggtcaatacgattctgaaagaagaagagttgaaagagacggaggagatgattcatgcactttatcggattggcgtagacgcgctgattgtgcaggacatggggatcacgaagttgaatcttcctccgataccgcttcatgccagtacacaaatggacaaccgtacaccggaaaaagtaaaattcctttggaaggcgggtttccggcaagtagtcctggcgcgggaactatcgttgcgtgaaataaaaaagatacacgaaaattgtccggaagtgcctttagaggtattcgtacatggggcactttgtgtcagctatagcgggcagtgctatgtcagccaagcctgtttcggtcgtagtgccaaccggggagaatgtgcgcaattctgccggttaccttttagtctggtagacgcggacgggaaagtgattgtcaaagacaaacatctgctttccctgaaagatatgaatcaaagtgacgaactggagcaattgctggatgccggagcttcctcgttcaagatagaagggcggctgaaagacgtttcttacgtgaagaatgtaacggccgcttatcgtcaaaagctggatgccatctttgcccgtcgtccggaatatgtaagggcttcttcgggtacgtgcaatttcgagtttaagccgcaactggataagagtttcagccgtggattcacacattatttcctgcatggacgtgacaaagagattttctctttcgacactcccaagtcgttgggcgaggagatggggactgtgaaggagattcgcggcaattatctgacggttgcgggacttaaatcctttaacaatggagacggtgtttgttatatcgacgaacagggacgtttacagggattccgcatcaaccgggtggacagcaacaaactatatccacaggaaatgcctcgcatcaagcctcgtaccacattatatcgtaatttcgaccaggaatttgaacgagtgctttcccgtaagtctgccgaaaggaaaatcgcagtgcgaatgttgcttgccgaccatcattccggtttctctttgacattgactgacgaagatgataatagagtcacaatcacccttccacgtgaaaaagagccggcccggactccgcagacggacaacctgaaaacgcaactgtctaaattggggaatacgcctttcgaagcaaaagaaatagaaatctcttttaccgacaactggtttctgccggcttcggtattagccgatttccgccggcaggcaatcgaccggttaataactgcccgtcgaatcaattaccgtcaggaattgtcggtatggaagtcaaccaatcatgcttttccacaaacgacgctaacctatctgggaaatgtcatgaatactcgtgcagcctctttctatcaggagcatggggttcaacaggtagcagcggcttacgaaaaagaagcggtggaagatgcggtactgatgttctgcaaacattgtttgcgttacagtatgggatggtgtcccatccatcaacgggtacgttcaccttataaagaaccctattacctggtgtcaaatgacggcaaacgttttcgtctggaatttgattgtaagaattgtcaaatgaaagtaaaagcggctcaatgagaatcattattcacaattttcaccacagttttcaccacagaggacgcagaggacacagaggatatagtggaggtaacatcttcactcattcttctgatacagactgtttgagtgttttttggaaaaagtgtagaaagtttttctctttaccttctttcccctttttaccctctttatcctttttatcctctgtgtcctctgcgtcctctgtggtgaaaatagtgatgaaaacagtgatgaacctcctactatgtttacttttgctctcatcttgttattataaagcaccggctttggattcggaagaactgtcgaagaagacgaaagactcgttgacttacttgtacgaacggcattatacatggaatacaaacttggaagtagtcgatgattccatctctttggaatgtcttccgataaaagatacttttattcagttgaataaaggggatagggtagtggtggcagagtttgcggttcaccctgccgatagtgtagacagtgtttgggtgaagctggctcacacacaggatgaacagggctggatacgtgaaaaagaactcaagaagtcatttgtgccgactgatagtatttcgcaggccattcatcttttcagtgatacgcatgcttcttatttcattatcatcttcgctttattcgtcggtgtatatctgtttcgcgcttttcgtcgaaagcagttgcagatggtctattttaatgatatagatagtgtttatccgttatttctctgtttgttgatggctttcagtgcaacgatttacgaatcgatgcaggtctttgtgccggaaacgtgggagcatttttatttcaatcctactttgtcgccgttcaaagttccttttattctctctgtcttcttgttgagtatttggctgtttttgatagtcgctttggcggtgctggatgatttgttccgacagttgactcccgctgcagctatcttttatctgctggggttgatgtcttgctgtattttctgctatttcttctttatcctgatgacacatatttatatcggttatctgtttcttgccttttttatgctggtttttgcgaagaaagtccatcggaacattgggtataagtatcgttgtgggcgttgtggggaaaagttgaagcaaaaaggtgtatgcccccattgtggagcaatcaatgagtaattttattatctgttttattcttgaataacttttcaaatgatggaaatcagatctaccgaaataaaagatctccctttagtgatggagatttatgactatgcccgtgcctttatgcgtgcaaccggaaatactactcaatggattgacggttatccttctgaagtattgattcgtcaggaaattgaagatggacatagctttgtctgcatagatgaacagggagaaattttggggactttttgttttatcttgggagacgaccctacttatcaacagatttatgaaggaacatggctcaataatgaaccttatggagtgattcatcggctggcaacgaacggaaaacagaagggggtatcggaaacctgcttgaactggtgtttcgaacgttggcccaatctccgggtagatactcatcgggacaataaagtcatgcagcatatattgacgaagtatggttttcaacgctgtggcatcatttatgtaaagaacggtacagagcgtatcgcttatcagatgacgcgtgtatctgatggaacagagaaacttgcttaatcgtggtggagtgtagttgaagtgtattagatgtgggcaagataatcttagatataagcaaaccaataggaaactgtaggtaaagtaatgccagagtaccggtatagttccgttaagatgccggtatagttgtgtgaaggtaccgctatctttaccttcccacggccgtggtgacttcttcccacagccgtgacgagatctctccacggccgtgaagagaagctaccacagccatggaaaggtaaagatagcgtagggttaagagaacaatgcctattggattaattaagtataacggctttataatgcatacttcatagaggcatacgttcttctatcacgtattccatgccatcaatctataagagacaggctgacaataaaagtccgaatcttttattgtcagcctgtttttgggttattgtcagcacttattgtcaggtgtcaatgacttgataatcattgttctatatggataaaatctttagctgacaataaaatgactaaataatatctctatgagtgaaaatgattagaaccggcagcggagatctaccccaaattgcattgggcgtcctttctgcataaaacctttgttcattgtttcgaaatagaaggcggcatattctttattcaagaagttgcgtgcccagaaactaatcattgcgtcaccgatttccagattcgttctccagttgagtgtgccatagaaagattggctgacatcgttttgttcagtccagtagatacgtccggcagcgttataattagcttggaatacaacccggtcgaaaatagaacgtgggctgcaggtgatggcatattctcctccgatgtttaaggtatgtttggggacgaagggaacatatttgccattataatctgcggtcactttaaaagtgccgtctttttgctcttcggtgattacataatccgtaaaggtggcatacgtatatccgtaactgacattcaggctaagttcttttgtcacactggcacgaagggctgcttctgcaccatagctacggctttttcctgcattgatcgtgatacgtcccagaccactttctgcaaattgggagagttgttggtcgcgggtatccatgtagaatgctgcgacgtcagcccaaagtcttccttcccatagagtaaggtgactacctacttcgtagttccacgaatattcgggtttgtaagtggtggacgcttttacatcaatctcttttgtaggtaccatttggtccatcatattaatgatggtttttccccaggtggcatcttgccctattgtcggactttctttgatggcattcatcatcgaatttttcaattctgtttgtgataagtcagagaacatttggatgttatatcctcccgaacgatatccccgggtgacggtggcataaacgttattttgattcttccattcatattgaatagcaaatttgggaagaagctgtacataatcagtagagagcttgcctacaaaagaggccggggctttcatattctgatcggacaggttgatttgcatgggaccctttaccatgtgaaaatcaaaaccaaagtcgataggagtgctaagagaattatacttcatactgattttctcgtaatcgagccggaggccggctgtaacggacagtccttctatgaacaagttgttgaaagtagactgatgataaagtgcaccgctaagagtcggggtgtcgaaagttcctcctacgcttaaggtcgggttgtgcacagtcattcccatggtgggagctccgggtttggcagatacttcttcaaaagctgcattggcgttgttttcaatgaccgacttcactccttcttctttaaacaaaacaggtcccgtagtatgcagccattgatagaatccgaaagcgcccgtagcccactgccatctttttccgggtttggctttcaacacaatctcttccgaaatggtgtttgcacgttgcttttgctcaatattgaaaatatctctttctgtgaaatcctgatcgagaaacatgcggtcgttcaggttctgataacctgtcacggcacttaatataaagttgttggcttgatattcgatgttaacaccggagttgagcaatccacggcggtaactgctgcggtcgttatatgaaatcttaccgatataatctgcccggtcttctgtcatttccttaccattttctttcgctttagctatcgcactgggggtaatcccggtatagtaatacggatatccgccctgatcgctatattcatagctaagggccatatctattttcaggttcgaactaggcaggtaaataccacggaaacgtccgccaccggcattgctcttgtctaccttttcgttgtttcttgccgaattttcaaagaagccacctgtgtgttcgtagaaacctccggtagaaaaagcgaagcggtcggatgtccggtgatagtgggtgagtgacacattataattattgtaagtcgctgctcccatgcggatatcagtaccttgataagtgaaaggcgattttgtgtgcactttgataagtcctcccatcgtattacgtccgtagagagtgccttgtggtccgcggagaatgtcaatacgttcgatatcagcatagttgaagtcgaaagcggatttgtcgatataagggatgttgtctacataaagtcctacggacggagtgttgatacgtgagccgattccacggatataaatggaagtggtcagtttggaaccataatcggggataaacagattggggacgatgcctgtcaggtttttcacagagttcacctgattggcgcgcatattatcttgcgataaaacagtggctgccaccggtaattcacgcaacttacgattctctttcggagtggcaatcactaccacttcttcgatgtctactatttttagtgagtctttcgggaaatcttctgcccatgctgtacctgtcgtcaggagcgtgagggcaatcataaaattttttctcttcatctgctgttcatttatctgctgcaaagtaacggcaaatatagacaatggtcaatcctcatttattaggatttgtttcaccatagttttcaccacaattttcaccacagaggacgcagaggacacagagggtatagtgaaggtaacatcttcactcattttctgatacagactgtttgagtgtttttgggaaaaagtgtggaaagtttttctctttaccttctttatcctttttatcctctgcgtcctctgtggtgaatcagattcggtctgcttctatatacccgttcattaccgcataaatagtcagtccggagacggacttgatacctaatttctctgtgatatttttccggtgagtgataacggtggtcaggctgatattcagtttatctgctatctctttgttgattaatcctttggttatcagtacgagcacttctatttcacgggaagatagaatctcctgatgaggctgcgccggaggcatggatggcatgtctttcaccggataaccgttgtggtgggcgtgttgatggagtttcaatatatttttcaccaattcttcctcggattcatggatgttgagtacaggcacgccggacagttggaattgcggactgtcgcttgccaatacaattgtttttcgtttccgggggagaaagaaggcattgtgctccacataaatctgtgcggaaatgaaataatgggcatacatatccggcgtatcgtccatcagttcactgaattgatggaaggtacgtatggttgccataggaatcatttcctccaggattcctttcaggccgagactggtcagggtgtttgcttctacaatggctatttcgggttgatgattcattttcatgtagttttagttaacgattgaaataattggctaccgcttccgcacaccgttctccatccactccggcagaaacaatccctccggcatagcctgcaccttctccgcaaggaaataatccgcgaacggttgtatgttgcaatgtctctttatcgcgtacgatgcggacaggcgaagaagtacgtgtctctacgccgatcatcaccgcttcattagtgaggaagccatgactgtaacgtccgaattgctggaaaccgagagataatcttttgctgataaactccggcatccagaaatgaagcggagaagaaatcaatcccggactgtaagaagattcgggtaagtcgtaactcaacttcttgcgggtgaagtcctgcatacgctgtgccggtgctgtctgccttctgcctccttgtaaccagcattggcgttcctgttcttcctgaaagtaaaggggaagaagttgagagttgagagttgagagttgagagttatttagagatgggttaagagccagcagctgttcatttcgttgcgcagctaactcttcattctccactctccactctccatttattaaatcttccggttgcacttccaccaccatgcccgaattactccatcgcgagccacgattagaaggagacattccgttcactaccacttgctccggtccgctggcagcaggaacaatgaaaccgccggggcacatacagaagctatacactcctctgccttcaacctgtgtgacgaagctatattctgcggcaggcagatacttgcctcgtccctccttgttatgatattgtatctgatcgatcaacattgccggatgctccaaacggacaccgactgcaatgcctttcgcttcaatcgccacatgattcgcagccagccaacgatatacatctctcgccgaatgtccggttgccagtatcacaggtccgagaaaagtctttcctgtatttgtttcgataccctttacttcgtcattctcgataatcagtgcctccattcgtgtttggaaatgtacttctccgccacactcgatgatggtattccgcatattttcaatgacacgtggcaacttgtctgtcccgatatgcggatgcgcatctactaatatcgccgtagaagccccatgctggcagaatacattcaatatcttatctatatttcctctctttttgctccgggtatagagtttcccatccgaataagctcctgcaccgccttcgccaaaactgtaattcgattccgggtcaaccgtgtgttccctgctgatttgtgctaaatcttttttccgctcgcgtacgtcttttccgcgttcgataacaacgggacgtaaccccagttcgatgagacgcagggctgcaaatagtccgccgggacctgcgcccacgacaatcacttgcggctttccctctaccttattatatatagtatgctcgtattcatcatctttaggcatctcacggatatatgctcgtaccttcagattgacgaagatagtccgctgccgtgcatcgatgcttcgtttcaagattcgggtagcggtgatgtcacgcaggttcaaacctttttctttagaaagatattcttttagtttctgttcgtttgctgcgatttcgggaagtatgcggagttggaattcttgtgtcatttagttattattgatattgttttcgattataaaatagataaagcggataatgtatgcatcagtgccctatccgaatagagccctgaatgcttcctccacctttcttacc

SEQ ID NO: 8220 - DNA, 209 bp, Unknown
  gut microbiota DNA sequence
aattacagtttccacggcaggaaacgagagtttctaaggcgggacactacagtttctacgtaaggatactgtcgtttccccgtagagacaccacaatttctccatagggtcaccccaattatcccatagctttgcataaaggaatcaaggctttttctttgattatataacgtgttgcagatactttatctgcaacctatctgccacag

SEQ ID NO: 8221 - DNA, 16160 bp, Unknown
  gut microbiota DNA sequence
caaggcaattattcttatacggagctgaataatgttctaaccaaaataacttcatttattagcagtaataaagattctcaaattgccaagaatataagatactattatctaaatgattttgagaactgtgtcgtggtagaacttgacaaatctaatgaaatggaaataaaagagtttaaatcagaagtagtgaacttttcaggaattgtatttaaacaatgcacaagagaatttcaaaaccactcattatcgccaggaagttctataggcacacctaaaggcactgcgtcaatgggatatagagctactagatttaacactgacggttttgttactgcaggacatgcttataacacgggtgacccggcatattataataacacactaatcggtagttgtgacttttcaatccaaggtggttccgttgatgcagcattcattagtataactaatttctccatcgttcccaataatggaaatcttactggagaagaatataatatttgggcaggagataatgtaaccaagttaggagagactatagctcaatctgaaggttatattacaagtaccaatgcaaatgtaaatgccgatggaatatactatacagatatgggtgaagctacatatttaagtgcgttcggagatagcgggggaccagtatatcttacagatagtaaaaaagtaataggtatacataaaggaagcacagctttcacatctatatttgttaaggttgataatatagcatcaaaactaaatgctcatttcaactaataattaccaatggattggataagtaacttatccaatccatttcatacttaacttatgctcaaattaatatcgattttgctaaccaatggaattgttttattcatgctaatcagttgtcataataaaacaggcaattctaaaagcactgtaaaccttgaatatgaaaatagtatcgactctcttaattcatataaaatggatatatcacatttcattaattccatcgagccaggagaaacgattgtagaagaaaaacaaatgcagggggaagaatttattacaagagaaaatgagaatataaaagtacgctttttattaaaagactcctgctcaaaagacggattcttgaaaacagaaattattaataatacaaacgatacaattatctatattagcaatactttcttacactatagagaaagtaataattcatggattcctttagtttatccagataattatgtaaaaaatgatcttggatatttaataccttctcatgaaagcgtcaaaataaggttctttttaccttctcaagaaaaatatcctaaagggaaatacaagcttcaactattattccgcaatacttccaagagtattgactattatatcgataaaatatttctaagcaacaagtcaaactaagttcctgataaattaaaaattaaaaaaatgaatacaaagaaaatagttgggattttcttattatccctttgtactatgtgtttcgttaattgtagtgatgatgacacaccagatgatccggcagacaccatcacactcaatatgcttaatgagcacaatggaaaaacctatttaggtgaatcaaatgtttacatcaatgaagccaataattttatcacatctaaaaatttcatttctgacgtaggaaatggcgcaggagttggagcaaatattctaccctcgttaaccaacctcacacacgaagtggcggttacacccgggcatatttatcagatttttgataaaaatacactgataaattttccgtcaggcaattacgctattcaagtagaaacaagttattatcaagcctatgttgtatctaaaatagtaaatagtgacatgaatatcggtgcaattgtaaaatatatatctgttttccctaacaataatggactgcctgcatataggtataatattggaagcctttaccgcataggtgaaacggttgaattagcattaccccaagatattgagtttttcttgaaagaacatagcgcaggtataaaaggattaaatgtaacatatgccaataacaaattaagaataaccctaactaaagcacctgacattgtcaacggaccttatggaacatttgacctttatatccgttcaaacaatgtctttacgatcgtagaagtccacgtggaataagcaataaagactttattagccagtaaaacaaagggattatcacccatattagcatatatttgcaacaaacatttaaaagtatgagaattgatagatttttactattcgtattattactggcatcttcgtatggttgctctgaagaacaaccatacgaagttgaaaaggaatcagtttctatatgggaaggagacacaaggcatgtcatcatagaaacagacttaacagagcacaactataagttagaatcagaagatcaagaaattgcaactgcaactcttgacgaaatgggcgtatgcatcgctacatacaaaagtgggagcaccatgatacgacttattgatactgacaataataagatagtatgtgagatctacgtatatgtaatatacttcaacagctcggaaattatcaattggggaattccgttcgaaggtcatcctggttctccgggaataataataaaagcaatagatctaagaatccctccagagatagaaattgagttacgagaaaaagaaaagccattcatcggtgccacttatacattcaatcaagaaaccaaaaagttcacaatgaaaactgattcgggaatattcaaagaaggtacatacgaatggaacattacctctttaaccctaatgtatgataataaaacagagaaattcggttttaaatttgccacaggaatgtcatacggatatatcctacagagtgataaaacagtagaatatcagcaacggtatcctgatgccggtatcacagaagtaaaagttaattatatttggaaggataatggaataattcaattaggagggcttacattttgattgatacaaaagtagatagacaagtgaaactgttatttctgatattctgtatatttacaattagctgctcaaacgaagacaaactaaattgtgaatccattgaattaagtagcaactccatacatattttagcaggagaaaaaagaattgtatatatattgtctgatttagaaaaattccaaatagggcttggattacagtctgagaatcctcgaatagcaacagttgaaccgcaaaatgacaataaggcaatcctaatcacaggaaacagtgtaggaaacacttccatatatctgcgtgacttaagaaatcctgataattttgcagatattgaagttatttccgactacctttccggaaagttcatagaaaaaggagattcctccagcacttggataaatggtggtgacctgcacattcgagaaataatagagagcgaattaaaagaaattgccaagaaccgaacgggaatactatactcttttgataaagatactaaagctgtggaaattgattattcttcatccgactatgacaataataaaaaggtcggaacctacgaatgggataaagacagccttaccttaaactttaacaacatatctaaacacggattcgccgtagtaaacgaccatacaattatcattgtattagactttactgaaaagtataaatcaaaatatccgaatgcatctgtaagaggtgcaaaaatccaatgttttctatcagcaattgaataattaagtaaacaaaaacattatgagaaaaaacatatttatatgtatcatttttgctgtatcaatttcagcatgtacagaggaactagacaaagagattaatatagaaactaatagtagtctttatgatttgtcagaaagtgaggcacttacaattgccaaaacgtttcacgaatctgtaacatccgaaccacgaactagagataataatactgcatttggtataaaaagtacatataggctacacgcttctgaaaaaacaagagctttatcaagtgaaaaactccccttaatttatgaaatagaaataaataacggtccgaagaatgggagaattattgtttccggagataaaagattccaaaaagtactcgcatatataccttcattcaatgattcggtttatcaagtctctttagggcccaacataatgatgcaaatggccaaaaatattttaatggaaaaaaattcaaaactacaaagatacatcatcaacacgttctcgtccagtagagtctatacctggggaagtaagcgtaatgattgtaccattttgcagaacaaactggcatcaatttactccatataaccaactattgcctcaagctttcgtagaacgttatgaacgcatatctcctaacagacctggaggagctctatatggcaactatcctacaggacaagcttctattgctattgcccaagctatggcatatttaagaccttatttaaacattgacggaataaatataaattgggaaatattaaccatggaaaaagaagcgacacaatccaatgaaaaaatgatcgcaactttactaaaatatgtctacaatacaattggtgcatatcctgtatggggagaatgttataattatgataaatggactgctactggaccttccaccgagattgtaaattctgttattgcagtgaaaaccccaataagaaatatttcaagacaaataaatacttctcaatgcggactgacttgcgataatgatcaaagctggaatttagaagttgtaaaaaaatccctactttctctttatcctgttttcgtaggtgacctagacaaagtcgcttttttagttgatggatatgccattaatgaagaaaactccgtttacctccattgtaactttggtatgaatgagagttttaatggctattacatggttaatgataacggaagcatagtatttgagcccggtggttatttttatagagacataaatcttggtataatcgctaatataagaaaccgataaactcaaaacaacgttatttacacattagttgtccacctcttttatcactttttatatttgcaagacatatatactcaatcctgcgatgaaagagatgaacagtcaatagaaactaagaaggggaaatagttttccccttcggcaaatttacaaccaacgctggaataagtctctatttgattgtcggatagaagaaaataagctaactttgttctctataattaaaaagggcaattatggaggcagcaatcaagaaaataccatacgggatgacggacttcgagtctatcatccgtgatggttattattatgtagataaaacccaatatatagagaaagtagaaaatataagccgtttctttttctttgtccgtccccgtcgtttcgggaagagtcttttcctgaacatgctgggtctttactacgacatcaacaagaaagacaagttcgaggaaagcttcggagaattatatataggcaaacatcccacgcccaaccgtaacaaatatctggtgttgacgctcaacttcagcagtgtagccagcgatatggagactttgaaacagactttcaatacctattgtaaactggtgatgagtgcttttgccaaagattatagtgacctattagggaaaaatatcgcagaagaactggaaaaatatgataccgcagccgagatattgggattcttatgcttgtccgccaaaagcaaaggattgaaaatatatcttatccttgacgaatatgacaacttcgccaataacattctggtagattacggcaatgaacgttatcacagcatcacccacggcaacggattcttccgcggattcctcaaggtagtgaaggattattcaaactctgtcatcgagcgaatcttcctcacgggagtcagtcctgtgacaatggacgacctgacaagcggattcaacattgcggataattatagcagcaactccatatttaataatatgataggtttcaacgaatacgaagtgcgcgatttgatagattattacaaagaacgccgggacctaccgcactctacagacgaactgatagaaatcatgaaaccgtggtatgataattattgcttttccaccgaagcactggacgaaccgtccatgtacaattcggacatggtgctctacttcatgaaccgctatctgctaaacatgcgcatacccaacacaatgctcgatgccaacatccgtaccgactataacaaactgcgccaccttatccgcgtagacaagacttttggagaaaatgcaagtgtcgtacaggaaatagtagagaagggcgccactagcggaatcattgccgacagtttcccggccgagaatattataaaaaccgaatacttcaagagtctcctctattattatggtatgcttaccatcaacggcactagaggcccgatgaatatactctccatccccaaccaaacggtgcgcgagcaactctatggatacatgatagacatctacaaagatagctccggtctcaatttggaagtggaaaagctaaacatactgatgtatgaaatggcatacgaaggtgattggaatccttacttcgaatatatcgtcgaacgcctgaacaaccaaagcagcatccgtgaatttatagagggggaagcacacgtgaaagctttcattctcgcttatctgggactaaatagttactatatcgcacgccccgaatacgaaagcaacaaaggatatgccgacatcttcctccacccccgcctgatgcagcttcccgacatggcatacagctactgcattgaagtgaaatacgccaaacgggacgcttcggatgctgaaatcaaaaagctactgtctgatgcaaaaacgcaactgaaacagtatgcggcaagcgaatggatcaggcatgacaagggaacgacagaattgaaatgcatcgcattggtatttcagggttggaaactggtgaaagtggaagaggcataaacagctaagccctccctataccttatcatactctttcatcgtttatcatggaatctatatccaagccccagcatcagattgttggggtctttaaatttgctcaactgataccccacgtgtagaaacaaatgacgggtgacataagtcttgagagccagaacttggtagaacccttttgtatcatcaccgctgtatatcaggttccgaccgacgccgacattgatagagaaaacaggcatcaccagctctgcccgaagagataaacctacggaaaactgctcgcggaaaggaggacgatgaaacttcaaatcgcccgagtaatactcgcccactctatactctttaagattggcactctcatcatattgcgcatccgcagaaagccctgcccgaaaatagttgttgaaattatacatcggggcgaaattgatgcccgccacaccgaacgaaccgggaatcatactcgacacatcgtctccgatcagtcctcttttgcgggtggctccgtagaccactaggtcatagctgacgtgaggttttataaagagccgtccgggagtgatggaaccggccgcctcatccgtttcgcccaaagtacgtacgatgccgattcttcctccgataacattaagaccgccattgggataatgcgtgtttccattggaaaaatgggtgagatctacacctgccgccagtttccagtacttgtgaacttgccagttcagcaaaaagccgagattgatgtacgcattgatcttggagccaatcagcacgttttgcggattggatagttcatcatatttcttccagccaaaagaagccccgaagttccattcgtaatcgaacgacagacggggggacagttgcgcgatacgtgacccttgaaaaacgtataccgacacgggatttcccaattcagcgggattaaagaaagtatggtaggaaatgccaataccctgataggtatggggaaagagcctgccgaggttggattccttgctgaatctgaaagcgtacttgaaatggaaggaaagcgattggtcgattttcttttgctgcgcattgtctccttgcagaaaactatgggtggaaacgatatatcccggacggaggtcgaagccaagctgatggcggatcaggggatggctgacgctgtcgttccgttgcccgatgattgtctgggcttccagatttgcgttgattgccggatgcaccagaaggcaaaggaggcacagcaaccgtatggcgttcctatttctaatcattgatatattagttcttgatcggttagttgttgaaagggatatccttgtgtgttatatagtattttacaggcatttcgctatgcaacgtgccggttacgattcgttgtttcttggttttggggtgagaaacataaagggtatatctcgtttccaaccaatcatacaccatcgatagggtgtagtatcgagaagtccggggagggattatgtctttcttctgctccgtattggagcaaggcaacatttgttgcgcagaaatgaacggcacccgtttaccgttcatccctaaatatccatctttcatgcttggtatttccactgtcagaccggcttcgcccagtaattgaaaagcttcgggcacatcgcttttaaatctcataaaatggtaaaaagactcgaaaggaaaaagcgtgtatgtagacgaaccatctgctaagttatgaaaggagacaccttcttttttctctatcttgttttccggatcgtaagagtatgcatccaaagaataaatgatactatccatcacatatctgtctgccggagaaatctcaacgtatatctcctgccactcatactcgttgctcgccctgagctggaattgaaaaggagcggaaagggcattctcgcccaccgttatcttcacttctttgggatgaacgcgttcgatggtgaaatcaatcatctctccggtgcacacaatctttcccaacccgttcagcgatggaccttggtcggttgttatcaggcgattgtccgcatcatatatgttatattgaatgggaaaatcgaaggctacatacatccaatcccaattggcagctgcaaattgaatagtggcaacatccccgttcccgtccagcgtcagttcggaatcggaagaacggaagtcgtcgacaaacacgtctccgttacaaccataaaacttccctaggataaaaaaacagaccgtcaggtacaggaatcttttcatattgtttctcgcttgttcattctcttttgttctctaccgacaaaagtaacatatattttcaggaacagcatacaaacctgcaagaaattactaattaatcaaacagttctttcaacacctccaatgatttcaatgccgggaagtcgggcagatgcaagcggtaataatcattcataatcgtcaggcaacgggtacgctccgcacggctcatgccaaagagatgcattgtctcatagttcatgcgcatcagttgacggagacgggcagcctcttcgggattgatataagaggaatgtagttggggacgaatagaagtgaagcaggcattcaataaatcaaagtaatcgccggtatgataatcctccagattcggataaagtcccagaaaacgggaaagacgcatcaagaacaccagatgaaaattggcaaagccgtctccacactcatccagccaaatgatggaatgttgcagataagcaaataacggacgattctccgcctcctcccggatagccctgtaaagaaactccgacagaaaaagtgccatcgaagacttatacggatcgtatggaatggaagaaaaaggataaaaggatttcgcttctttcacacgataaagagttgcattggggcgatagtcggcctcgaactcaataaaagacaacggctggaaaagtacggatttcacagccgctttccgcgaacggggcactgttacaagaaaagaagccctgccggacaactctgtatacatatccacaatgatagatgtatcattgtatttcaatgtatgaagaactattcctttcgttttttgcagcataaccgaatttatctcgtttccaatccgaagcaaagctacaaaaaaacacaaaataatcggagacatacggcgttaaatatcgcttccacttccttatcttgcgcgtacatgaaacaaaccttataaatgatacgcttattttgtagcagtatgcctataaattctttgttatcattcatcgtctccggtatttgttccgttagtcgcctaaagattcatttagttacaaaagaagttaccaataagcagcttttttatttcgctatatataataaggtggtaagaaaacatgcttcctactgtttttcacaggagagatttttttatataaaaatcacaaccatatatttcactgaatatcagccaaaaagaaagacatctgtgaaaaaaaacacatattcattgaaaatttttctatgaatcatttgccagtttcaaaaaagttcctacctttgcatccgcaatcgagaaacaaacacagattcgagaaagcaaaaagcagaaatgctacaacaggatggcccgttcgtctatcggttaggacgcaagattttcattcttgaaaggggggttcgattcccccacgggctacaagttaaaagaataaagaactaaaaaaatagattagtcgagatggcaaatcataaatcatcactgaaaagaatcagacaagaagagacaagaagacttcacaacagatattatggcaagaccatgagaaatgctgttagaaagcttcgtgcaactactgataaagcagaagcagttgcaatgtacccaggcattacaaagatgttggataagttggctaaagtgaacatcattcacaaaaacaaagctaacaatctgaaatctaagttggctctttacatcaacaagctcgcttaataacaagaatttaacaattctatatagcatctaggctgaacttttaagttcggcctttcttgtttataacccactgaatatcaagcctatcaagaatacagagaaaccgcccgcattctttatttttcactgattattcttcgtcaagtcgacaattttcactatatttgctctgttattaaagttagaaaggcaattatgagcgaagaacaaatcactcccaataacgggtcttattctgcggatagtatccaagtattggaaggtcttgaagcagtaagaaaacgccctgcgatgtacattggtgacatcagcgtcaagggacttcaccacttggtatacgaaatcgttgacaactctatcgacgaagcattggccggctattgcgaccatatcgaagtaacaatcaacgaagacaattcaatcacagtacaggacaacggacgcggtattccggttgactatcacgagaaagaaaagaagtcggcactggaagtagccatgaccgtattgcacgccggaggtaaattcgacaagggttcttacaaagtatccggaggtttgcacggtgtaggtatgtcttgcgtaaacgcgctgtctacccacatgactacacaagtattccgtaatggtaaaatctatcagcaggaatacgagatcggtaaaccgctttattctgtaaaggaagtcggcacagccgacattacgggaacccgccagcaattctggccggatggtaccatctttactgaaacggtatacgactacaagattctggcttcacgtctgcgcgaattggcttatctgaacgccggtcttcgcatctctctgactgaccgtcgggtggtgaacgaagatggaagtttcaagagcgagcagttctattcagaagaaggtttgagagagttcgtacgttttatcgagtcatcacgcgagcacttgattaacgatgtgatctatctgaactcggaaaaacagggaattcctattgaagtggctatcatgtacaataccggattctccgaaaacgttcactcatacgtcaacaatatcaacaccattgaaggtggtacacacttggcaggtttccgccgtgcgctgactcgtacgttgaaaaaatacgccgaagacagcaagatgctggaaaaggtgaaagttgaaatttcgggagatgacttccgtgaaggtttgactgccgttatttctgtaaaagtagctgaaccacagtttgaaggacagactaaaacaaagttgggtaacaacgaagtgatgggtgctgttgaccaggcagtgggcgaagtattagcatattatctggaagaacatccgaaggaagccaaaacaattgttgacaaggtgattctcgctgctactgcacgtcacgctgcaagaaaggcccgtgaaatggtacaacgcaagtcgccgatgtcaggtggtggtctgccgggcaaattggccgactgttcggataaggatccttctaaatgtgaattgttcctcgtcgagggagactcggcaggtggtactgccaagcagggacgtaaccgtatgttccaagcgatcctcccattacgcggtaagattctgaacgtagaaaaagccatgtatcacaaggctttggaaagtgatgaaatccgcaatatctacacagctctcggtgtgactatcggaactgacgaagacagcaaggaagcaaacatacagaagctgcgctatcacaagattatcatcatgaccgatgccgacgtcgatggttctcacatcgacacattgatcatgacgttcttcttccgttatatgccgcaggttatccagaacggctatctgtacatcgccactcccccgctctacctctgcaaaaagggtaaagtagaagagtattgctggacagatgcacaacgccaaaagtttattgacacttacggcggtggttcagaaaatgcaattcatacacaacgctacaaaggtttgggtgaaatgaacgcccagcagttgtgggaaacaactatggaccctgaaaaccgtatgctgaaacaagtaaatattgacaacgccgcagaagctgattatatcttctctatgttgatgggtgaagatgtagggccacgccgcgagtttattgaagagaatgcaacgtatgcaaatatcgatgcataattttaatattacgtttttataaaccaacctcacatcttacaacgaggaaacgccgatggcgaaggaacatccttcgatcggcgtttttcttttgtctgaaggggctttcatgttcgaatcgttcaaccgcccatctcttaataaaacctaacagcagaaacgttttccatacaaaatcactatcttgcataaaaagcaaagaaaacataactatgaaaatgaaaactactgcgcccaatccgttatttgcaaagatcaggttgtttcttattgtactgacttcctgcgtgatcgcaacttgtatcttcttgattattatccatccggaagcatggattatgccggcatgcggaatcataatcgcattgtgcattttgctctatcagctatattgcatacgcaagaaccggaagagaatttaaatatattgttgctttttcagctcttcagcaacagtaaccagctctttgtaccattcttcaccgaacttacggattaaaggctctttcaaaaactgatatacgggaagattctcttttttccccagcaaaactgctgctttgcatacatcccaacgattataattcaccgctttatagggcccgtaatcgccgatccggataggataaagatgacaggacaccggtttatagaaatctgttttcccctcccgataagccttctcaatagcacagtagcaacagcctttctcatcgtagcaggtaaacacacagtctttattattaacaatagaagtcactagatcaccttcctcatccgtatatactactccttgcttttcaatcaccgcacgtgcttccggagccagttcatcccaaataatcggcaaaacttcctccaactccatcacctcgtccagctctaccggagcaccggcatcaccttcaatacaacaagcccccttgcaggcgcccaaatcgcaaaggaacttctcctgaaatacatcaagagacactactacatcacctatttgtatcattttaaaccttatgtgagacaaaaagggcggagtagaactccgccctcccaattatagaaatctaaattacttaatcaaaacgtttccgtccatttcagccggagcagccagccccataatcttcagaattgttggagcaacatctgccaaacgaccatcttctactttcgcagccttgttctctgtcacgtaaacacaaggaacagggttcaaagagtgagcagtgttcggagtaccgtcttcgttcaaagcatggtcagcattaccatgatcggcaatgataattgcttcataatcttgtgctttagcggcttcgattacatctttcacacaagcgtctacagcaacaactgctttctcgattgcttcgtaaataccggtatgaccaaccatgtcaccattagcaaaattcactacaatgaaatcatatttgttctcgttgatggcagctaccagtttatcttttacttcaaaagcgctcatttccggcttcaagtcataagtagcaacttttggagaaggaacaaggatacgttcttctttatcgaacggagtttcacgtccaccgttgaagaagaatgttacgtgagcatacttttctgtttcagcgatatgaagttggctcaagcctttggaagcaagatattcgcccaatgtgttggatacgttttctttgtcgaacaggatatgaacgcctttgaaagatgcatcatacggagtcatacagtaatattgcagccccgggatggtgtgcatgccaacttccggcatatcttgttgagtcagtacgacagtcaactctttggcacggtcgttacggtagttgaagaagatcactacatcaccctctttgattgttccgtcgcagttagcgtttacaatcggtttgatgaattcgtctgtcacgccttcgtcgtaagattcctgcattgcctgaaccatatcagtagctttcttgcctacaccgtttacgagcaggtcgtatgcttcttttacacgttcccaacgcttgtcacggtccattgcataataacggccgatgatagaagcaatctttcctgctgatttctcgcagtgtgcagaaagttcttcgataaagcctttaccactcttcgggtcagtatcacggccatccatgaagcagtggataaatgtatttttgatgttatattcttttgcgatatcgcaaagtttgaagagatgaacgagtgagctgtgtacaccaccgttagaagtcagccccataaagtgaatattctttccgttttcttttgcataagagaaagcagaaacgatttcaggatttttcatgatgctgttgtccgcacatgcacgattgattttcaccaagtcctgataaaccacgcgtccggcaccgatattcaagtgacctacttccgagttacccatctgtccgtcgggcaaacctacgttttcaccgcttgcctgaagttgagagtgaggataagtactcatcagataatcccaataaggagtgggagtgttgaagattacgtcgtctttcttttggtcacctaatccccaaccatcgaggatcattaaaagggctttcttactcataatattttaatatttaaattatcacactgattttcgggcgcaaaggtacaaaaaagatggttacgtaaacgtttaatctatgttaagttacagggcagaagtgtatcagttcatggatatttttcttactttgtaaaattactttcaacatgtttatcgaaaaactattattatgaaaacaactttattttgcatcttccttttgttatcaggtataatatccgcacaaacaattgacaatcctcctttcaaagcgcgatcaggaagtatttccaacatcacccgtatagaacgtactcccgaaaacacaagagtatatattcatgccatctttcgcccgcactggtggatcatggaagatggggatacctatctggaagatgctgccaccggaaagaaatatatgtttaaaagtgccgaaggcatcgagctcaaaaaagaagtctatatgccggcttcaggcacgatggattatgttcttgttttcgaa

SEQ ID NO: 8222 - DNA, 4018 bp, Unknown
  gut microbiota DNA sequence
ttgcggacataaattgaataatgactaaacacatagtgacagatataaccaatcattatcaataaaaagattaaattatggatacaataaaaagattaccaacacacccaggtgatatattgaaagaagaattggaatgtcgcagaatctctcaaaagaaattctcggaaattctgggagttccctatacaatgcttaatgaaattttaaatgggaaaagacctattaccagtgattttgcattaatgatagaagccgctctaaacattaatccagaactactcatcaatatgcaagcacgatataatatggctctggcacgtgaaaagaaagcactttcaaaccgattaaacgaaatacgaaaaatgtgtgcctcattgctatgagttcttgccaatacgctcgaataaaacaataaacacacagcctaccgcataacaagctatgtccgcccaatcgaacgtagagcccagaatgattctggctgcacgattcgtaatccccaatgtttccaccaactggaagtattgcagcacttccacaaaacaggcaaaaagaaagacataaaacggcatccgcggaattcctgtcgggagaaatatcctcacaaaactatacaccagcactaccaccagcatatctccgatataaggacgtatgaaattgtcacgcacatataaagctatcaatacctcgatgcaaaagatcagcagaaagctgattatataaaaaaatcttttcttcattattcactcaatcacagggttaaacattcatttgagtctgcgaatatacgataaaatagatcgaatacgttcaaatattactaaatgattgatccataaaagagaaataattgtatatttatagttccaagtatttttccacaaacaataaaaaaacagaaaggagattgaacacatgatgttgaacatagatttcgtcattcgtttattggtcgccggcatactgggggcgatcatcggactggaccgtgaataccgtgccaaagaagccggataccgtactcatttcctcgtatcactaggcagtgccctgattatgattgtttcccaatacggatttcaggagattataaaagaaagcagtgtcacgctcgaccccagtcgtgtggcagctcaagtcgtcagtggcatcggatttatcggtgcgggaaccatcatctttcaaaagcagattgtacgcggactgactaccgccgcaggaatctgggcaactgccggtatcggactggcagtaggcgcaggaatgtacaccatcggcattgctgccatggtattgaccctcatcggactggaattacttagttacctgtttaaaagcatcggaatgaaaagctcgatggtttctttctctacttccaacaaagacactctgaaacagatagcggacagattcaactctaaagactacctgatagtctcttacgagatggaaacgttgcataagggcgaagcagagttttatcaagtgagtatggtcatcaagtcgaaacgaaataacgatgaaggacatttgctttcattgatacaggagtttccggaggtaacagtgcagcgaattgaataagtccctttacaaaaaaacaatagagacaagaaaagcagaagaaacaaggaggagtattttaattctaaaatataaagagatgaaaacctatttctgcttttccgtcagatacttccaataacgtacaggcatatcctgcctgtgctttctcggattcatacgttctttgatacaaatggccttgaaataagttttccagagttgttggaaaagtttctcatccttgtccatcagactttcatccagcatccccgtaatcagatgggattcacggctgtcatcatcaaacgaaatggttgtcacctcctgcaagtcataataaaaaccataacggcgtttcatgtcgtagataatccacttctgatcggcaaaacggtctttgaaatggtggacggtaagaggaagcgcattatactgcggttcgaaagccgcaaagaatgtaccatccgcagctttctgaaaacggacaaactgcatcaggtgcacacgttcgccatccactttcttccatatttgcgccaatcgcaaaacatccggatcgccaaaattggtttcgatggaacagggtgagtcaatcgctttacggatataacgaaaaatgagcatccctacctccggaagctccgacagccaactttgtgtgaggcagcccaaagcagatacagagactttcttctgcaatccccgccacacacgccctgccttctcttcatcggtaactacggtatgcaactcatcataaaataagggcaaagcatctccttccgacaacaaatcatcgggaaaggtcttgcgaaaataggcgtcgaacacagcagtcagcagaccatcaaagcttttatcgtaaacgaaaaatttcaagatttatgatttatgatttatgatttatgggttatgatttatgatttatgatttatgggttatgatttatgatttccgggttatgatttatttttaggcacggattacagggattaatgcggattctttgcagcaatgacaacactaaaaaccgtgtaatccatgtaatccgtacctaaattattatataagctaattaacatacttagtaattcgtttaatcagaattcataaatcataaatcagaaatcaagtcgtaattggcgttcatccactttcttttttggttttgggagcaataagctacgtacccgttgcggcgaaagttcgttcacagtcagcatttggagaggcagttctttgcaggtgatgaaatattgcgccttcttcatcaccactcctatcttcttcagttcataaaaacccagtcgcgaaaaacggcgggaggcgacaatcaacttcgccgacttcactcccactcccggcacacggagcaacatttcgtagtccgctttgttgatgtcgacaggaaactgttcgggatggcgcaaagcccacgagagtttcgggtctatctcaaggtcgagatccggataggcatcatccacaatttcgtccaccttgaattggtaaaagcgcaataaccagtcagcctgatagagccggttttcacgtaccaaaggcggttgcttcaatgccggaagacgtttatcgtatgtattcacagaaacgtagcccgaatagtagacacgcttcatggtcggccgtccgtaaagagccgacgaaaggaaaagaatatctttatccgactcggaggtagcgcctacaatcacctgggtactttgtcccgcaggcgcgaaacggggtgcatggcgaaacttctgccgttcttccttactctccaacacaccttgctgaatgtatttcatcggagcaaatacacttttatgatctttctccggtgcaaggagtttcaggttttcttctttgggaatttcgacgttgacactcaaacggtcggcatacagcccggcctcattcaccaattcacgactggcaccgggaatactcttgagatgaatataaccgttaaaccggtacacttgccgcaaatctttggctacacgcaccagtctctccatcgtatagtccggattgcggaccactccggaactaagaaacaacccttcaatgtagttacgacgatagaattccatcgtcagttccaccaattccgaaacggaaaatgtggcgcggggaagatcgttgctacgccggttgatacagtaggcacagtcgtagatacaataattggtaagcatgattttcaatagcgagatacaccgcccgtcctcggcaaagctgtggcaaatcccccatcctccgacagtgtttcccagcgtgcccggcttattggagcgcaccgtaccactggaagaacaggaaacatcgtacttggcagattccgcaagtatcttcagtttagctaagacgttttcgttcataattcccaatcttgattcttttcgcaaaggtatataaaaaaacagattttttacgcccggta

SEQ ID NO: 8223 - DNA, 25209 bp, Unknown
  gut microbiota DNA sequence
ttactgcatttgccaaagcatcgacaccttttttcaattggtcacgggcatcgatattgaataatatttcttttgccatctctttatttactatttaaagatttactatttactattattaattaacccaaaacagcgagaacatcgctctgacgcatgataagatatttagtaccttcaacgtcaagttctgttccggcatatttaccataaagaactgtatcgcctactttcaataccatctcttcatctttcgtaccgtgacctactgccacaacttcacccttcaaaggtttttcttttgctgtatcaggaataatgataccaccaattgttttttcttctgcaggtgcagggaggataagcactctgtctgctaatggtttaatgttcatagttacttgttatattttagttatacatttaattgtagatgttatccaccgtctttcaggcggaacgctaaagttattgcgaaaagcgtgccaaagtaaataaatgattctttgtcagaaatagactgacaaaatgactgacaacttgcactgtatggcaaaaaagtatatttgtcacctactttttaaacaaaacaaaaggattattccttataatgatgtatattcgtaaacgaaccatcaaatgcactgtataaataatatgaatagaatagcatccggcctcatcattgcctcttgcgtcttctactcctgcacttcgcgtacaggggagatttctcctgtacatgaacaacaacagacagattcgctgtcgcaagatacaataactcaacccgaggttaaacctgttgaaaagaaactcacagcagagcaaatacaaatcaccaaagatttattgtatgaccaatatacattggaagacacctatccttataaagacactacccggcagtttcaatgggacaaaatcaaagaacggctggctttgcttgaaaatatacaattgcagccttccacttgggcaattctccagaattacaaaaatagaaatggagaagcaccacttgtgaagaatttcaaaagaaacgcttacggacgggtggcggatactctcggcatagaacgttaccaatccgttccgctttacttgttgaccgacacattagtgcccgaacgatacggtcaggatggagaactaacccgttttatcgaagatggggaaaaattcataaaagcagagccaatgtttaccggagatgaatggatgattcctaaaaagtatgtcaaagtaatcggagatacgattgtttttaacaaagctgttttcgtagaccgccacaatcagaatatcgctgctctcgaacgtagcggagaagggcaatggatggttcgcagcatgaatccttccactacgggacgccacctgccgccgtatgcacaggaaactcctttaggaatgtttgtattacaggaaaagaaggcgaagatggtatttctaaaagacggttcgaaagagacaggaggttatgctccttatgcgagtcgtttcacggatggagcctatattcacggagtaccggtcaatgctccccgcaagacacagatagaatatagtccgtcgttaggaacgacaccgcgttcgcacatgtgcgtacgaaatgcaacttcccatgccaaattcatttatgattgggcgcctgtaaatgaaactattatttttgtattggaataaacgttgaacaaacatacaccactattcccgaatcgctactacctatcgtccaaagtataactagaaaagttcttttctataaggtgagaacttgcttttctcttggggaaaagttactttccccttactccaatctataaacgcaagttgcaattataaaaacaaagcttgcaattataaaaacgaagccttcatttatataatcaaaagttgcaattatagtttgctctacagccttaataagtttccttcctatgcaaaagaagtttgcataggaggggaaagaacttttctatacgtacttgagggaaaagataaagaggtctgaacttttcagtccagacctcccaatatagaaagggatttctccatcccgtattaccttaatcaattatgtgtgaaactctcttttatttatcttcagtcttacccaacccataccttgctcttgttatatcctgaacaagttctctctgcacactttccaatgcgtttatttctttctgcaacaactccaaagcagaacctttctgcaataaataagaccgttcagcatattttatataagaagtcggaatctcctgctttttttctttataatgggcaatcacataccgcaaagcttctgcccgatatttgctgatcgctttccgttcggcataatacaaatctttataaggattttcttcacttctcaatttcttccagaatgcagaaaaagcagtcgatacagcatccttctcctctttggttactgcttctttctgcttctttgtcagatccttatattccttatatgtatttagaaacttatccaattcatctttactggctttgtgcgccagtcggtaagtttccaaagaagcaggacgttcatattcgacaactgtttgtagataaggcaagtcgttccagcttatatatttattgtttgcttcacaataatctgcataagccgccgcaagctgccaactatattcttttgtcttttgattcaaatcctcattgatagcggacaagttcttttccatctcttgcaagtcctgcgctgacactgtttgcatacttccccatccggagagaaacaaacaaagaatactccataatatagttttcataattagataatttaaattttctccaaagttattatttctctacagaattccaaacgatattacagatttgctatatatttccacaatggagcagcattcagcgcttgcataatttcgttcttatcaagcagactcctcacctcttccaatgtaagcagatgtacgctgatatcttcagtagcttccagatgctgatggtctatcagttccacgtctgtagcaagaaagcaataagtcagattggtatgagtgcttggattagcggaaatcaccatatattcctgccagtttccttttccgtaacctgtttcctcccacaattcacgctgggcggacactaacggtgaagcgtcttccttctcacagacaccggcacaaagttcataacaagttcgttcaattcccggacggtactggcgaacaaaaacaaatttaccatcttttgtaatggcaatcgtatttacccagtcgggatactcaagaatataatattcggggatatggttaccgttgggaagcaacatatcttcgcaacgcacagtcagccacggacggcgaaatagatatttactactcaccgttttccaggctctattcttttcttccataaggtctgttttttcttccggcaaaaatacaaatttcccccgggttatcctacctttcggttgcttgtttttattcgtctgtgtcgatacaagtgatctctatcccttgtatctgctccagatattttttggtagagcttaccaaagaacttcccatgtagaataaaaacagcaggctgataataaccatcaatgcgccaatcatggcaaaacgactacgttgttcgaaaatactgctattcataactctgcctcctctaagttttttgtccactacaaagataacacgcgagggctacaaaaaagttacaagaatgtttcaaaaaacttaaatattgaaattctgttcgtatctttgcaccaactaactaacaacctctttattacagtatggcatttacgaataatattatgattgtccggcataaattgctggcagacctcgttaaactctggaaaaacgacgaattagtggaaaagatagaccggctcccgattgagttgagtccacgcaaatcaaaacccctaggacggtgttgcgtacataaagaacgcgcagtgtggaggtacaagacttttcctctgatgggattggatatgacagacgaacacgacgaagttaccccgctttccgaatatgcgcgattggcattgagccgccccgaaccggacaaggaaaatattatgtgcgtcatcgacgaggcttgttcttcctgtgtacagatcaattatgaaataaccaacctttgtcgcggatgcgtggcacgtagttgttacatgaactgccctaaagatgcgatacgtttcaagaaaaacggtcaggcaatgattgaccatgacacatgtgtcagttgcggtatttgtcacaagagttgtccttatcacgctattgtatatattcccgtaccttgtgaagagtcttgtccggtaaaagctatcagcaaagatgaacacggcatagagcacattgatgaaagcaagtgtatctactgtggaaaatgcatgaatgcttgtccgttcggggctatcttcgaaatctcgcaaacattcgatgtattgcagcgcatccgtaaaggggaaaagatggtcgccatcatcgccccgtctattttgggacagtttaaaacttctatcggacaagtgtacggtgctttcaaggaaattggatttactgatgtgatcgaagtggccgaaggtgctatggcaaccaccagtaatgaagcacacgagttactggagaaactggaagagggacagaagtttatgactacttcctgttgtccttcttatatcgaactggtagagaaacatattccggatatgaaaccttatgtttctaccaccggatcaccgatgtactacgccgcacggattgccaaagagaagcatccggatgctaaggttgtgtttgtcggcccttgtgtggctaaacgcaaagaagtacgtcgtgacgaagcggtggattacattctgacgtttgaagaaatcggttcgattctcgacggactgggtattgaactggaacaggtacaggagttctctgtattacatacgtctgttcgcgaagcacatggatttgcacaggcaggtggtgtgatgggagctgtcaaagcttatctgaaagaggaagcggataaaatcaatgcaatacaagtgtcggacatcaataaaaagaatatcgctctgttgcgtgcctgcgccaaaacaggaaaggccgcgggacagtttattgaagtgatggcatgcgaaggtggatgtatcaccggaccaagtacgcataatgatattgtttcgggacgtcgccaattggcacaagagctgctcaaacgaaaagagagctatgaaacaatggatcgataaactacggcaggaaagaacacttagcccggaagagctccggcaactgttgaccggatgtgacgcagaaaccctgtgttacatcaataaacaggcgcagaaagtcgctctccgccacttcggaaataagatttatatccgtggactgattgaagtcagcaattgctgccggaacaactgttattactgtggtatccgaaaaggaaatcctaatatcgaacgttaccgattgaacctggaaagtatactggattgttgccaacaaggatataaattaggtttccgcactttcgtgctgcaaggaggagaagatcccgcactgacagacgatcggatagaaatgactgttgcccgtatcaggcagaattatccggattgtgccattacactgtcgctcggagaaaagtcgcgtgatgcatacgaacgtttcttccgtgccggagccaaccgttatctgttacgtcacgaaacatataatgagtcgcattatcggcaactgcatccggcagaaatgtctggcaaacagcgcctgcaatgtttagcggatttgaaagacatcggctatcagacaggaaccggaattatggtcggcagcccagggcaaacagtagaacatatcatcgaggatatcttgttcattgaaaagctacagccggaaatgatcggcatcggtcctttcctaccccatcatgatacgccttttgcccaatatcccagcggaacggtggaacggacgattcttctattatcgatcttccgtttgatgcatccatccgcattgattccggcaacaacggctctcgccactcttatccctgatggcagagagcggggtatattggctggtgcaaatgtggttatgcccaacctgtctccccgggaggaacggaaaaaatatgaattatacaatgacaaagcttcactcggagcggaatccgccgaaggactggctaccttacaaaagcagttgaataccatcggttatgagatatctaccgaaagaggcgactttaagttcaccacagattacacggattcacacagattaaaatttaattcgaaataaatctgtgtgaatccgtgtaatctgtggtgaaaaaacaaagaatattatgatataccaaaaagattcatccaaagcagaagagtttatccatcacgaagaaattttggatacgctggaatatgcacagaacaataaggataatcgtatcctgattgaacaactgattgaaaaggcagcgttgtgcaagggactgacacaccgggaagcggctattctgctggagtgtaaccaacctgacctgatagaacgtatctttcatctcgctaaagaaattaaacagaagttttacggtaaccgtatcgtcatgttcgcaccgctttatttatctaatcattgcgtaaacggttgcgtatattgtccgtatcatgccaaaaacaagactattgcacgcaagaaactgacacaggaagaaatccgccgggaggtaattgctttgcaggatatgggacataagcgactggctcttgaagccggtgagcatccgtcactgaatccgatagaatatattctggaatctattcagacgatttatagtatcaagcataaaaatggagctatccgccgggtaaacgtaaatatcgcagccactacggtagaaaattatcgccgattgaaagaagcgggtatcggcacgtatatcttattccaagagacttatcacaaagataactacgaagctctccatcccaccggacctaaaagcaattacgcttatcacaccgaagcgatggaccgcgcgatggaaggaggaatcgatgatgtaggcattggcgtccttttcggtttgaatacttatcggtatgattttatcggattattaatgcatgccgaacatttggaagccaaattcggtgtagggccgcatacaatcagtgtgccacgcatctgttcggcagatgacatcgatgcgggagatttcccaaacgctatttcggatgagatattcagcaagattgtagctgttatccgaattgccgttccttatacgggaatgattatttctacacgtgaatcgcaagaatcacgcaagaaagtgctcgaattgggtatttcacaaatcagtggcggttcgcgtaccagtgtaggcggatatgctgaaacggaattacccgatcataattctgcccaatttgatgtgagcgacacccggacattagacgaagtggtcaactggttgctcgaactcggatatatccccagcttctgtacagcctgttaccgggaaggacgaacgggtgaccgtttcatgtcattagtgaaatccggtcagatagcaaactgttgcggaccgaatgccctgatgactctgaaagagtatctggaagattatgcttcagaagatacccgacagaaaggattggaactgattctaaaagaaactgaacgaatccccaatcccaaaatcagggaaatagcgatccggaatctcaaagcaatagctgcaggacaaagagactttagattttaaataatacattgatgtgctaacatatcaatctgccaattagctacgcacgaattaacaagttgaaaaattatcaattatgagcctaacagatactccaaatgcaaacagacttcatatcaccctttttggcagacggaatagtggtaagtcttctcttatcaatgcgttgacaggacaggacaccgcgctcgtttcaaatactcctggaacgactaccgaccttgtgtccaaagcaatggagattcaaggtattggtccttgtctttttatagatactccggggttcgatgacgaaggagagcttggagaactacgtatcagccggactttaaaggctattgagaaaacggatattgcattgttattatgtgaagacactaccttttctcatgaaaaagagatactgacgctattgaaagagaagaatatccctgtcattccggtattgaataaaatagatatacgagagaatagcgatcgttcagctacatatattgaggaacaatgcaaaatacgtccattgcttatcagtgccaaagaaaagataggaatcgaactcatccggcaagccatcctcgaaaaattaccttcggacttcggccaacaaaatattaccgggaaacttgttgcagagaatgaccttgtacttttagtaatgccgcaggatatccaagctcccaaaggcagactgatcttaccgcaagtgcagactatccgtgaattgctggataaaaaatgcctcgtaatgacttgcaccactgataagttttctgcaaccctacaagcccttgcccgtcctccgaagttaatcatcaccgattcacaagttttcaaagcgatttatgaacagaaaccaaaggaaagtgaactgacttctttctcggtgcttttcgcaggttataagggtgatattcactattatgtagaaagtgcagctgtcatcgaaagactgacggaatcctcacgtgtactgatagcggaagcttgtacgcacgctcccctttcagaagatataggaagagtgaaacttcctcgtttgttacggaaacggattggagagaatctgcaaattgatatggtagcaggaaccgactttccacaagatctgactccttactctttagttatccattgcggagcatgtatgtttaaccgtaaatacgtacttagtcgcatcgaacgtgcgcgggagcagcacattcctatgacgaactatggagtagcaattgctttcctcaatggaatactagatcaaataaaatattaaaaaaagaaatcttctcttttttattttgaagcgaaccccaaaagttctttatctaacttttggggttcacttcatttttatgttaagacgacctttttatattaactaattatgatgacatacttagttctaatatatctgcttatttcttcacaatagcaatcagttcgtctgctgaaacaaggttctgttctcctgtctccatattcttcaacatcactttgccttcgttcatttcgttctcaccgacaatagctacaaacggaatattcttcgcattggcataactcatttgtttcttcatcttgacagcatccgggaaaatctcggcacgaataccggcagcacgtaccttagccaaaattcccattgagtatgcagcttccttttcaccgaagttgataaacagaagttctgttccgtttacagcttctttcgggtaaagttcgagctggttcaggacatcgaagatacggtctgcaccaaaagagatacccactccggacactcctgccataccgaatactccggtcagattatcataacgaccaccaccagtgatactgccaatctgtacatccagtgctttcacttcaaagatagctcctgtataatagttcagtccgcgagccaatgtaagatcaagctctatttcattcttcaagcccattgtttccaatgtattcagaataaattcactctcttccactcccttcagccctacttcactggctgataacacattcttcaatgttgccaatttctccgcattcgtaccactaagaagaatgatcggctgcaacttggcaatagcctcatcactgattcccttctctttcagttcggcatttacattatccagaccgattttatccagtttgtcaattgctacggtaatatctacaatcttatccgattcgcctataatttcagcgatgccggaaagaatcttgcggttgttaatcttaatacatacacgaatattgaaacgactaaaaacggtatcgacaatctgcatcaattccacttcgttcaataacgaatcgcttcctacaacatcggcatcacattgataaaattcacgataacgtcctttctgcgggcggtcggcacgccataccggttgaatctgatagcgtttgaacgggaaagtgatctcatcacgatgcatcacgacgtagcgagcaaaaggtactgtcaggtcataacgcaaacctttctcacagaatttgcttgccagtttggcagcattacggcttaacaattcttcgtcagtaatcccggaaaagtaatctccagagttctgaatcttaaagagtagtttatctccctcatcgccgtactttcccatcagtgtagaaagcatctccatcgaaggagtctctatctgctggaatccatacaaatggtatacgtcacgaatcgtattgaatatataattacgcttcgccatttctaccggcgaaaagtcacgagttcctttaggaatacttggttttgctgccataatattactgtttataattttaattgcgcaaatttactgcaaatttccgagcaatacttacatatatttgaaaaaatcacccgtattgtgtccatcccctatcaatatcgtaaagaaacactcaagtaagaccctaaacaatacaaaaaatcctccatagtcttcgaaaagactgcggaggatctttttatattctatggagagaagttaataaacgtacttttctccctttttcatttcttagtctcttctacccatgaagatcatgatgtagtataccaatgtagccagtgagcctaatgcagcaactacatacgtataagcagcagaacgaagagcatcctcagcctgtgcatgattgtacgaattagtaatgccggatgaactcaaccataccaacgcacgtttacttgcattgatttccaccggcagcgtgataaagctgaacagtgtagtcatagcaaacaggataatacctgccagcaataactgcgggaaactctctatcagcaagataccacccaacaatacccacgtcataatggaagaggcaaagtttaccaccggaaccagcgcactacgcattttcagcggagcatacatgcgtgcatgttgtacagcgtgtccacattcatgagctgctacggcagctgccattatactgttactttcatacaccccttcactcaaattcaccgttttgttagtaggattgtagtggtcggtcaaccgtcccggcgtatgcgtaacctgtacgtcataaattccattgtcatgcaacatttttaaagcaacgtcgcgtcctgtcattccgtttcctgtaggaatcttagagtacttcttgaatttgttttgcaaattcatctgtaccaaccaacttacaacagcgattcctataaataatacccaataagacatcatatacttttcaattttaattattactctatatctttataaacaaattgtttgccaaaaataaggggaaacgttcaatgtcagaatagtttccccttgcttttatgaagaattagctaaaaattagtcaattgtcagttctaccacatagtcaatatctttcggaacctcggcgaattcgagcaaaacaccggctttcgtctttgtgaaacgaaccggagactggtctttaaacaagactgccttcttgaccttcttatctgtcaacggcaggaacaaagccgcatctttcaggtcgagaatatgcacatagagcttatttcctttttgtgttgtcactccccaatcgtgtggagcaactgcaccgcttcgtgttccataaatcgtttcaccatattgtttcatccactctcccatctctgccaagcgttgtacagctaccgcaggaagctctccatcgggttgaggaccgatattcatcaaaagattggcattcttaccggctgccttcaccaaataatgaatcaatgtctttgttgatttataattctgatcggtaatcttatatccccacataccattcattgtttcgcaagtttccaacggcaagcggctcacctcctgtccggaaagccccgaagcattttcaccgggcagatcgcgttcgaaaatctgaatatcttccccgtcaaaaggcgtttgatgatgattgttacccaccagacaccccggttggagtttgtgaatcaaagcatactgctccggtaattcccagttaaaagttttgggctgatcccaccatccgtcaaaccagatggcacctatcgggccgtaattcgtcagcaattctgtcaactggttattcatgaattgataataacttttccaatctcctttcgagttcgagcgccccgtgccctgccctgtacgtccccagggatagtcttcgcgcgcccagtcaagatgtgaataataaaaatggagcttgatgccctgcttggcacaggctgctgccaattctttcacaatatctcttttaaaaggagtagctttgactacgttataatccgaatacttagtgtcaaacatagaaaaaccttcgtgatgacgggtagtgaaacagatatatttcgctcctgaagctttaatagctgccacccatttgtccgcatcaaacttggaaggataaaatccgcctgccagtttggcatactctttataattcagattattgtttgtcatagtccactcaccggtaacgagcatagcgtatagcccccaatgaagaaaaataccaaacttattgtcctgaaattcctgccgtgctttcaaattctcttcggtaggctgataggaagattgcgcaaatactcccaagttcattacgaacaacaaaaggaaagctataaaacgtgttttcataaggcatacattatttttgtgtgtttaggatagactatacaaaggattgaacaagaaaggcggagtttttcttcaatctccgcctttcctccatataataaatcaattgttattcttcagtataacgttcgatggtctgtgctctgtccggtcctacagatacaatcttgatttctacaccaagctgttcttccaggaaagtcaggtaagcattgaattcttccgggaattcatcttcgctctgcatcttggtcatatctgtctgccaacccggaagctctgcatatacaggttctacgccttctgtgatgtcatacgggaagtagtcgatctcttcaccgttcactttgtaagcaacgcacgctttgattgtttcgaaagtatcgagtacatcgctcttcatcataatcaatttggtaactccgtttatcataacggaatacttcaacgctaccaggtcgatccatccgcaacgacgtttacgaccggttacagaaccgaattcatgtcccaacgtacacatcttgtcgcctgtttcgtcaaacagttctgatgggaacggacctgctcctactcgagtacagtatgccttgaagataccatatacttcaccgatacggttaggtgccactccaagtccggtgcaggctcccgcacatacggtattggaagaagtcacaaacggatatgaaccgaaatcaatatcaagcatagtaccctgcgctccttcacaaagcacgctcttaccatccttcaacaggttattcacttcatgttcgctatctacgaaatggaattgtttcagatattcgataccttccaaccatgctttttccagttcagtaagatcgtattcataattcaagctcttcagaatttgttcgtgacgagctttcgcagcagcatacttctggtcgaagttatgaagaatatcacctacacgaacaccgttacggctcactttatccgtgtaagtagggccgatacccttaccagtagttcctactttagcatcacctttggctgcttcgtatgcagcatccagaatacggtgtgtcggaagaataagatgagctttctttgaaatgtgcaaacgttctttcagcggatgacccgatgcttcaagtgcttctgcctctgctttaaacaatgccggatcaagtaccacaccattaccgatgatgtttaccttgtttccttgaaaaataccggaaggaatagagcgaagcacatatttctgtccttcaaactcaagcgtgtgaccggcattcgggccgccctgaaaacgagcaaccacatcatacttaggtgttaaaacgtcgactacttttcctttaccttcgtcgccccattgtaatcctaatagaacatctactttcatttttcttttttattgttgttatttacttttttccgtttgttagctctgtcgcacttactacatactccatatatatataaggagtaatgcgaaagctggaagcggctcaatttcgtattttcaatggcttgctgcagttcctcgttttgaaactcggtcactttaccacattgagtacatatctgatgatgatgtgtctcgcgattatatgatttttcgtattgggaggaagtaccgaactgatgcttaatgaccagccgtgcattgataagaagaataatggtgttgtagagagtcgcccggctcacccggaaattctcctggtccatcatccgtgaataaagcatgtcaatatcgaaatgaccgtcgatagaataaatagtatcgagtatggcgtagcgttcaggagtctttcgatgcccgttcgccgtgagatattccgtgaatatctgccttactgtatctttcacgttttgagtttccatcatcagccaaaattagcgcgaacaaagttaagccttttttgcggaaagcaaatgataaagagaagtttttttagttcatcacagagttagacagtttttttataaattaaatggaggctatcattcgttttgtagattggcttatataataaacgaataacaagacggtttattttttagacgcatcatccgtgttatccgcgtctaaaaaattaaaccgttatttaataaaaggacttactccatgaaaataagattagtctacagcaagctcctctttcaccatattgtagagcatttgctctccttccaaggtagaatcagccataccttccaccaagcggcatacttgaaaagcatgttcctcgctatgctgcatatatttgcggataaccagcaaagctgcgttacgaatatgatagctgtcggaatgtaccgcacaaatcgcctggtcgagcaattcgccggaagcgcgttcggtcatatcccctttcttcatcagaagacgggcggcagtcaggaaaccacaagtctgcacgtactcctgttcgtcggcaatccaatgaaaggatttggccggagcatacggtaaatgctggaagagattcatacaagtcagttctgctatttcgatattccggatgttttccacccaaatatcggctatctcgggataaaacgtttcaatcggctgaagcattcccgccagaatcttacactcgcgaatttcctctttccataaagcctgcgccaggtcatgattcttttcgtaaccttcggcaatcatcttgatacgaggcagttccactccgaaattgagtttataaaccagccctttctcgcgcatactttgggacacagccccgttcatagagagacggagctgtgtcttgatatctttcaattgttctttaatatccatttcagatcagttgtttatggaaggcagcggagaataatcagtgctgtaacgcaacatttgttctacataaccttcatcataagaaactgtgacatccgtaacgtttccgttttcatctgtcaccagttcgtatttcggattcacaaaacctttataaggagccagattcaacttcttataacgttccagaacttctgcatgtaaagccggatctacttttacggcatagttttctaccaatgaacgggcaccttcgaagtcgcctgtcgatttgattcgctggatttcagccaacaattcgccgaaaagctcgcgcactttctgatagtcattgataactacataagtctttccgtctttcttcgtcaattccaccactttatcggcagcccccttctcaaatacccaacgggctatcaactggcggttacgcatgtgagcttcttccacagtatttcccggttcgatacgtaccaactgcgtcatcagaccgttcatcagataagtataatattgagctttataagcatcgggagaagagagaagtcccagttccaccagcttggggtcagccacataatacaatccgaacaaatcggcacgcgcctcttcgatggtagagccgtatgctttcaaagcatcaggatctacacccggaagtaacttaccggaaccgtgtcccaaacattcgtgcaagtccgtatgcagctcatccgttaaatcagaatacgcatcgatcagttgtatttccgcatcgctataaacaaattcttcgttgaatccgtttccgtgagcggctttattataagcatctgttatatttccgattgtcaccgatttagaaccgtggtgagcacgaatccagtttgcattcggcagattgataccgatagccgttgccgggtaaagatcacctgcaaggatagcggcagtaatcactttagccgataccccttttaccttttctttcttgaaagatttatctacgggagaatgatcttcaaaccactgcgcattgctactgattatttctgtgcggtgcgttgattccaaatctttgaaattcactaaagactcccagctcgctttcatacccaacgggtcaccgtaactttcagtaaatccattcacaaagtcgattcgtgaatcaaggtctttcacccaaagaatggcatattcatcgaaatctttcagattgcctgtttcatagaattgaatcagtttggtgatgacggccttttgtgcctcattctccgctacaccttccgctttcttcagccaataaacaatcttttctattgcctgtgtatagagtccgcctactttccaaactttctcctccaactttccgttttctttgaccagccgactgttcagcccgtaagaaaccggtgtttcgtctttcgggtctttcagggcgctataaaaactctctgcctctttctgcgtcactccgtcataatagttacaagcagaagtcaacacaagatcttcgccatctgcctggtttacccgtttcggcataacagtcggatcgaaaatcaccggaaacagttcggcacaaagttgttcggcagtctgtcctttcgccaacggcagcaacttggcatctataccgagtacagcctgtttcaagaactcctgcgagaagttgggcacgaatttctccgtaccatagtgatgatgaataccattggagaaccatacccttttcagatacacctccatatttttaaaatcaggcgttgttttatctccctgatagtttgtatatactgcttcgagcatccgacggattctcaaattatattttccattctgatcaaacagaatatcccttccttccagagcagcctctgtcaggtaataaatcagttccttctgtttcagcgtcagttcctcaaatccgggaactttataacgcaatatctgtaaatcagcaaattgttccactgtataatcaaatttgtctgcttcagcagttgttgttttacttcctccgcacgatgttaaaagcgtagcggccactgtcattaaaatcagatgttttttcataatgctagcattgattaattaaaatgagaaaaggaattatctccaaaatctttcatttagaggtaattccttttgactaatttcggaacgcgcaattatttcttattttcgagatgttttttgcgatatccattaggagtctcacctacgtttttgtaaaatgcagcgtaaaaagattgacgatttgcaaagccaaccatggcactaatttcttccacatttttgtcggcataacgtttgtcagtcaataaatgcaaagcatcttttactctgtattcattcaacaggcaagaatagttcatgccaaagcgtgagtttactactgcagaaaggtaacgagtattcgtcttcaattctttcgccaagtccttagctgaatagtcaggatccttgtacttcttctgtacaacgatgatattcaggatcttgtcatacaactcgtctgccaattccggtctaatcaaagacctgtatgcagccttcttttctttcttttccctcaaattgtagggacgttttttcggagtttcttccgtttttttgttctctaaatcactcattgaattaactggttagggtttgttcatttgttaataatcgctcaattgcaacataacacgttacaaatgtcttactttttttttaaacacacaattattttgtgcattttttttctaaataaacaatcaaaaaccttgaaaaagaaggaatagccttgaataataagaaactttaacttatttataattcatatcagaaactgaaatctacacatgatgaaaattgccaaagaaaaatgtacctttgcagcatggataaatcagcatcaatgagagagactttaaagacatatttcgggtacgatagtttccgtcctctgcaagaagaaatcatccgccacatcctgaacaaacaggatgcattggtattaatgcccactggtggggggaaatcgatctgttaccaacttcccgcactgctttgcgaaggtactgccgttgtcgtttctcccctcatctcattgatgaaagatcaggtagaagcattgctggcaaacggcatcgctgccggagcgctgaacagcagtaatgacgaaacagaaaacgctaatctgcgccgcgcatgcattgaaggtcgcctgaagctgctttacatttcaccggaaaaacttttagctgaaaaggactatttgttgcgggatatgaacatctctctgtttgctattgatgaagctcattgtatttcgcaatggggacatgatttccgtccggaatacacacaaatgggagtgctccaccaacaatttccgcaaataccaattgtcgcactaactgccaccgcggataaaatcacgcgtgaagacatcgtacggcaattgcatctgaaccatccgcgtaccttcatttcctcgttcgaccgtcccaacatcagcctgactgtgaaacgtggatttcaagcgaaggaaaagaacaaggctatcttagaatttatccaccgccacgggggagaaagcgggattatttactgcatgagtcgaagtaagacggaaaccgtcgcacagatgttacagaagcagggtatccgctgcggtgtttatcacgccgggttatccactcaacaccgggacgaaacacagaatgattttattaacgaccgcatacaagtggtatgtgccaccattgcttttggaatggggattgataaatcaaatgtccgctgggtgatacattataacctgcctaaaagtatagaaagcttttatcaggaaataggacgtgccggacgtgatgggttacccagcaatactgtcctgttttattcattaggcgacttaatattactaactaaattcgcttcggaaagtaatcagcaaaatatcaatctggaaaagctccaacgtatgcagcaatacgcagaagccgatatttgccgacgaagaatcttattaagctacttcggagaaacaacaacagaggattgcggcaactgcgatgtttgtaaaaatccccctcaacgattcgacggtacagtcatcgtgcaaaaagcattaagtgccatcgcacgcacagaacaacaaatcagcacaggagtgttgattgatattcttcgtggaaactattctgcggaagtaaccggaaaagggtatcaggaacttaaaacgttcggtgccggacgcgacattcctcctcgtgactggcaagactatctgcttcaaatgctgcaactcggctactttgaaatagcttataatgagaataatcatctcaaaataacgtcaagcggaagtgatgttctcttcggaaggacacaagcggcattggtagttatccagcatgaggaagcagttacccgaaaaggaaaaaagaaaaaagtggttatcgccaaagaactccccttcggcgcggcaggcggcgaaagccaagatttgttcgaagcattgcgaggattaagaaaacaacttgccgatcaggaagctttgcccgcctatatcgtcttgtcagacaaagtgttgcatctgctttgcatctcacgtcccaccaccatcgaagagtttggagaaatcagtggtatcggcgaacacaagaaaaagaaatatggaaaggatttcgtaaatctgattagacagttcgtagaataaaagaaattcttgaatagtatatattaacgagtcacctgactaatgattattcgttccactaaggttatctttccgttccacagttgtttccctttagttccacataggtagaactaaagggaaacaactgtggaacgaactaatgcctataacaaaaggcgctcacttatgtaaaccggaaagatatagttggcttattaataacttcacttgcattgccgcaattgctcgtgcaaatcagccggaggcactcccaatgaaatagctttttcaaagtcagcttttgccagtcctttcttcttctgtgccaggtagatatttccacgcaacagataagcatcagccgaggcagcatccaaccggatggcttcctccaaatcgaccaatgccaaatcttcatgtttcatctcacgttccacatcggcacgggcaatatagagcgtcgcatcttcaggagtggccgcaagcatcttattcaatatctcaagagcttcccggaattttccttctttctgctccaaagtagccagtcccagccgtccgctatagctctgcggatcgagttccaataaacgattataatctattctcgcagccggataatcgcggcggagcacataaatataagcacgcatcaacaaagcttctttgttctgcttatcctcgtccaacacctggcaataatccgtataagcacggtctgtttttcccatttccatataaatggcggcacggtcgagcaaaatagggactgccaaaggagcaaagttcagtgcaaaagaataagattccaatgctttatcaaactcgcccaaacgacgctgaaccaatcccaagttagaaaaaagcagtgcattctttgcgtttttcggttccaacttcaaagcctgaagcaaaagttcctctgcctggggaagactgtctttttcgatacactcaatggctctctcggacaattgttgataggtttgcgcaaaggtaacagccggaaaacaaaaaagcaaagctataattattcttaccatggttcaggtctttttatagtgaatgaattaatccaatggatatgcgtcaaaagcaaacagttcggtcgacaaataacgctctcccgtatcaggtaacaacgctactatttttttgttcttaaattccgggcgttgtgacagttgacgggcggcatacacagctgctcccgaagaaatacccgccaacagaccttctgttgccgctaactcacgtcctgcacgaatcgcttcatcatctggcacgcctattacttcatccaccaccgaagcatcataaagcttcgggataaaattcgctccaataccttgaatacgatgcgaagccgcctctccgcctgccaacactggagacgatgcaggttccacagcaacaatataaatattcggattatgtttcttcaaagcacgggctaccccgcagactgttcccccggtaccaactccggctacaaaaacggccacttcaccgtctgtatccctccaaatttcttcacccgttgtccgttcatgaacagcagcattggcgggattttcaaattgttgcaaaatcaccgaaccgggaatactatcacgcaactcctgcgctttggcaatggaagctgccatccctcccagcccatctgtcaatacaatctgcgcacccaacgctttcaacagattccgccgttccagactcatcgtttcgggcatggtcaatatcaggtgataccctttaatagtagccaccattgccaaccctacacctgtatttccgcttgtcggctcaataatcgttgcaccgggtttcaatgctccacgagcttccgcatcttcaatcatcgaaagagcgactctgtcttttacacttcccgccggattaaaagcctccagtttggcaataatattttgttccagaccatactttccactataaccggaaagttccatcaaaggggtattccccactaaatctgttagtttctttgcaatctttgccatcttattacttcatttttgtcacagacacgacaaagatatggaaaaaaaggtatgttttacatcacatcatgagaaagataaggaaaagtatagtaactttgtatccgttcaatctttttaagtttacatatatgaaaaagagaattatacaatttctcacgacctattttttatttgttcttttattcgttcttcagaaaccaatcttcatggtttactaccatgacttatatactaatgtatctttgggtgactatttccgcgtcatgtggcacggattaccactggatttatctcttgcgggctacctgaccgctatccccggaatcctgctcattgcttccgcctggacaaattcatccatactccgccgcatccggcaaggatatttcggagtaatagcctttgtcatggcctgcatttttatcatcgacctgggattgtatggcttttggggattccgtctggacgccactcctattttctattttttctcttctcccaaagatgccatggcaagtgtcagtttttggttcgtactacttggaattctggctatattgatctatgcagcaattctatactgtattttctattgtgtccttatccgggagaaaaagcctctgaaaataccttatcgacgccagaatgtctcgcttgcactgcttttgctgacagcggcactcttcatccctatccggggcggattcagcgtatccaccatgaatttaagcaaggtgtatttcagtcaggaccaacgcatgaatcatgcagccattaatccggcattcagcttcatgtattctgccacccatcagaataatttcgataagcagtatcgcttcatggacccgaaaatagccgacgaattatttgcagagatggtagacaaacccgtcgcagtaaccgacagcatcccccaattattgaatacacaacgcccgaacattattttcattatccttgagagtttctccacacacttgatggaaactttcggaggacaacccaatgtggctgtcaacatggataaattcgcaaaagaaggcgtattattcagcaacttctacggcagcagtttccgcacagaccgcggactggcatctatcatcagcggatatcccggacagccgagcaccagcatcatgaaatatcccgaaaagacggacaaacttccttccatcccccgtagcttgaaaaatgcaggatacagcctcgaatattactatggaggagatgccgatttcaccaatatgcgctcttacctggtatcttccggtatcgagaagattatttccgataaagatttccctctgtccgaacgtaccggaaaatggggagcacaagatcacgttttgttccagcgcctgatgaaagacctgaaagaagaaaaacaagaagagccattcctgaaactggttcagacatcaagcagccacgaaccattcgaagttccgttccacaggctggatgataaagtcctcaactcctttgcgtatgccgacagttgtgtgggagatttcgtgaaacagtatcaggaaacaccgttatggaaaaacacactgtttgtactcgttcccgatcatcagggtgcatacccatacccgatagaaaatccgctggacggacaaaccattccgctgattttaatcggaggtgcaataaaacaacctctcgtagtagatacttatgcttcgcaaattgatattgccgccactttgctcgctcaattaggattaccgcacgatgaatttactttcagcaagaatatcctgaatccgggctctcctcatttcgcatactttacccggccggattatttcggaatgattactgccgacaaccaattggtgtataatctggacgccaacaccgtgcaactggacgaaggcacctccaaaggagctaatctggaaaaaggaaaagcgttcttacagaagctctacgatgatcttgccaaacgctaattattaagaaatatggaatatttataaggtaatataggacatttactattctttattgtatatttgcgacgttaaaaatagatcaataaagccggatgatacatagcgaaatcgtgcaattcctttcggagatagatacaaatatcttcttatttttcaatggtatacactcccctttctgggattatttcatgagttccttcacgggtaaaataatctgggttcccatgtatgccaccatattatatatattattaagaaatttccactggaaagttgtcgtatgttatgtggcagctatcgcgctcacgataacctttgccgaccaaatgtgcagcagtatcatccgcccggtagtggcacgcctgcgtcccgccaatccggacaaccctattgtggatatggtatatatcgtaaacgggtatcgtggaggaagttatggtttcccatcgtgccatgcggccaattcattggggcttgccatgtttgtagtatttctgttccgtaaacgttggctaagtattttcatcgtaacttgggcaattcttaactgctatacacgtatatacttgggtgtacattatcccggtgatttactcgtaggaggtattatcggaggattcggcggttggttattctgtactatcgctcacaaagtagccatttatttggaaccttccacccgtacgaagagaaaagatataaaacaatggtcagtcactatttatgtaggattgctgacagtgctcgggatcattatatattccactattaaaagttggtaaggttcaccacagattacacagattcacacagatttcaaatgataaaaaagata

SEQ ID NO: 8224 - DNA, 777 bp, Unknown
  gut microbiota DNA sequence
attatcgaaatggcctcggcctgcggtctgccattgattgattcaaatcggagaaaccccatgaagactacgacttatggagttggagaaatggttactgacgcattaaaacgcgggtgtcgggaattcattatcggaatcggtggaagtgctacgaatgatgcgggaattggtatgctgaaggctttaggtacacgctttttagatagcggaaacggtgagttggagcctgtcggtgaaaatctgataaaagttcatcaaatagatatttcccaattgaatccggcattgaaggagagtcattttacgatcgcctgtgatgttagtaatccattttttggaaaagagggtgcggcctatgtatatgctccccaaaaaggggcaactatgttgcaagtgatagagttggacaatgggttgcggcattatgcacaggtgataaaggaatatacaaatatggatatatcgcagcttcccggtgccggagcagccggaggaatgggaggcggcctgcttccgtttttgaatgcagaattgcaatccggaatagaagttatattgaaaacgcttcgtttcgaagaggtcgtccgacaggcagacctgatactgaccggagaggggaaactggatcgccagactggtatgggaaaggcgctggacggaattttacgtgtcggtgagagatgtcaggttccggtgatagcgttggggggagcggtcgaagccaccgaagcgcttaataggatggggtttactgccgtactgcctattcaacct

SEQ ID NO: 8225 - DNA, 8479 bp, Unknown
  gut microbiota DNA sequence
atcccggatctgaaggatggtggtcttgagcgtacttacattatgtattatcgaattgtctatcgggctgactccataaagtccgattcccaagcgtaccatatcgtactgtgcttcggggaaacgctcgattcctgccgtattacagatatgacggagaatcttatgagagaaggcggcctgtaattcttgcgaacctttctcaaacaattcaatctgtccgcgggtgaaagcgtcgaactgtgacgaatcacttcctacaaaatgagagaataccgaacggggaatcaccgcgctctgattcttcagacgacggataagcaatggaatatcctctaccgcaaagcccaaacggtgcatacctgtatcaagtttcacatgaatggggaagttggtgattccttctttctccgcagctttgatgagtgcgtcgagcaaatggaaattatagacttccggttccagtttataatcaaacatggttttgaatgcagtaagttccgggtccataatgataatagaggcggtaatgcctgccttgcggagttcggaaccttcgtcagcaacagctacggccagataatcgacatggtgttcctgtaaactcttggcaatttcatacgaaccggctccgtaagctgatgctttcaccatacagatcatctttgtttccggatggcgaagcatagaacggtaatggttcaagttggctaccatcgccccgagatttacttcaagaatggtttcatgcaccttcaattcgagggcttcggataccagatcaaagttgaacacgcgggaacctttcaccagaatcacttccgaatgaagcgatttgagtatattggatgcaaggagtgcttctgtgttaggaaagaaatagcgttcgagatcatcatcaaaacgggcggaacaagaagatatctcctgccctactccaatcagtttattaatacctttactctgtaccaattgtgccacacgccgataaagcgtagcggtactttgtccggtttccagtatatccgacaggataagcgtccgtttcaagcctttcttttccgagcggcgtacaaggaaatcgagagcaatatccaatgatgccagatctgaattatagctatcattaatcagtacacagttattcttcccctctttcacctccagacgcatggcaatcggttcgagacgggccatccgctcggttatctggtcggcaggcgtcatcagataaagacaagctgccaggcaattcagtgcattttcaatggaagcgtcatcgatgaaagggatacagaaagtattatccatctccagataacgataggatataacagtatgatcttctttcttggtcacacggctgatatacaacgggcgttcaatatcggtacggctccaggcaatctcacgcgccgtcagcattgattttgcgacacaattactgattaactcgttatcaccgttgtaaatcacgacatcacagtctttgaaaagcgtcagcttttccatgcatttctcctgcaaggagaagaagttttcctgatgggcaccaccgatattggtcagaataccaatggtaggcttaatcattcgtttcaaagctcccatctcccccatctcggaaataccggcttcgaaaatacccagttcggcttcttcagaaagttgccacacagaaagtggaactccgatctgcgaattataactgcgtggagaacgaacgatgcaacgatccgggctaagcaactggtgcaaccactccttcacaatggtttttccattactgccagtgataccgatcacagggattttaaatttatcacgatgtgtttcggcaagcttctgcaaagctttcagaggattgggaacgatgaggaagttgagagttgagagttgagaattgagagtgggctgcgcaccatcatgctgcatagaactctcaactcccaactctccattctcaacttctttaaagtcttcttccgtaattacaaaattacgtacgccccggtcatataaatcggggatataacgggctccgctgtttcgtttggtagttaaagcaaaaaaaagagtttcttccggaaaactcaaagagcggctgtctgttagcagccaatcaatagtcgctttatgtttgcccacacggcgggcaccgatacttttggctatggattcaatcgcatatgacatagttctgtttctttttgaaaatctaagtacgggtattttccgataagtcgttctatttttaacactatttgtcctaaaaagcgttgatacgcctctgactcgggatgaaagggcttgtgcgccaagtcccggcggatgtcttgcacagctacgataacctgctttgtttcagaagaaaagaaggtttcggagaagcgttcccacaggtaacgaatcgccagaggagacggatgcaacatatcgtcggcatagaagcgataatcacgtaattcgtccaatatgatttcataagaggggaaatagaacactcgttccgggaacagttgttgcaatcggtcgatggcaagcagcagagtcgatttgcttaactggttggcgtgcatcccgtcgcgtatatgacggatcgggctgactgtaaacagccattttagttccggattcagggctgacatttcggtgatgagtgctgtataatcttctacaatttcttcaacagacagaagcctacgattaaatttattctcaggcagtttatgacagttagacactacctttcccgtttctttctgctcataaacataagcagttccaaaagtcaacatcagccagtcaagtttttgcatagcctgatgaacttgtaacagccgaatattgatattctgcaatgtactttccaaggtaggtccagaaaaaagaccatgatgcataggactatgccaaaggtcattatggaaaaacaagtcacccttcttatatacttttctttttaagatttcaatcagaacagcagaaagagaagaagggttgtaaagaataccaaaaggattcaaatctaattgaaatttggcatctttcaaaaaattccctacattttggacaaagcaagatcccatcatgagtatttgtccggcatgagtaataggcggtaaaccaacaggtaactctatttgtgtacggaaatccatattattttctctttaaaaatttcaaactattctccaagcactacccaatacccatatcgtttgcttcctacgcgttttaataagcccaactcctgtaaacgtgccaagttatattttataccatcgactgttataccttcaatatgactatttaaatccgcccgtgtggcctccggatgttctcttagataacttaaaatcatattttgggcttctgttaatttctgggtagtgtattgggtagtagattgggtagtagattgggtagtagattgagccggtcttcgttcattatcggcactatcttccatatttgtattctcctgataattctttttaataaactgtacttgaaaagacaaaccaacctccttccaacataaatcaatttcaggataagatttcatttcttcagccaccattttcaatccattaccccattggtcaatgatgccaagtcttttaaacacaggagctattactttatttcttgcatctgattggcggctctccattgccgaataatcaatagagggtggtaaaagaccaggacttgtgatctcaaccatatcatcatatatggcaactttgacatcttttcctgtcagagaataatctctatgtacaatcgcattacggataatctcccttattgccttcactggatactcccaacgtgaaaccgtatatactccctctatatttgctgctttattaatatgccgaagtacaaagttataagtttcttccgcctgtaacccaatgtggacaataatacttttttgatctaaaaactcttccgttcctgtccctttgaaacgggcacattcaactttggcattcggaaacatagaattacgcaaattatcatccgaaaatagaagtaaagcttttgtaggatattctttatcctgttcagtcttaaccaattccagtttacgaagcacttgaatatttaaatcttcacctgttttctctttgtagagtaatttaaacccacttatatccaattcatctgcggacttatccatgacaacctcactatcaaaagaaatatttctccgtctccgctctaactctgcaataattgtttcatcagctagtttattggttgaaccaaccctaatataagttcctttcagcttccctttatctttaagatagtaagggggcatacttccacgataaatacacactttaataaggtgtttgtcctctatagttaaaaaagagacttcaggtaatataatcggataacatctatcatatattaaattactaatttgctcttcaatacgaggtaattcttcttcggacaaccctattatctgtcgcgggttatcattgatacctatataaatttcacctcccgcatcattggcaaaagccactacagtttttgctaaatcagaatttgtaggaagctcacctttaaattctaaacgccgaccttcagactggtttataagttcattaatagacatctattgaatatattgttttttaaactttttctcgaagcaaaagtacaataaagatatgacaaataattggagaagcaaaagaactttcttatctttgtctttatctgataatcaaaccaacaaactgcaaaatataattatccataatatgaataacatacaagttagcctaaaagcagataaccaaaacggaatactatccatacaaggagttgatttatttagtatcatagataccgactggaactggaacaatatttcattcatacaaatcagctatcaatgaatatttctaatcaattattggatgaaatagccaatgaatgccaaccattatttaaaggaataaaacaagaagacatacatgtaaaatgattagttcattgataaaaagtaaccatttagattaactggatagttaacctactctcatttattcatttattattggtactacagactgattagacagtaggaaacaaaataagtttttcgccgaaaaggaggtcgaatatactttcttttcgtatttttgcactaaatttcctagaatcatgaatagtgaaccaacatataacttgttaaactccatcaattaccccgaagacctacgtaaactaaccgtagagcaactgccggaagtatgtgatgaactaaggcaagacattattaaagaactctgctgtaaccccggacacttcgccgccagcctggggaccgtggaactgaccgtagctctgcactacgtctacaatacaccatatgaccgtattgtatgggacgtgggacatcaggcatacggccacaagattcttacaggacgccgtgaagcattttctacgaacagaaaactcggtggaatccgccctttcccgtctccggaagaaagcgaatatgatactttcacgtgcggacacgcttccaattctatttctgccgctctcggtatggccgtcgcagccacccggaaaggagacgccaaacgccatgtagtagccattatcggcgacggatcaatgagtggcggactagcttttgaaggactgaacaacgcatctaccacgtcgaacaacctgctcattatcctgaatgacaatgatatggcaatcgaccgcagcgtaggaggcatgaagcagtatcttttcaacctgacaacttccaaccgctataatcagctacgtttcaagctctcgcgcatgctgttcaagcttggcattttaaacgaagaacgccgcaaagcgctcatccgtttcggaaatagcctgaaatcaatggcggcccagcaacagaatatttttgaagggatgaatatccgttacttcggtccgatagacggacacgacgtaaagaacctggcaagagtattacgtgatatcaaagatatgcaaggacctaaaatcctgcacctgcatactatcaaaggaaaaggattcggaccggcagagaaacacgctaccgaatggcatgctcccggcaaattcgatcccgtcaccggcgaacgtttcattgccaacaccgaaggaatgcccccgcttttccaggacgtattcggaaatacactggtggaacttgccgaagccaacccgaagattgtcggtgtcactcccgccatgcccagcggctgttcgatgaatatactaatggagaaaatgccgaaacgcgctttcgatgtcggtattgccgaaggacatgcggttaccttctccggaggaatggctaaagacggactacaaccattctgcaatatctattcttcttttatgcaacgggcgcatgataatatcatccacgacgtagcgattcagaatctcccagttgttttgtgtctcgaccgcgccggactggttggcgaagacggtcctactcaccacggagcttttgacatggcatgtttacgcccgatccctaacctgactatctgttccccgatggacgaacatgaattacgtcgcctgatgtatacggcacaattgccggacaagggaccgttcgtgatccgctacccccgtggacgcggcgtactggtggactggaagtgtccgctagaagagatcccggtaggaaaaggacggaaactgaaagagggtagcgaccttgcagtgattactatcggaccgataggaaacgtagccgcccgtgccatcacccgggcagaagcagatttaggtctgtccatcgcccattacgatttacgattcctgaaaccactggatgaagagttgttgcatgaggcaggacgtaaattccaacgtatcctgactatcgaagacggaattatcaaaggcggtatgggtagcgctgtcctcgaatttatggcagacaacgaatacaaaccgaccgtaaagcgtatcggtatccctaatatatttgtagaacatggggcagttgccgaactgtaccaactgtgcggcatggatgaagaagggattctgactaaaataaaagaatttatcaattgacatgaagattattattgccggtgccggcaacgtaggcacccatttggccaaactgttatcgcgcgaaaagcaagatattatcttgatggatgatgacgaagagaaactaagtgctcttagcgccaactttgacttgctgactgttgccgcttctccttcttccatctccggattgaaagaagtgggcgtcaaagaagccgacctgtttatcgcggtcacaccggacgaaagccgcaacatgactgcctgtatgctggccaccaacctgggagccaaaaagacagtggcacgtatcgacaactatgaatatcttctgcccaaaaataaagagttcttccagaagctgggagtagattcgctgatttacccggaaatgctggctgctaaagaaatcgtatcttccatgcgcatgagctgggtacgccaatggtgggaattctgtggaggttcgctggttctgattggtacgaagatgcgcgaaaaggctgaaatcctgaatataccgctgcaccaattaggcggtcccaacattccttaccatgtagtggccatcaaacgcggaacggaaacgattatccctcgcggagacgatgttattaaattgcatgatattgtttatttcaccactacccgcaaatacattccttatatacgtaagatagccggcaaagaagactatgccgacgtacgcaatgtaatgattatgggaggtagccgtatcgcagtccgtaccgcacaatatgtaccggactatatgcaggtgaaaatagtggataatgacctgaaccgttgcaaccgcctgacagagctactggatgacaaaacaatgattatcaacggagacggtcgcgacatggatctgcttatcgaagaagggctaaagaataccgaagcatttgtagccttgaccggcaactcggaaacgaatatcctggcctgtctcgccgccaaacgtatgggagtggaaaagacggtggcagaagtggagaacatcgactatatcggtatggcagagagtcttgacatcggcacagttatcaataaaaaaatgattgctgccagccatatctaccaaatgatgctggacgccgacgtgtctaatgtaaaatgcctgacttttgccaatgcggacgttgcagaattcaccgtaccggaaggagccaaaataaccaaacacctgattaaagacctgggacttcccaaaggcaccaccatcggaggaatgatccgtaacggagaaggtatcctggtaacaggtgatacgcaaatccgccccggcgaccatgtagtcgtattctgcctaagcatgatgattaaaaagattgagaagttctttaactaagtattaagtatcaagtattaagtattagtctgt

SEQ ID NO: 8226 - DNA, 2442 bp, Unknown
  gut microbiota DNA sequence
tatcttcctaatcctaacctgcgttgggaaaaagtagaagcctgggaagccggatttgaaacgaacctgcttcgcaaccgcttgcattttgagggtgtttactataagaagaataccaaagatttgttagccgaagttcccggaatttccggaactatccccggtatcggaaacttgggagagatccagaataaaggagtggaaatggctgtaacctggcgcgatcagattggtgactggggatattccgtcagtgccaacctgactactatcaagaatgaggtaaaaagtcttgttcaggaaggatattccatcattgccggagataagcagcaaagttacacaatggcaggttatcctatcggatatttctatggttataaagtggcaggcgtttatcagtcacaagcggatattgacgcatcacccaaaaatacactggctaccgttacccccggtgacctaaaattcgccgatgtgaacggtgacggagaaatcaccccggaagaccgtaccatgataggcaacccgactccaaaggtcacttacggtttttctctcggagtagactacaagaattggtcgttaggcatcgacatgatgggacaaggtggaaacaagattttccgtacatgggataactacaattttgcccagttcaactacctggaacaacgcttggaccgctggcacggagaaggtacgtccaacacccaaccgttgctgaacaccaaacattccatcaacaacctcaactctgactattacattgagaacggtagtttcttccgtatccgtaatgtacagttagcttatacgttcgacaagagcttaattgccaaaatacgtctgcaagctctgaaagtctatgtcaacatacagaacttgaagacatggaaacataacaccggatatactcccgaacttggaggaactgccaccgcattcggagtagataacggcagttatcctgtacctgcagtctataccttcggtatcaacctaacattctagtgacaaggtgccactgccagttttccatgcggaacacaactttaatctttaaaactatcattatatgaaactgaataaatatatatttgcaacccttattacttcaactacattatttctaggcagctgtagtgactttctggatcgtagtccacaaggacagtttacggaagatgataatccgaacgctctggtcaacgggaagatttataatgtctatacgatgatgcgtaactataatgtgacagccggccctcctgcttttgccatccactgtttccgttcggaagattcggaaaaaggaagtattgccagcgatggctctgatgtagccgaaatgtatgatgattttgtgtatacaccgaccaacggcctactgggtgcttattggggacagaattatgccatcatctaccaatgtaatgagattcttgatgccattgcagaaaaagaaacagccggacaaacagaaactgaagacatcatcaataagggagaggcctctttcttccgtgcttattgctacttcaatctggtaagagctttcggcgaagttcctttggtgacttataaaatcaacgatgcttcggaagccaatatcccgaagacaagtgctgataaaatctatgagcaaatcgacaaggacctgaaaacagcagaagagtcattgccagaaacatggagcagcgaatacaccggacgactgacttggggagctgcccgttccttacacgcgcgtacttatatgatgcgcaacgactggaacaatatgtacacagcctccaccgacgtcatcaaaaaggggctctacaacttaaagactccgtataatgagattttcacggatgatggtgaaaataacggaggttctatattcgagttgcaatgtacagctactgccgctcttcctcaaagtaccgttatcggtagccagttctgtgaagtacaaggtgtacgcggagcaggtcaatgggacttgggatggggatggcacatggcaacagagtatatggcgcaagcatacgaacagggtgatccacgcaaaaactctaccctactctacttccgccactcggacagcgatcctatcacaccggaaaacaccaacgaaccatacggcgagtctccggtttccccggcaatgggtgcttatttcaataagaaagcctataccgacccggcattgcgtaaagaatataccaacaaaggattctgggtaaacattcgtctgatccgctacgcagatgtactgctgatgggagccgaatcagctaatgaaaaaggtattccgggtgaagcaatcgactatttggaacaagtacgcgcacgcgccagaggcaccaatagcaatatattgcctaaagtgacgactaccgatcagggagaattgcgtgaggccatccgccacgaacgccgtgtggaattagg

SEQ ID NO: 8227 - DNA, 11313 bp, Unknown
  gut microbiota DNA sequence
tagggcaacgccctacgaaaaaaacacaccagccacaagccctgaaagggcggaactgtatacaattatgccctttcagggcgcaaattcagattgacgttttttcgtagggcgttgccctacgctatataattaagccctttcagggcactccgcaaaattatcatttagttcatttatgcaccgttatgaatcaaactagcggtggtttgattcttttcaaaaatcatggtaaaataaagtatatcaacttctctgccaacttagaaataaaagtttacttttgccttccacaagtttcacagactcgtaagttgtagtatgacagatgtttgctgtgatttaatgacctcgttttagcttttcacatccttcacactctaacgaaaagccccccggttcaaacaaaagcttaggcgtttctttatatggaaggatataagaagattaatacgaccggataacagattgaaatagttaacatggtatcagccgactgccgttgaccatacagctgactgcagttgtctaagtcgctgactttagttgaccgaacagacgactctagttgtctattcataaatcaactttaaaatcgtgatatagagtcgatattacgtagtatcaaaccatatacttcatgttaggtattggtttgattttattttatcccatacttgacgctattcaacaaaaaaactctatctttgttctataattgagatacaagaaataatgggaagatttatcaatccctttaccgattttggctttaagtttttattcggcagagaggtagaaaaggagttattaatcgacttcttgaatgatttgctcgtaggagagcatgtaattaccgacatccagttcctaaacaacgaacagcagccggaagtaaaaacagaacgaggacttatctatgatatatattgtagaaccaatacgggggagcatattatcgtagaaatgcagaaccgggaacagccttactttaaagaccgtgcccttttctatctctctagggctattacccaacaagcgagaaaagggatttggaactttcaattagatgctgtgtacggagtgttcttcatgaacttcgtgatggacaaggatataccctctaaaatcagaacggatgttgtcctttctgacagggatacaggtaagcttttcaatagtaagttccggcagatttttattgaattgccgaactttaataaagaagaggatgaatgtgaaaatgattttgaacgctggatttatatattaaagcacatggatacacttgatcgaatgcctttcaaggctcgtaaagccgtttttgagcgactggaaaagttagcctccaaagcgaatatgacccaggaggaaagaatgcagtacgaggaagaatggaaagtttacaacgattattttaatacgttggactttgcagaacaaaaaggtatacaaaaaggtatacgagaaacagcccgtaaattgaaagaattaggagtggatgatgatattatcataaaatctacgggtatttcgaaagaagaaatagagaaattataatctttctcctattattaatagacgactcatgcattcaaacatgagtcgtttttgtttattcatatatttatattaatccggtgtgaaaagcttccttcccctgataactctttttagtagcttaattccattgcttttcgatattcttttttatatttgcctacgttaatgaaggagatacgacaattgagagataaaatattgataggatgcatattgtgtctgttctcttttatatcaaagggggcagccaataattatataatgaatccttatactcatcaggaaatctctgccgactccatcatagaacgtgtgatgacctttgcgcctttgtatgaaacgatagtcagcgaatatcgagcgaacctatatataaaaggtaagatggacattcagaagaagaattttattctccgctatgtgccttccatgtttcgtttgcaaaagggcgttcgcgaatatttgcttgaaacgtacagtgacttgcattatacggctcccaatatttacgaccagaaagtaaaagcctcccagggaacggtgagaggaaacaggggattgccgggcttgctcgaatactttaatgtaaatatctactcttcgtctctgctgaatgatgaacgcttgttatcaccactggctaaaaacggacagaaatactataaataccagatagacagtgtgatgggagatcctaataatctggattatcgagtccgctttattccccgtaccaagagcgatcagttggtaggtggatatatggtggttagcagcaacgtctggagtgttcgtgaaatccgtttttcgggaagatcggaactgataacatttacctgttggattcagatgggagatgtcggcaagaaaaatgaattcctgccggtgcgttatgatgtagaagcccttttcaaattcctcggaaataaggtagatggtaattatacagcttctttagattataaatccatcgaactgaaagaaaagaaggtacgtaagaaagagaagaggaaatataatctttcggaatctttctccttgcagtgtgatacgaatgcttataaaacggacgcctctacctttgctatcatgcgcccgatccctttgaacgagagcgagaaaaaactatatttcgacaatgcgcttagacgtgacacggctaccatacaaaagccatccaagagtcaggccttttggggaacgatgggggacttgatggtagaagattataaattcaatttgtccaatatcggaagcgtacggttctctccgtttataaatccgcttttattcagttatagcggaagcaacggtttgtcttatcgacaggatttccgttacaaccgtcttttcagaggggataaattacttcgtattgtgccgaaactcggatacaacttcacgcgtaaagagttctactggtcgttgaatgccgactttgaatactggccgcagaaacggggattcttccggttgaatgtgggtaatggtaaccgtatctatagcagtaaggtgctcgacgaactgaaagccatgccggatagtatctttaatttcgatttaattcatcttgattatttcaaggacttgtattttaacttccgccatacagttgagatagtcaacggactggatatcggtctggggttctctgcccataaaagaacagccgtagagccttcccgttttgtgattaccggtgattatccgatgccgcctccggagtttatggataaattcaagaacacttatatcagtttcgctccccgcatccggatagagtggacgccgggactctattattatatgaacggaaagcgaaagataaatttgcattctatctatccaaccttctcggtcgattatgaacggggaattaaaggagtatttaaaagtacgggcgaatatgaaagaatagagtttgaccttcagcatcaaatccggatgggattgatgcgtaatatttattatcgtttcggattcggggcattcaccaatcaggatgaactgtattttgtggactttgccaatttctcccgccataatcttcccgtaggctggaatgatgaaatcggcggagtatttcaggtgcttgactcacgttggtataactcctcccgtcgttatgtgcgggggcatttcacctacgaagctccgttccttattctccggcatctgatgaagtacacccgttatgtgcagaatgaacgtatttacatcagtgcactttctatgccgcatcttcaaccttatctggaagtcggatatggcatcggtacgcatattttcgacgtgggagtcttcgtaagcagcgaaaactggaaattcggaggaataggctgtaagttcacgtttgagttgttcaaccgatagtttttccccgttccggttgttttatcgaaagattatacttatctttgtataagagaggatgagggccgaatttagcatcaaagaggtgtagtcgcctcgtaagcacaggtatttttcctagaaaataaattctaaggtataaatacctaaatttattttagtaaataactcatcctctcttctctttgtttatatacataatacaaaatggacggaattctaataacgatacttattgtcactggttttctgatttataagatgatttcctcaagcagaaaacaagaggggtataaaagatggaaagcgacagacggtagtaaggaagaaaagactactaaagtaaaatgggagcatggagcctggcttaggcatgctttgggagcgacagtttcaagagcacagtatgttcaaaagtatgatgaatcggctgttgtctggtgtgccaatctgttgggaatggaaacgggacaattgaaggaaatactacgaaacgtttctgtacattaccgggaattttggatgagaaaaagaaaaggagggtatcgtatgatctctgctcctaacaaaacaatgcaatccattcaagcgactattaattcacgtatattatcacctgtaacgatgattcatccggcagcggtaggtttccggaacggtcattctgtagtcgacaatgccaatcctcatttaggaaagcggtatgtgttgaaaatggatattcatgattttttcttttctatacggagtccgagagtgaaaaagacatttgagaagatcggttatccggaaaatgtatctaaagtattgggaacgttgtgttgtttgcacagacatttgccgcagggagcgcctacaagtccgtcgttaagtaatatcgttagttatgagatggataggaagttggcggcattggcagcggaatacggactgacttatacccggtatgccgatgacctgactttttcgggagatgtatttcccaaagagcagattattccccgtattaaacaaatcattcgtgatgagaaattcgaaccgaatcataaaaagacccgtttcatcaatgagtatggtagaaagattatcacgggagtgtccatctcttccggtgtgaaactgactatccctaaagccagaaagagggaaatccgaaagaatgtctatttcatcctgacgaaaggtttggcagaacatcagcgacggattggttcgagtgatcctgtctatctgaaacggctgattggagagctttgttattggcggtcaatagaaccggacaatagctatgtatccgattctattgctgccctgaaacgtttggagaaagggtattgatctaatttctgtcacctgaatctactagacaggatcactcgaaccaacatttaatccgcaatcgtcacccgttcattttcaattttggcataattccttttcacggcttcgcgaatacctctttgcatggcagcgtctatgttcgatcccatacgggcaaagccgaattgttgtgcacatgcttttatcaaatctgccacaggcaggctgatggagtctgtcaacagttgtcggatggcattggctatctcttcgggagctatatctgtcgcttcccgctcggaaaccggacgataaatagagtaggagatgcattgctctctgtttttccagcaaaaaacaaatccttcatgttcggtgcgatagatatttagtgcatctaaagctgtctctatctgtgattctacccgtgctcccaaacgactgattccccattcagacagaatcttcttgcaaagcaatgatttgctgaccggagcttcattctctataatcttccgtatttgagaagtgaggatagaatagctttcactaaagaaaaagtcttccggcgaatagctgcctggagtgatctttgccgatcggtacttttgctgtattccgctttgtgcggaagatgcggaagcagtttgcttttcagaagtggcaggtgatgctttgagtacaaatgaaatttcattgttatctctctctgcagtcggtactgcttcttttattgactcttcttttattggctcttcttttgttattttttctttgtctgtcgactctttgttcacagattctttttctgctgtcattggggcagaatcaatttcggtggttgtcgttgtttgggcattaacctttgaactctttttgcgtgcgatagcctcttgaatagcagctattacttcgtccggtttttcccaccagtccatagtccatatccggtagatatcccagccgagtgctttcagtacattgttttgcacaatttcccggtcacgtgcggtcttggtacgtttgtagtttttgccgtcgcagataatacctaattgatagttggaggtattttcggtgtcaacgatacctatatctattttgtaaccggagcatccgatgtctgtatgcacggtgtatcccaatgaacgcagtttatcggcaatgatattctcgatggaggctgctgtttccgttgattgggctgtcacactgttgattgtattcctagttcctttctccgcatattcgaggaaacgttttaatccggctactccgatagaggaagtccggttcaggtcaatcatatccgatcttaaagtggaatagataatcatctcataccgggcacgtgaaacggccacattcaaccttctttcgccacctacccggttcaatgggccgaaattcatactgacacgtccttccgcatccgggccgtagcccacagaaaagagaataacgtcccgttcatctccctgcacattctccaggtttttgataaacaacggttcgtcacattccagggcaagagtttccagttcgggatggaagataaagaggtcggaaagtaagtcttctatcaaggcttgctgaacgatgctgaaagtcaccacaccgatacttttctttctcaattcctcgcttctcaatcttctggctatttcgtctaccaccgcttgagcttccgcccggttttggcgcgatttgcctttatcataataaccgttgatgttgactatcctgactttcgattcaatgttgtccggagaagggaaagtcatcagtttgttatcgtaatattcggagttgctgaaagcgatgaggctctcatgtttgcttcgatagtgccacaataaatatttggaagggatagacaaagcaaggcagtcgtcaagaatactctccaaatcctccatctcaatattatcttcatctacggtgctgaccgagaagaagctggtaggaggcatttgtttcgggtcccccacgataatcacgtttttgcctcgggcaatagcgcccaccgcttcataagtaggcatctgtgacgcttcgtcaaagacaatcaaatcgaatttgtcagcatccgtatcaatgaattgagcgacggaaagcgggctcattagcatacacggacacatacgcgacaataaagtaggaatctgatcgaacagcttgcggatggatatgccacgagcattgttgcggatattcttttgaaggatgcccacttcggaactttggatagcttcgtgagtaaaagacggaatgttggaagccagccgcgcaaacaattcttttttggtcgtttcttcgaatttggcggatatttgtttgtatttagcaataatatcgttgaaaattttgccgttgaataattccaacgtgggttctttggcaatgatatactgaataaccgcctggtagaaactcttgtagaagatgtctgtcagttggtcggtagggatattcttttccttatattctgtcgcgacaaatccgattcccagtttattcagagtttggtatgcttgtaaccactgataccagtctttgagtttgtcgaggttatctttccaggtttgggcttttgatagcgcaatcgttatccagtcggctgaagaggtataaagctcttctgttgatatacccaacgtgtcggacaacttcttttcaatgactgtgagtgtatccgacaactgatacagttcattgaaagagtgagcgtgaatatctctgaatgtttgaattctttctgtgagctgtacagacaaattctgtttgatttgtgacaccttggctatgtcctttgcataattcagcaaatgcgagtgaagagaagccatgtcattgataatctgctcaatggcagtccaatcctcattcttgccgaatcgtccgaacaaagaggggagttggccggtgtatttctgaacagcgtcctcttcttcctgataccggataatccggtggagtagcggtttgatgtcttctgtttcaatggtttttaaagcatagatgttgatagcctttttgatttttcgctgaccgaaatatctgggaaggaaccattgatcggatacccggttccattcggctaccatctgctttgcgttgatggacagaatctctttggtaaatcctgcctctatctcttttctttgttcatcacgtttttgcccatgaaccaccacttcacgatattcatttagcgtttcattcaataacggcagagtcagcaatcccggagtcagctccggaatatcgagtattctccggatgatacaggcaatcgtttggaaatccttgcgtgtcgggtgtatatccgtatctttcagaagtacggaaaatacatccagcttctgccggatgatatttaataaatcaatgaaagcggtaagtaattgggaggcttcttcttttccggcagatgaatactcggaaatcgagatgcctgttaatggatgccgataagggtgtccgcacgcattggcggttctgactaacgattcgatagcctcttcccattgcgcaaatgtatctttgtctaatgtatccagataaggttgtggaatctcaaaacaaggttcgacgtccacagattgataatggataatggcgtcgtatagtgaaactccgaacgggtattctttatgcagggcttcaatatactgattcagttccgcccgcaaattcagcagacgctccgcttcctttttaaattcttcgggaggtgtctgcctgataatttccgttgtttctttcagttgtgagataacagcggatttctttgttttgttggaatgaatttccaaacagaacggagccaaaccgatagccgccagtcggttttgaacaacggagagggcagccattttttccgcaacgaataagacacgtttccctttgtaaagcgcgttggcgatgatattggtaattgtttgcgatttacccgttcccggagggccgtgcaggataaaagtcttatcgtgtacggcttcgtagatagcttccaattgcgaagaatcggcgatgataggcaaaacgatgtccgttggcgacagttgtttgtccatatccgttgcgtctatttcttctgttgcggcttcccattctatctttccgttgatgaggcttgaaacaattttgttctgaaccagtttattggcattattgtgaatgtcattccacatgatgaacttattgaaagagaagatgcctaagatggcctgctcttccacgtcccatttgcgttggtttttgatactgttacgaatgatggaataaatcagtttgacgttaacgccgctttcatcggtgggcaacgggtctaatcccgatacggtaattccgaagttttggcgaagcatttctaataacgtaatattcatcatcgtttcctcttcccgtgaacggatcacatagcctttagctgccgacttacggatgatttcaaccggcattagcaggatgggagcgtagcggggacgttcgctggaaggagtctcgtaccatttcaaaagtccgagagccagataaagagtgttggccccgttctcttcaatagaggtacgcgaggaacggtataggtgagtcagtgctttgcctaaatcgttttcggacagataaaaacgcaatcttttctgtgaaagctccgagttgatgaaaccaaccaccggatcagactccggtacagaggaataaattccgaaatccatcgccgggctttcccaatcggcagggcggtgcaggatgcggaattcttcaccgtcggccaatgcatcttccaggcaggccagattagccgggatcagttggagcgtgtttttggtaatccggatattcagcaggttgttgcgaaggctcaagtccagcaaccgcctttcccataacagttgtttggtgattacggtctgggtttcattgcccgataaatcatacggattgatactttgcggggtggcatgaacggcacttttctgaatgttggtctctttttcgtcgacttcccatacctgtccgtgcaaaatacgttgagggatggggcgtacacccgaatatctcgctctcttgatgtctattgcaagaaggaagttattcccgtccgccaactttccgtttgctttcttcaccgcatcgtcaaaatcggacgaatgtcccatattcatgcaggtcgtttcaaccaaagtaatgtcgtagattccttccgctgttcttttcgttaatagagaaacatcatcaatcgtaggatccgggaaagtttccggcaccagccaggctcctgcaaaggcatgcccttgcgtgatgacgattaaagcattcagcccgattgcctccagacaggaagcatagagcaaagccatatccaggcaggttcccaatttctgtgccatcacagaatcggctaaccggacacgctgcccatattcttcgaaactggcgggaacggtactatatataatctgttgctccgcgatagccgtatagatggcagccatctgtttcctcaccctgtccggagtgcggctttgatattcatcgagagacgggttgccggtccattgccccaggatggaagctgctcttttgataatcggtgagatagccgtatgattgggagtgatgaaagcagccagcatttcgggcaatacgttgagtccgccccattggtcgtatgccaggatgtcgataggatatgtttggcagaatatcggttctgcttcagcagtaatttcaattttcaggttgccggataaacgttcggtcagttgtgtgaagtagttggcggacaaagtgagattgaatgacgacagacggatcgaaccgttggccgggatctgttcaacagctatcggagcggcgtttccgaaagtcggttctgtcgtgatttgtacctgaatgtccttcagcggggcaggcgttgtattctcaatagaaagctgatgaatgattgatgcaccgttttgttgtatcgcaaaattaataagcggtaaatagtcgcattgcaccttgactttgtccaatctctcgtccatggcaaaaactgtataaatt

SEQ ID NO: 8228 - DNA, 8508 bp, Unknown
  gut microbiota DNA sequence
gccctgaaagggcataattgtatacagttccgccctttcagggcttgtggctggtgtgtttttttcgtagggcgttgccctacgctatataattaaaccctttcagggcaccccaataaatatataattgtaaggctttcagcctaacctataaattctcatttaaccgataaattcccatttaaccgctaaattcccatttaattaagaactgcataaaaaagagaaatacttactcttacctttttatttctccttttattcttgacaaagaaaaaaattgtagtatctttgtgatactcttcatatcaaccaggcagggaacctgcctcgttttcgtggcaggcatttttatgcctgtcctgatgcttcatatggcggtttcgtacccccgtgtggagtgttaatgcacccactgcctggttggtgaagagtaacgggaaaggcggaaccgctcttatttcatagaaaatcttcgcctaccaccttattcataattatattatggaaacaaaacaagttaccgttcaaccagcggtgggaggcatgataaaggcttccaaagattcatttgttattcctaaagaagaattaaaggatttctaccttaaattcgctttcctcctaaacccggattcctgctccataaaccgcaccgaattcgaactattaaacattctgctgaaagacctgaaaaaaatcttggcagcattgactcacctcaacacccatccttgggatgaaggcatcgcagaaatccaaatttcatgcggtgtttactccctacaagataacttgagcaaagaaaaacgtatgcaaatgaacacctctacgggtaaacacctacaatttctcacccaaatggctatggacagtccagtgttcaaacagttattcaggaactatcacaaccattatatccaagtggaaagtttggttaaacagatggctaaagaaatggaccaacagaagcaataagaacagaagttggagaatcaacagagggggtatctttagaaaaatacattcatttctaaaaataccccctttaaaataggggtactttcagaaaaaacatataattttgcaccatcaaccgataaaaagtagaccatttatgtcaaaaatgcgtttttttgccttacaagagctttccaaccggaaacctctggaagtaactgctccttccaacaaactctctgattattatggtagccacgtgttcgaccgcaagaagatgcaggagtatcttcccaaagaagcctacaaagctgtaaccgatgctatcgaaaaaggtacgcctatcagccgcgaaatagcagatttgattgctaacggcatgaaaagttgggccaagtcactcaacgtcactcactacacacactggttccagcctctgacagacggaacagccgagaaacatgacggttttatcgaattcggcgaagacggcggagtaatcgaacgcttctccggaaaactactgatccagcaagaaccggatgcctcttctttccctaacggcggtatccgcaacactttcgaagcacgaggatatacagcctgggatgtttcttcaccggcattcgtggtagacaccactctttgtatccccactatcttcatttcttatacaggtgaagcactggattacaaaactccattattgaaagcacttgccgccgtagataaagcagcaacggaagtctgccaactattcgacaagaacatcacacgcgtatataccaatttaggatgggaacaggaatattttctagtcgactcttccttatataatgcacgccccgacctctgcctgacaggacggacactgatgggacactcttccgccaaagaccaacagttggaagaccactatttcggctccatccctccacgtgtcaccgcatttatgaaagaactcgaaattgagtgtcacaaactgggtattcctgccaaaacccgtcataacgaagtagcccccaaccaatttgagttggcccctatcttcgaaaactgcaaccttgccaacgaccacaaccaacttgtcatggatttgatgaaacgtattgcaaggaaacatcacttcaatgtactcctgcacgagaaaccatacagcggagtaaacggttcgggcaagcacaacaactggtcgctctgcaccgacaccggcatcaacttgttcgcccccggaaagaatccaaaaggaaacatgctattcctcactttcctggtaaacgccttaatgatggtttataaaaaccaggatttactgcgtgcctccatcatgagcgctagcaacagctaccgtttgggagccaacgaagctcctcccgccattctctcctgcttcctgggttcacaactatcgtccactctcgacgaaattgtccgccaggtaggaaacgagaaaatgacaccggaagaaaaaactactcttaaattaggtatcggacgtattcccgaaatcctactggatactaccgaccgtaaccgcacctctcctttcgcattcaccggaaaccgtttcgaattccgtgccgcaggttcttcttccaactgtgccgcctccatgattgcaatcaatgccgccatggcaaaccagttgaacgaattccgcgcatcagtagaaaagctgatggaagaaggagtaggcaaagatgaagccatcttccgcatactgaaagaaacgattatcgcctccgaaccgattcgttttgagggcgacggttattctgaagaatggaaacaggaagccgcacgccgcggactgactaacatctgccacgtaccggaagccctgatgcactatattgacaaccaatccaaatcagtgctgattggcgaacgtatcttcaacgaaaccgaattgaacagccgtctggaagtggaactggagaaatataccatgaaggtgcaaatcgaaggccgtgtattgggcgacctcgccatcaatcacatcgtaccgactgccgttgcctatcagaaccgattgctcgaaaatcttcgcggactgaaagaaatattcccggctgaagagtacgaagtgttgagtgccgaccgcaaagagctgatccgtgagatttcacaccgggtcacttccatcaaagtactggttcgcgaaatgaccgaagcacgaaaagttgccaaccacatggagaactacaaggaaagagcatttgcatacgaagaaaaagtacgtccatacctcgatcaaatccgcgatcacatcgatcatttggagatggaagtggacgatgaaatatggccgttacccaaatacagggaactgttatttactaaataaaatgcctataagattgcacgaaagctcccacttttgtgcaatctttttatagattcgttcattttctcattttttctttttacttttgtgctgtataacacagttttgtagcactcatggtaaaaatgaatatgtcagacatcgatatttcggaaccgttatccgatatgttagctcctttaaataacgagcaaaaggagtttctgatgaacaattatacgatacaaacctacaaaaaaaatgaaaccatctactgcgaaggggaaacaccttctcatctgatgtgtcttatcagtgggaaagtaaaaatcttcaaagatggcgtgggaggtagaagtcagattattcgcatgattaaaccacgcgaatactttgcttatcgtgcttattttgccaaacaagattttgtaactgccgcagcagctttcgaaccctctgttgtttgtctgattcctatgaatgctatcttaactttagttgcccagaataatgacctggctatgttttttatccgccagctttctattgatctcggcatctcagacgaacgcactgtcaatctgacacaaaagcatatccgcggacgcttggccgaatctctcatcttcctgaaagaaagctacggcttggaagaagacggatctactttgagcatttatctttcacgcgaagatttagctaatctctctaatatgactacttcgaatgctatccgcacattgtcacagttcgctacggaacgactgattacaatcgacggaagaaagatcaaaatcatcgaagaagaaaagctgaagaaaataagtaagattggataagaaaattcctgcaccagtcgctccaccctaaatagtgaacatacatatagaaaatataattgcagacatcagacgtggtaacaaacaggctttcaaaaagctatttgatgactactatcctattctttgcgtgttcgcatcccactatattgaagacaaagaagtttgcaaagacattgcgcaagatgtattgttagcttattgggaacggaaagaagatttcgacaacattttgaaagtaaaaagcttcctttataccgtcacccgaaataaatgtctgaatcacctaaaacatgaacaattagatattcctaatttttccggacaggaagaattcgatagtggttttgaagctgctattatcgaacaggaaacattccacatggttcgcaaagcggtagaagaattgcctacccaaatgcgaaatatcatcttatactctatgaaagggttaaaaaaccatgagattgctgacaaattgcaaatttcagaaggcactgtccatacgttaaagaaattcgcctatcgcaaacttcgcgaaagtctcaaaggcataaattacaccttattactatttttatgcaaataaagtaactttttgattaccccgttttttcgattggattgttttacttatataacaaatcgaaaaaacgatgaattcattcaaagaaaaatttaaaattgcaaaaatcttagcttccttatttactcattcgtctactcccgaagagaaaaaaaactatcatgcgtggttggatgaaaatccggagcatcaaaaaatagccgaccggatattaaataaggaaacgtatgaagaaaacagccggttaataaaaagcttctcttcacaaaaggcatgggacagaatctatccgctactaggaggagaaaaaacatccggttttctttcatggaaaaggagtctgaaatatgcggctcttcttttgctattgttaataccgatttcataccttatttataattgggtagccggagaaccaatcggtgaaatcactccaggaacccatggcggagaactgactttaagtaatggcaacaccttcaacctttttgagaatgtccttccggagggtgcaactgaagtgttcatcattgactccaaagggataaattatcaaactcctgccaacaagcccaaagtgaaagaaatcaaaaatacgcttcgtacactgcatggtatggaatgtcacattgtcctttcggatggaacaaaagtacatctgaacgcagaatcacaactgacttatccgatttgtttcagcgataaggaacgcatcgtacaggttgaaggtgaagcctattttgatgttgctccagataaagcacatccttttatcgtgcaaacaccgcacacttctattcgggtgacaggaacttctttcaatgtaagggcttatgcggatgaagaagtggaaagtactacactaattagtggagctatagagattagcagtgaaaacgaagattatgaattgattccaaaccaacatttcgtatatgacaaaaatagtcgggaaagtaccgtatctaacgtaaatacagaattatacacttcctgggagtccggatcattcatatttatgaacgttcctcttgagaatgtaatgtcatatctttccaaatggtacggattcacatacacttttgaagacgatgcagccagacaggtacaaatcggagcttatctcaaccgctatgcaaacatgaatccaattatcgacatgataatggaattaaatatggtagacataaaacaaagagaaggtatactgcacatttcttataaacaataactattaatacatattataactaacgcattatgaaaaaacgaacacaatcctcctcaaagggagtatcttatgtaagcagaaatttcgttaagctctgccttttatggatattctccctttcttcacttatgattcaagcacaagacaatcagcgaatctccgttgatctgagaggcgaaagcctggaatctacgctttggtatttgcaaaaccgtacaaaattcatctttatgtacgcaacagaagatatcgctaacataaccgatatcagcgtaagggcaaaaaacaaaacgatcaccgaaattctggatgaatgtctggaaggaactaacctgacttatgaagtatcaggcactgccatcgttattaagaaaagaaagactaataaaatcacgattagtggatggatacgtgatgcaagcggtgaagcacttcccggagctacagtcactgtccgaggttcaaaacatggagctatcgccggactagacggacattacacttttaatattcctgcgcaagaagggttaatattaacttattcattcatcggaatggagaaaaagactgtaagatatacaggaaagaaaacgattaatgtcactctaaacagttccagtactgaaatcgacgaagtggttgtaaccggttatcagaatattcaacgccgtgacctagtaggttctattaccacagtaaaagcaaaagatattttaatgccttcatataccactattgaccaaatgttgcaaggacgtgtggcaggtatgattgtcaccaatacaagtagtcgtgtaggtactgccccgaaaattcaaatccgtggtaccagtaccttactgggtaatcaagacccactttgggtagtcgacggcatcattcaggaagaccccctggaattgaatgcatcttctctcatgacagaggacttgaaaaacattatcggtaatcagatttcttggttaaatcctgctgatatcgaaagcattagtattttaaaagatgcttctgcgaccgctatttatggttcaaaagcatcgaatggtgttattgagatcacaaccaaaaagaatacgactgatcgtctaagtgtcaattacacctctaattttgtaatgggtacgcgtcccaactatggacagtttaattatatgaactccaaagaaagagtactattctcacaagaagcttttaactggggaacaccttatggcacagaaccaatcaaacaaatatatacttatgaaggattattgaatatgtatctatcgcacgatatatcttctgaagattttctggcacaacgcaacgttctggaaacacaaaatacagattggttcaaactactaacccgccgttcttttagccataaccataatataagtgtttctggcggaacaaataaatacagttatgcagcttctatgggatattccaatagcgaagggcaggaaataggaaacgacagtgaacgtatgaccggacgcgttgccatcaccatacgcccggtacaaaaactaacgattaatgcaacgatcaacggtagcgtaagtacgaataacggttttgccggaggagtcaatcctatggggtatgctactactaccaatcgttctatagaccctgatgcttactatcaaatgaaagcctcatacccatacaatagcggagtcaaatcattatcatacaatttcgtaaatgaacggaataatagtggttctaaatcaaaatcaagtttcatgtcagcttcgctagacttgaaatggaatattttggactggttaacttaccaatttactggtggatattccaataataacagcacaaacgaagcttgggaaactgaacaaacgttttatattgctgaaacatatcgtggttatgatttcaactctgtctcaccaaacagtaaagagtttggagcagccttactcccattcggaggcgaattattcacaaataacgcacagcagtactcttacaacatccaaaataaactgcaattcagtaaagcctttaataatgagaaccgaattaatgctttagtaggtatggaattacgttcttccactaataaaggtgtcagcaatacagtatggggatatgccccagatagaggagaagtaataacattaccaaccactccacaagcttttacacctattacaggttctaaagacgaaggatgggggcttttaaaaaagatatatgatggtggatggagaaaagtcaatactacagacaattatctttccgtattcgccacactagcatattcactcaaaaaccgatatgttgttaatgcaaatatacgtaatgatgcatccaaccgtttcggtcaggatgccaatcaccgtattgatcctacctattcattcggtttctcctggagagcttcagaagaggacttcatgaggaaatatgtaaaatggataacaactttaaacttccgcggcacctatggtattcaaggaaatgcagtaacgcgcattagtccggatttgattttaaatcaggggaaagtggcaaatctatacaacagatatcagtctaccatctcccaaat

SEQ ID NO: 8229 - DNA, 3571 bp, Unknown
  gut microbiota DNA sequence
acatccatgaaacgcaacggtggtattatccacaacagaggtatcgaatacacattaacttttaccccgatacagaaacgggactatgcattaagtgtcagtttgaatgcttccaagaactggaatgaaggcggacatacagacattgatgtcaatgcagcttccttcttaagtggacgttcagatattgtattaaaagaaggatatccgctcagcagtttctggtcatactcttttgcaggattagacggaaaaaccggtgaagctttattcaatcttttggatattccggaagaagaacgtagcagacaaatagatccgactacttatctggtatattctggtcagaaagagccttatttcaccggtggattgagcttaagtttccgctataaatcattaactttaaacaccagtttttcacttttactcggcaacaagaagcgtctgccatcaccatacaaccaattcgctagttcttattatatgccggatccatatacaaatataaaccgcgatttactgaaccgttggaaagaaccgggagacgaagcccatacaatcattccttctttacccaaagcaggaatggcttatatagaattgcccaacaatgagaatgtttatagcattccattatgggaacaatctgacgctatggtggtcagtggttctttcttacgctgccgtaacatcggcctatcctggcaaatgaaacgtgagtggtgcgaaaaaatatatatgaaaaatctatcactcaactttaacatggataacatctttgttatcgccagcaaacgtttcaacggtttcgacccggaagttagcaacagtgtacttccacggaattattcattaggtattaacattggtttctaaaaaaataaaaagatagacaatgaaaagaattatatatatactaacaggaatagtcttactatcactatcctcttgctcagattttctagagcctaaatctcaaagtgagtacgttcccaaagatgcaaatgctttgcaagaaatgttaatcggttctgcttatcccaaacaggataaaagcaatttcctactaccctttcttagcttcttagacgatgacattcagttccacaaaactgattatgaatttagcatcaactctctaaaaaatatagaagccaaacaagctgtttatacatggcaaccggatatgtttttcattatggaaagaaatggttatcctcttcagaatatctgggaaggatactataactatatcttaggcgcaaatgcagctcttgattatatcggtgacgtaaatggtacggaggctgaaaaaaattatgtaatagcccaatccctcggattaagagctttctattattttatgttagtcaatcattttggagcaccatacaactataacaaacaggctttaggagttccactcaaactagacagcaacctgctacctgaagaccaactattaatgacacgaaacaccgttgaggaagtatacaaccaaattgtggacgatctgaatgaagctgaacgtttattccttactttaagcaaagataaacaatatgaaccgaattatctggttagccttccaatgatacaattgctgaagtcccgcgtctttctctatatggaaaactggaaagatgcagccatatacgccaacaaagtaataaaagactggtccttcgctttagtagacttaaataacctcccttctccaacagtggcagagccttattacaattttacatctttaaaatcatctgaggttatttggttatatggaagcgtttcagacttaactgtattcaatgatgagtcggtagagtatgaggaagaaggttacttcggtaataccaccacctattaccgagaagcttttatcgcttctgataacttgattgaaagctttgaagatggagatttaagaaaagaaaagtatatagcaaaagagttcaataaagatgataaagttttctatgaagactcttatactactttcggcaaatacaaactttcagctacaggtgaacctagtggttcggaaaactttgctttatccttcagactaggtgaggcttatttaaatctagcagaagcagctgcccataataatgacgagagtacagcactatctgctttaaaaaccttactggctaaacgttatgaacccgacaaatttgttgagcctaccggattaacaggtgatgcgctcaaaactttcatcaaaaatgaaagaagaaaagaactttgttttgaagggcaacgatggtttgatctccgacgctacggaatgccacaaattattcatagatggggagaacaggtatatacattaaaacagaatgatccttcctataccatgcctataccagacgccgtcttaattaaaaataaaaaactggagcagaatcctttagctccaaaacgcgaaagttaatagtatatatcttatgaattaaacaaaagaaatgaatatgaaaaaaatatatatattatggggattacttgcttgtatggcattattcacctcatgttatgaagaagacacactgactcctacagaaggaggcattgaattacgctttaaagtacctcaaggaaataatagttgggacgatgacatcgcccaaatatacgaagactataatgtatatcttatttataaagatctgcaaagggctgattttaatcgcagctggacaggcatatcatatggtagtggctacgaaggccaaggctgtgtaaacgacgaaatgaccaattactatgtcgaatttatgaaaaagcatatctttgcatacttgaatccgccgatcacatctaaagttctgcctatgtattggtatttgggatacaatgtctatagcaaaagcgtattagaagttggaggcgtaatcctagcaagctggattgtacccatacacgaaaattacgatgggctggattattggtgcacttgtatgtttggagaagacaatcccagcgatccttatttaatccccacagacagagcactccttgacagacgccggaaaatgatattggctcccgtattggaaaaagcagtaaaagccggaaacatcattatacctgaagaatttgaagtgggattcgaccatgtcactaatctgatagcaggcttgggaatggaagatgacccaaactattatcttaccagaggatatccgggaagtgtaaacacgtatgtattcaatagtatcagcgaaccagccaacaactcttatcctccaaccaatgaagagacttttataggatatatgcatctttccatgtactataaccaagcacgactagcagaggtatatccggctgataaatatccttttctcaccgaaaagtttgctttcgtacagaaatatttaaaagataaatatcagatcgatctggaagcaatagccaacggaccggaagactgggatttacctttacctccaataccggagactccagatgaagaataacaactctgataatgaactataaactcataataatgacaaaagtaaaaaatctattattaaccatattactcttatgcggtacc

SEQ ID NO: 8230 - DNA, 3804 bp, Unknown
  gut microbiota DNA sequence
ttcttatccgctaacaatggaaatccgaccctacaaatagaaggttctaaaatagacctgaacggaaatatcgtaatgatgaacccgttaatccttaatggttacgaaatttatcagttcaacaagacatccaccggatacactacacaagtaggcaatgatatacttgaaattaaaggaggtactacaccaattgttcctctattcaatgcacctccaggagcaattcatcagacaatggtagtgtacaacgatatgcaaaatcaatggtcatccgaatattttgataaacataaagctgctgtttcgaatttatttgcattcactcaaactcaattctatattgtgtatgttgccatacacatgtacacagacggaagtatagtggagattggttataaaatatatcaaaacggttcattaggagccgatacttacggattctattatacattcaactatcagaagaattcagatggttctatcacttttggagattatacaccgttcgatacaagcaatcctaatcacgaagagttcgacaaatgtctgtcacctattttagatggttactttaaaaaacacaaattcttcattaaaagctggccggctttgtacaacaattccagccaatatgtgatgtcctcgctaattcctgcagaagataagacacttggtgtcatggtaggcgtacctatgacgttctaaagtttactttacatttatagggatgcctgaaaacggcatccctcactcattaaatagatataagaaagaagtatttgttttccaaccaatgtatataatctaaaaatgcctatctttgcagtcagattatcgataactaaataaaaacgaaatagataaatggcattgcaatgtggtattgtaggactaccgaacgtgggtaagtcgacacttttcaactgtttgtcgaatgcgaaagcacaggcggcaaatttccctttttgtacaattgaacccaatgtaggtgtaatcactgttcctgacgaacgtctgaacgcactcgctgaattggtgcacccccaacgaattgttcctacaactgtagaaatcgtagatatcgccggactggtgaaaggcgcaagcaaaggtgaaggactaggaaacaagttccttgccaatatccgtgaaacagacgcaattatccacgtactccgttgcttcgatgacgacaatgtgacacacgtagacggaagcgtaaatcccatccgcgacaaagaaatcattgactacgaacttcaattgaaagacctggaaaccatcgaaagccgtatccagaaagtacagaaacaagcacagacgggcggagacaaagctgcaaagttagcttacgatgtactcgttcaatataaagacgcactggaacagggaaaatctgcacgtacagtgacttttgaaacaaaagacgaacaaaggatagctcacgaactgttcttattgaccagcaaaccggtaatgtatgtttgcaatgttgatgaagcaagcgcagtaaacggaaataaatacgtagatatggtacgcgaagccgtaaaagacgagaatgctcaaatcctgattgtcgcagccaaaacagaagcggacatcgccgaactggaaacgtacgaagaccgtcaaatgttccttgccgaagtaggcttggaagaatcgggcgtagcacgtcttatcaaatctgcttataaactcctgaatctcgaaacatatttcactgccggtgtacaagaagtacgtgcctggacatacgaaaaaggatggaaagctcctcaatgtgccggagtgatccacaccgattttgaaaaaggctttatccgtgccgaagttatcaaatacgatgattatatcaaatacggctcggaagcagctgtgaaagaagccggaaaactgggtgtggaaggaaaagaatatgtggtgcaggatggcgacatcatgcatttccgtttcaacgtgtgattatcggttaccaccgacgacttattaattactaattcgctaacaatatgaaatatctcattgcaggaacgggaggtgtaggcggcagtatcgcaggattcttgtcgctggcaggcaaagatgtaacctgtattgcccgtggagctcatttgcagtcgattcaaacgaacggtttgaaactgaaatcggatttgaagggcgaacatacgctccggattccggctactaccgctgaagaattcaatggaaaagcagatgtgatatttgtatgcgtaaaaggttattcggtcgattctatcgtagaactgataaaaagagcagcacacaaagacacggttgtcatccctattctgaatgtatatggcacagggccgcgcatacagaagctagttccggaagtcaccgttctcgacggctgcatctatatcgtaggcttcgtatccggcaccggagaaatcacccaaatgggaaagatattccggttggtatacggcgctcatcgcggcacagttgtaaaacccggattactggaagctatccaacaagacttgcaggaagcaggcataaaggtagacctctcaccggacatcaaccgggatacgtttatcaaatggtcgtttatctccgcaatggctgtgacgggtgcttactacgacgttccgatgggagaagtgcagaaaccgggaaagatacgggatacatttatcggactttctacggaaagcgctgccttaggaaagaaactgggcgtcgaatttcccgaagacccagtcagctacaacctgaaagtgattgacaagctcgatcccgaaagtaccgcttctatgcaaaaagacctggcacgcggacacgactcggaaatacaaggattgctcttcgacatgattgcagcagccgaagaacagggaatagatataccgacctaccggatggttgcggagaaattcaaagaatctaatcattaacattaatccaatatagaatgaataccatgctattatccatcaactggaacccgaatcccgaactattcaacctgttcggcatttctatccgttattacggattactgtgggcagtaggaatattctttgcttatgtggttgttcactaccagtaccgggataaaaagatagaggagaagaagtttgacccgcttttcttttattgtttctttggtattctgattggtgcccgcctgggacactgtctgttctatgatccaggatactacttgtctcatttttgggaaatgattcttcctatcaaattcatgccggacggaaactggaaattcaccggatatgaaggacttgccagccacggcggtacattaggactgataatcgccctttggctgtattgccgcaagacgaagctccattatatggacgtgctggatatgattgccgtagctactccaatcaccgcctgcttcatccgtcttgccaacctgatgaactccgaaatcatcggcaaaccgtctgatgtgccctgggcattcatattcgaacgtgtagatatgcaaccccgtcatccgggacagctctacgaagccattgcttatcttatcctgttcttcatcatgatttacctgtataagaattacagtaagaaactgcatcgcggcttcttcttcgggctttgtctgacttatatcttcaccttccgctttttcatcgaattcctaaaagaaaatcaggaagattttgaaaacagcatgatgttcaatatggggcaatggctaagcgttccgtttatcataataggcgtctatttcatgttcttctatgacaagaagaaaaataaaatagcctaaatcaaaaaaagagg

SEQ ID NO: 8231 - DNA, 3665 bp, Unknown
  gut microbiota DNA sequence
cagctgtggaagagacagcaggagaggaggatgaagttgccgggtctgaagtagattcacctagtattatacaatctcttgaatctgctgttgtgaaagaagatgaggaaggagagattattgttgcggaagagaaaccagtcgtagtggtaacagaagaagggaaaaaagaggaaccagcaattgttgaggagcctgttgttgaaactgttgtgaaagaggaagaacctaaatcggtagtgttgggagaaagtctcaaactatctgctggcttgcgacatgctatcagcttgaatgattctttccgtttttctcgtgaactatttggaggcgacacagaattgatgaatcgtgttattgaacagatatcagtaatgggttcctacaagactgcggtcgcatttctgtcctcgaaagtcgaattgaatgaagaaaaagaggcggtgaacgactttttggaactactaaagaaattttttaatcaatcagcataaatcaaaaacaagatgggaaagctatatgtagtgcctacgccggtagggaatctggaggacatgacttttcgggctatcaaagtcctgaaagaggtcgatctgattttggcggaggatacacgtacttccggtattttgctgaaacactttgaaataaagaatgcaatgcaatcccaccacaaatttaatgaacataaaacggtggaaagtgttgttaatagaataaaggcaggtgaaacggtggcactaatttcggatgccggaacgcctggaatttccgatcccggatttctggttgttcgtgaatgtgtgcgcaacggcattgaagtgcagtgtttgccgggagcaaccgcttttgttccggcactcgttgcatcgggattgccgaacgagaagttctgcttcgaggggtttctcccccagaagaaaggacggcagacacgactgaagacattggcggaagaacaccgcacgatggtgttttatgaatcaccccaccgtctgttgaagacgttaacgcagtttgccgaatatttcggtgctgaacgtcaggcaaccgtgtcgcgtgaaatatccaagctccacgaagaaacagttcggggcagtttggctgaattgatagaacactttaccgccaccgaaccccggggcgagattgtgatagtattagcaggaatagatgattaaataacttcattaaaaaacgtaaaacgtaaacgtatgaaaaagttagctgttttatttgtatgcgtagccatgttagcttcgtgtgatagctttaaaggtggaagtaaagacctgaaagctgaaaatgattctcttttgatggaactgaaccagcgcaatgctgaactggatgatatgatgggtactttcaatgaagttcaggaaggtttccgtaagatcaatgctgccgaaagccgtgttgacttgcaacgtggaaccatcactgaaaactctgccagcgccaagcaacagattgcttctgacatcgaattcatctccaaacaaatggaagaaaacaaagcgcagattgcaaagttgcaggcacagttgaagaacagtaattacaattctgcacagatgaaaaaagctgttgccgctttgactgctgaattgaacgctaaacaacaacgtatcgaagaacttcaaactgaactggcttccaagaacatccgtatccaggaattggatgctgctgtcagcgacttgtctgctgctaaagaaacgttggctgcagaaaacgaagcgaaagctaaaaccgttgctgaacaggaaaagagcctgaatgcagcctggtttgtatttggtactaaatctgaattgaaagctcaaaagattcttcagagcggagacgtattgaagagcgctgatttcaataaggattatttcactcaaatcgatatccgtacaaccaaagaaatcaagttgtactctaaacgtgctgagttactgactactcatccgtccggttcttatgaattggtaaaagatgacaaaggccagttgacattgaagattactaatcctactgaattctggagtgtatccagatacttggttatccaggtaaaataaggtaggcatccctttttgaattgccaatgtgctgattcctggattcaagaaattagcacattggcttttttatttcctatatacgctaactactgatgaaatataaaaatctcttttttgatcttgatgataccatttgggctttctctcaaaatgcccgtgatacttttgaagaagtatatcagaaatattcgttcgaccgttattttgattcgttcaatcattattataccctttatcagcaaagaaataccgaactttggattgagtacggcgaaggaaaaataacgaaagatgaattgaaccgtcaacgtttcttttatcctttgcaggctgtgggaatggaagatgaagcgcttgccgaacagttctcgaaagattttttcgcgattattcccactaaaagtactttaatgcctcatgcaaaggaggtattggaatatcttgctcctaaatataacctctatatcctttccaatggattccgtgaattgcaatcacgcaagatgcgttcggcaggagtggacgagtatttcaaaaaagtgattctttcggaagatctcggagtgttgaagccttggccggcgatattcaattttgccttgtctgccactcaatccgaattgcgcgaatccttgatgattggtgacagttgggaagcggatataaccggagcgcacggagtagggatgcatcaggctttctacaatgtgacagaacggacagctttccctttcctccctacttatcacatctattccttgaaagaattaatggatttattataggttttctggattaagtcgtatttttgttgcgttttaattttgcataaaatacgatataatcatggatagtacgcttctgccttttgccttactttgtttcacttcattttttacattgaccaacccattgggaacgatgcctgtcttccttaccatgacccatggtatgacggataaggaacgtcagtctatcgtacgtcgcgccaccattgtgtcgtttattacaataatggtatttgtctttgccgggcagtttctttttaagtttttcggtatttctaccaatggcttccgtattgccggtggggtgattatcttcaagatcggctttgatatgcttcaagcccgttatacaccgatgaaactgaaagatgaagaaatcaaaacgtatgcggatgatatctctattactcctctcggcattcctatgttatgcggtcccggagcgattgccaatgctattgtcttgatgcaggatgcacattcttatgaaatgaagggaattttgatcggcactattgccctgatttatctgctgactttctttattcttcgtgcttctacgaaattggtaaacgtattgggcgagacgggaaacaatgtaatgatgcgcctcatgggattgattctgatggtaattgcggtggaatgtttcgtcagcggattgaaaccgattttggtggatattgtgagagaggggatgcttccttgatgataaaagatagaagggctgaagagtccttaaaatgaaatttatctttgctgtaaaaagggactgccctcctaaagttagatgcaaaaactt

SEQ ID NO: 8232 - DNA, 974 bp, Unknown
  gut microbiota DNA sequence
aaagtttctggctgcatttttcacctttttactgtagtcttctcgaaaggtaacatccaattgccaatgaagattattctcaatagaccaatgctgtctgatggcagatgcaatctcctccggtttggtattatcaagtgaagttacatagtatctgacctcttgagtatattctcctgttgctactattgttctctccgactttatccctacaatagacttcaaccccacaagtttcttcttaaacattttctccattatagaaccataactgactacagtacaggttcttttctcaactcttccatgtccggtattttccgacacatgcctggtgactctattgattatttcatctctatcctgataatcgtcaataatttgtttagctagttgataattttttttcttattctcctttatagctataatataatttgcatcacgctcaataatggtctgggttatatctttctggcatcccatcgcgtcaattgtaacaatacaaccacttagttccaaagagttaatcaacaatggaatagctgtgatttcattgcttttatcatctacttttacctgacctaaagaaattccattaacggcagaccaggcggaaaccatccataatttgaatccttcttttcccgtagtatgctctccatcacattggcttggaccacgcatgagcttgccatctatagctacaacgcctttcacctcctgacaaacttgttttacccaattacgaaagatcaactcaaaatactcgggctttattatactgaagaatctattaaaagtatcatgactagggatgaactccaggtcaggtatgcgacttttgaaaaaagcaattttcgcattgccaaattcctcaatctcattccaagactgggcgccacagattacagcagcaatggatatatagataatagtttccattttatgtacttttttgcggttcatcctag

SEQ ID NO: 8233 - DNA, 6275 bp, Unknown
  gut microbiota DNA sequence
agccgagatgatagaagtcgcgatagtcacgataaactggagaatgtttttccaaagttgctttttcatacgaatttaaattaaagaatagatactcatgcattataaactataaactcaagaaccaatcaacaaccggttgattatgccgccgggtccggagcttctccgctgccggagcctccttgattgtcgtcaccatcatcaggcagtggatctttatccgaatctgcggaagaatcacttttatacaatgtataatccagcgtcttacacagtttgcgaagatcacttcccggataaaaaagtactttgcctttatcgatacatgatgccttgaattcttttaccgtatcagtaggagtacccgtcttgatactcatacggaaatttcctaggtcacccatctgcacgatgtttccttcctccagtacattaacgatttcgagcaggaactcaccgatacaaccttccaattctcctttggagtaagaagaacgttcggtaattcgtttgcagacttccttgaccgttactttgcgaccgctacgcgccactgcatagtacttcggagtttcatcaggtttcaacaggttcttgcgagccatgagagtgtaattctgtgccataaacttttaatttttaatttctaatttttaattgtcttgtaatcgattacatgacaaaagtaatacattgaaaaagtgacatgacgcatagtgacgtacacgggcgcatagataaaaagaaaaaacattgggagatttgtatcgaaacttcccaatgtttgatttcaattattgagatgtttttttcaaatctcccgatgtttttccgattctccaaaaggacaaaaggacaaaaagacacctatgactgttatttattcatcttagtataagaaccatgagataccttgctgatttttattccgttaagtgattttagaagacgtgtaaccttacgaaggttgaaatcgtattttgcgccaatctgaatagcttcatctgtagtgaagctgtcaggcaactcattgacgaaattacgaataatgtccggattcttcagaggacggaccgcaggagccggcatggatgagtgtaacagacggctgtgctcgtaacaacatagaacgatttgaagagatcgttcgaaatcggcatctatacaataaatttcggaggagagatcggttgcctcaaattgccggatgcgggtctgaatcatgctgatacgcatcaccagaaaagcatagcgcttcactacggcttggaggtcatcattgccctccatcgctacctcggacagcatacgtgagaaaatctcattcagacggttccattgcggacgggtgaaatgaaataaaacaggatgcgccaggcagaaattatatagttcgtagacacgatgggcaatcggcttgaaagagtcttccaatgaaatacaatcatcacccatctctttccagtggggagcttcacggaaagtgtaagccagaatacggctgggaagtccgttcccgtaactgtttaataaacagtcaatctgtccgggagtgcccgttagaagcaaagctaatttgggataacggatatagattgggatgataccgttggctttataggaagaatcaatgttttcgtgctcaaaagctttgcggagcatgtcatcgaagttaccacaatccaggtgattggctgtggagagcgtttgggcttccgtatcgaaaatgatacttccctgcgaaccgttgtcctgcatctgaatttgcatacgggtgtaactggtagtggcgggaatgaataacattttaaaaggaggtctttgaggctcttcggaacacgtttctccttttttccttttccgctgacattctgcttgccaggtattgtgcgctgtatggtagttttttaacatggattcactggtagacagtatttcagtctgtatttcttccaatagatagcgtccggtttgggcaatgcttttaccgctgccggcagaagaaaatatgacactgaacaaatggggggaatattttttgtggttataaattccgaaagtttgtggaagtgccgcacttagtgcggtaagatcggaaaggagggagatgtcttgttcgcggtcgcttgcgtcttcaatgatacagtcattcagtagatcgggaagattattgtacaaatcgcgcgggaataaaggtgttcctttcctgaattcttctcccaaccaataggcttcttcggtgctatcggagttttctaaagtaccataggggatttttgtccttatgtccttttgaaaggaagaagaggtggctgtagaggaagcaggtgcgtgctcgttaacttgcttgtatccagatgataaaacacttgtcaattcttcgggacgaaaatctgtatgctcgaaaaatgcagtaagctcacgtaatatgctttcttgcggatagtgtcggcgggaggcttcgcaggcaagtttaaagacgttggaatgacgttgtccggcggtcaggggatggaggaaaatataggacgaaataaattgggcgatttctgcttcagacacgttttccggggtactatcctggagaggaaagggaggaagcactttattttcagaggaagcgtttgtttcctcttttagatgtggttccaacacaaatgcctgataaagaccggcaacatatccattgggcgaataactgaaataacacagacgactttcgtccttgcaggccggatcactctccaatcccagcaattgattgtagtaacggctcactaattgctgcccttcacgatggcggttttcgataccttccacataggcgaaaactttcactccgtcagtaggactttctatggccgctaccgtgtgaggatctgccgcacaacgttggatgacttgaagacgatcttttacatgatcgtaatcgagcccgacaatatggctggggaggaggaagtttttgatggcatgtgctccgtcaaaagtacctgccggagtgaaacaggggagctggctcttcaacttctgtgccgcggcatggtctccttctgcatagtatcggcggatagcgtttataatagaggcatagaccggatgaatacacataatgatgacttcaaggaaagacatgactttgggcttttttgaatacacattctcgtaaaccgagactttgatttcttctaaggctttcatataaaattgttttttgtaagattgagttacctgactatcagataacgggaacaaaggtcgggatattaaaaatagggttgcttccctatgtggatagtacttgataaagcaaataaaaactgaaatattataaattattaatcatagaatgacatggcaaaagaaaaacaggaaccatacgagtttttgagcaatttggtattggctttaatggatatggatcgtattttcagtaacagtttttttacgagcgaatttgatatctctcccaaaacactgagtgagataagacggggagaggatatgtgtatttatcagtatgtgcgcgtgatccggtgtatgacggagtatcttcatttaatcatccggatggatatgttgctgaaggagttaagaaccgtattagcttccaattgcgatttggtggttgctacggttccgcaccgttttcatggaacttgccaaccgaaagaatgggtggtagtgatgcaatgggatggggtgaaattgtgatttctacagaaaatagggcattttttcaatctttttgcctgaatcctttctttatttaattttttttatatctttgctttcatattgagaaacacggataaaaactcacttatttattcatataaacttaataaattatgttcaaagctcctttttcatttgacggtcgtattcgtagaatcgaatacttcttgtcaggcattattggtggtatagtttctagtattgcatgggcactaggcgtaggtacatttgttttgggtgctgccagcggatcggccgggggatcagtatttggtttattgatcggtcttgctgctatgattgcatctgtttggttctctctggcacagggggtgaaacgtctgcacgacttaaataaatccggttggctgattttgttgtgctgtgtacctattgttggttggatttttgcattgtacatgctgtttgcagatggcacggtaggtcctaatccttatggtgcagatccgaaaaaccgtatgccatatcaggcacaacctgcttctgtaaacgtgactgtaaacgtttcaagagaagatgtaaaagttgacaagccggtagaagctgctcctgcacctgcggaagcccctgtagaagaagataaagaaaaggctgaataatcttattaaagaagaaataatagagcctcctgcgaaattcgttttgcaggaggcttttttgttattaacctgtttgttattcaatattttgtctaaatttgtaagtgaaattttatgaaataacgtttttccctttttctgtaatctgccaatagccttttttatttgcaccttgacgaataattaacccgttcgtcttaaaattgcggaatgctcttgttacagtggcttcagaaatggataaatcattcatcaaatccacatatgtgatattcttatttgcactaattgcttttagaatcaatttctctgtctgagtgaaatttataccgtcatttataccgtcatttataccgtcatttataccgtcatcactttgaatatttgaaactgcatctttcatagtcggataattcctaccgaatgttaccaataatccaccttctgattctttgaatactggtctttccaaaccggctttatcaaaggcttcgttgatcttacgaataccgcgtccccatgattctataaatccggctttgtagaatacggaagcgacaagttgattccgagggtgggaagaatgtttttcaaccaatgtgtcaatagtgatggcatcgggtaatttaccttcattccaaagctcaatatgatcattgaatacccacatttggatggggacgccaacatagagtttatgtactagactgttgtaaatcatttcgcgtaaagcatcttctggtatctccaaaggctcaatacgttgcatcccttcataatggatgggggaaatgagatatttggagcgtagtaatgctaccaccttgtcagccatttgcaggatatttccttctactacatcctgaaagataaggtcggcttcattcataccgaaacgaccgatgtgaaattccacaccgggaaagaatcgaagtggttcttttccgaacaacaagatggcggcatttttcaagtgcccgtcttcggatagtaaccgtaggttgtggagtacgttgtgtgtatcttcaccgttcaaggatggggcgatacgttgggcgttgatggctcttcggagaaaatagtcaatggcattacggtctatatcatccaactttgcagaatcgttggtggtgtcatcccacgagcgtcccatcttctttaagatgaactgttgtagtgccgtacctttcatctcctgttttgtagaaccactacgataatgatactgaccgtgataggcaatgggaacattgctgggttccacaacgatttcaataaattctttatcttcattcgaatgtaacaaattgacatcagctacaatacccaagtaattgacaatcttgttggggatgtcttccatcaaccgtttcgagtcagctacaccgacaatctcttgtttgtcgtttatgcctatatatatacaaccaccttgtgcatttgcaaaaccacaaatccatttcagatattcatctctccaagattctttatattctatattttgactttcgctcataatacgcaaaggtacgctttatttctataattcaattcctttactacttttttccgtgtatcacttttttgtagtaaatttgtaagatgaaaaagtatattcctaatccggtggacacagaacaaatccaactcccgaaggagttggaatatctggtagaagagatggctaagaatgttcatgaggtctggtcgaaaaccagaatagaacaaggttggacgtatggcgaaaagcgggatgatgtattgaaacagcatccgtgcctggttccgtatgaagaattgcctgaagaagaaaaggtatacgatagaaattcttcagtggaaaccttgaaactgataatgaaactggggtttaagatttcgaaggatgaaaaatagatgatgaatgatggcaac

SEQ ID NO: 8234 - DNA, 9034 bp, Unknown
  gut microbiota DNA sequence
caatctttgcctttgtatttcctatgtcgattattaaattcaaatcttttggttctttagcgggcgcaaaggtaaagtaaaaaaagaaaagttgaagcatagaagaggaattatcttcttttttcattttagaaatcccccaaaaacaaaaatatcgaactatctatttttaaatagatcaattatcttttattgtttattatgtattccactttgcgttcggcagtcctttttcattacatcataaacagctaataagcaatagattacaagagaaaaacagcgttccacaaagcgttccactgttttgtaatcaattttccgttccaacagaaacattatttcatccaaacagaggctccgttttatctcatctaaaggcaaatttcctgaatcatcttcattttttcattcacaaaacacagaaaaagtgtgttgagcgaactatattatatagattattatattttagtatttatatatgttcggttggtggttcgcctacttttttccgagcgttgcaaacgcatgacagacaagcagttgagccacctccagggggtgttcgtttggctgttcgattttttagccccaaaatagaggctctatttgagggaaacagagactctgtttaagccatatagagcctctgtttgtatgaaatagagactctattccgataaaatagaaccaccgttttcccgaatccaacaattcttcctatatttgccaccaaaataaaacgagcctgctaatgaaacgttttttcttatatacaatcctctccttcttcctgctgcttccgtccgccggacaagcacctgccaacagcaacgactccatccgcttgagcttgttgacttgcgctcccggagaagaaatatattccctgttcggacacactgccatccgctatgaaaacccgtcacaagggattgacgctgtgttcaattacggattattcagtttcaacactcctaacttcatcttccgcttctcgctcggagaaaccgactaccaactgggagtgacggattatgagcattttgcggctgaatacgcattctacggacgcagcgtgtggcagcaaacactaaacctgactgatgaagagaaaacaaaactaatccagttattacaagaaaattaccgcccggaaaaccgggtgtaccgttataatttcttttacgacaattgcgccacccgtccccgggacaagatagaagaaagcattgcaggaaaggtggtttatccgacggaaccgcaggatggttcgcgcactttccgcgacatcgtacatcaatattgcaaaggacatccgtgggcgcgtttcggcatcgacctctgcatcggaagcgaagccgaccagcccgtcacacaacggcaaatgatgtttgcccccttctatctgatggatgctttcgacggcgcacagattttcacagatacctattcccgtccgcttgtcaaggccaacgaactgataatcgacgtcactcccaaaccggatgaaagcggctggatgcccactccgctccaatgctcgttactcttatttatactgacagccgccgccacgatctatggcatccgccggagaaccggattatgggggatcgaccttgttctttttggcatggcaggtatcgtgggatgcgtcctcgccttcctcgccctcttctcccaacacccggcagtcagctccaatttcctgttattggttttccatccgggacaacttcttttccttccctacatcgtatattgtgtccgaaaagggaagaaatgctggtacttgaccttgaatctggtcgttttaacactttttatagtgctttttcctgtaattccgcaaagatttgactttgctgttgtacctttggcactcgttttgctgatacgttcagcaagcaatctgattgtgacatctaaaaagaaataatgaaaggactactaacttccctcatcaccgtactgactttcaccgggctacaagcccagtcactgccttccgcccctaaattagtggtagggctgactatcgaccaactgcgtacggactatctggaagcgttttcgtcactctacggcgagaaaggcttcaaacgtctttggaaagagggaagagtgttccataatgccgaatataccttctgcaacgtagaccgcgcttctgccatcgcagccatttacagcggcacgacgccttccatgaacggaatcatctcccaacgatggatggacgcctctacccttcgccccgtcaacagtacggacgataccgaattcatgggatattacaccgaccaaacggccgcacccaccaaattactgacttccaccattgccgacgagcttaaaatagcgacccaaggcaaaggactcgtatatgccatcgcccccgattgcgacgccgcgcttttcgcagccggacatgccggaaacggtgctttctggctcaatcccaacaccggaaaatggagcggaacgacctattatggagagtttccgtggtgggcaagccaatacaatgaccggcaggcgattgatttccgtattgcgggtatgacatgggaaccggtattcccccgtggcatgtacacttttctgccagattggcgggatatactcttcaaatataaatttgacgacgaccgtaacaataagtacagacgcttcatcgccagcccttttgtgaatgatgaagtgaacgcacttgccgaagaggcattgaacaaaagctccatcggcatggatgacattactgacttattggcactcacttattatgcaggaaactacgcacataaatccgtacaggaatgtgccatggaaatacaagacacctacgtgcgtctcgaccgcagcatcgaaaacctgctcgaagcgctcgacaagaaagtaggactacaaaacgtgcttattttcgtcacttccaccggatatacggacagcgaatcggctgactcgggattgtacaagattcccggcggagagttttatctcaaccgttgtgccgccctattgaatatgtacctgatggctacgtatggcgaaggaaagtatgtggaagctcaccacaaccagcagatttatctgaatcataaattactggaaaagaaggaactgaatctggcagagatccaacaaaagtcagcagaattcctgatgcagttcagcggagtgaacgaagcatattcagccaaccggctgttgctgggttcatggacaccggaaattcataaaatacgcaacggctaccaccgcaaacgttcgggcgacctcgtaatcgacgtccttcccggatggaccatcgtcaacgagaacggcggcgaaaacaaagtggtacgtcattcttatatcccttcaccgctgattttcatgggacattccgtaaaaccggccattatccagacacctgtaaccattgaacatattgcgcccacactggcacatttcatgcgcatccgggctcccaatgcctgtacttctgctcctattaccgacctacggtaaaaatttactcacaaaaacagggagcaaaacataaataaatcagcattttaatgtaactttgcggagattattcgccacaaatcccacagattcatacagattaaaaagaaagatccgtgttctatatgaaaaaatctgtgtaaatccgtgaaatctgtggtgcagaaaaagataaataataaactaaataatataacatgggatttaatgaatttttaagctcgattttcggaaacaaatccacacgagacatgaaagaaatcaagccctgggtggaaaagatcaaagctgcctacccagaggttgagaaactggacaacgacgccctccgtgccaaaacggaagaactcaaaaaatatatccatgaatcggctaccgccgaacgtgcgaaagtggaagagttgaaggcaagcatcgagacactggaactggaagaccgcgaagaagtcttcgcacaaatcgataagacagaaaaagaaattctggagaaatatgaaaaagcactggacgaagtactgcccgttgctttttctatcgtgaaggccactgccaaacgtttcacagaaaatgaagaaatcgttgttaccgctacggattttgaccgccaactggctgcaacgaaagattttgtacgcatcgaaggtgacaaggccatctatcagaatcactggatagccggtggtaacgacacggtatggaacatggttcattacgacgtacagctctttggtggtgtcgttctgcacaaaggtaagattgcggaaatggcaaccggtgaaggtaaaacattggtggctactctcccggtattcctcaacgcactaaccggaaacggtgtgcacgtggttaccgtgaatgattacctcgccaaacgtgactccgaatggatgggacctctttatatgttccacggattgagcgtggattgtatcgaccgccatcaaccgaactccgacgcacgccgtcaggcatacctggcagacatcacgttcggtacgaacaacgaattcggtttcgactacctgcgcgacaacatggctatcagcccgaaagaccttgtacaacgtcagcacaactatgccatcgtcgatgaggtcgactcggtattgattgacgacgcccgtactccgttgattatctccggtcctgtaccgaaaggcgacgaccaattgttcgagcaactccgtccgttagtagaacgtctggtagaagcacagaaagtattggctaccaaatatctctccgaagctaagaaactgatcgcatccaacgataagaaagaggtggaagaaggattcctcgctttataccgcagccacaaggcattgccgaaaaacaaggctttgattaagttccttagtgaacagggtatcaaggcaggtatgctcaaaacggaagagatctacatggaacagaacaacaagcgcatgcatgaagttactgatccgctgtatttcgtaatcgacgagaaactgaatagtgtagacctgacagacaagggtgtagacctgattaccggtaactctgaagacccgacattgttcgttcttccggacatcgccggacaactttcggaactggaaaaccaacatctgactaacgagcaactgcttgaaaagaaagatgaacttctgacaaactatgccatcaaatcggaacgtgtacacaccatcaaccagttgttgaaggcttacaccatgttcgagaaagatgatgaatatgtagtgatcgacggacaggtgaagattgtagacgagcagacaggccgtatcatggaaggtcgtcgctactctgacggattgcaccaggctatcgaagccaaggaacgtgtgaaagtggaagctgctacgcagacctttgcaacgattactttgcagaactacttccgtatgtatcacaaactgtccggtatgaccggtactgctgaaacggaagcaggcgaactttgggacatctacaaattggacgtagtcgtgatcccgaccaaccgtccgattgcaagaaaggatatgaacgaccgcgtttacaagacgaaacgcgaaaagtataaagctgttatcgaggaaatcgaaaaattggttcaagcaggacgtccggtattggtgggtactacctcggtagaaatctccgaaatgttgagcaaaatgcttaccatgcgtaagattgagcacaaggtattgaacgccaaactgcaccagaaagaagcggacatcgttgctactgccggtttaagcggaacagtaaccattgctaccaatatggctggtcgtggtaccgacatcaagttaagtccggaagtgaaagctgcgggcggtttggccatcatcggtacggaacgtcacgaatcccgtcgtgtagaccgccagttgcgtggtcgtgcaggacgtcagggtgacccgggttcttctatattctttgtgtcactggaagatgatttgatgcgtctgttctcctccgaccgtatcgccagcgtaatggacaaacttggtttccaggaaggcgaaatgatcgagcacaagatgatttccaattctatcgaacgtgcccagaagaaggtggaagaaaacaacttcggtattcgtaaacgtctgttggaatatgacgacgtgatgaacaagcagcgtacagtggtttacaccaaacgccgccacgctttgatgggtgaacgtatcggtatggacatcgtgaacatgatttgggaccgttgtgccaatgctatcgaaaacaatgattatgaaggctgccaaatggaactgcttcagacattggcgatggaaactccgttcactgaagaagaattccgtaacgagaagaaagaaaagttggccgaaaagactttcaacattgcgatggataacttcaaacgcaaaactgaacgtctggcacagatcgctaatccggttatcaaacaggtatatgaaaaccagggacacatgtacgaaaacatcctgattcctattacagacggtaaacggatgtacaatatctcttgtaacctgaaagcggcttacgaatcggaatctaaagaagtggtgaaatcgttcgagaaatcaatcctgctccacgttatcgacgaagcatggaaagaaaacctccgcgaactggacgaactgaaacattccgtacagaacgcaagttacgaacagaaagacccgctgttgatttataaactggaatctgtgactttgttcgatgccatggtgaacaagatcaacaaccagactatatctatcttgatgcgcggacaaattcctgtacaggaagctccggacgaacaggctgcccgtcgtgtggaagtgcgtcaggctgctcctgaacaacgtcaggatatgagcaagtatcgcgaaaacaagcaggacttgagtgatccgaaccagcaggctgctgccagccaggatactcgtgaacagcagaaacgtgaacccatccgtgcagaaaagactgtaggacgtaacgatccttgcccatgcggaagcggtaagaagtataagaactgtcacggtaaaaacctttaagaagttgagaagggagagttgagagctaaaagttgagttagtaggagtttctatttctttgcgctcatttttgaatcagcttcgctcaaaagccttatttaatttttaacattaaggtataatctcaagtttcaatacacaaaagaaagtctcaaacggttaaaaactgtttgagactttcttttattcctccaaaattgtacttttgttcaaattactaaatagaacaaaactatggcaaaatcttattcactggctttcgtcactatcttcctgctgacactgggcagctgtcagagtttggaacagatttccattgattatctgcaacctgccgacttgagctttcctccgcaactccggaaagtagctatcgtgaataacaccagcaatatcccggataacaaactaataacaacgactgaaaagatcaaagaaggtacaccgctggtaagtcgtgcaacggcatacgccaacggagatcccaagattgccaccgaatcactggctgaagaaatcgcacatcagaattactttgaagaagtagtcatctgtgattccgctttacgggcaaatgataaattggcccgcgaaagtacattgagccaggaggaagtccgtcagttagcctctagtttgggagtggattttatcattgcattggaaaatctgcaactcaaagccactaaatctgtccgttttctgaatgagttcaactgttttcaaggagcagtagacgtaaaagtatatcccacggtgaaagtgtatcttcccgaacgtagccggccgatgactacgctccatcctaacgacagcatcttttgggaagagtttggaggtactgccgtagaagctgccacccgcatgattcgcgacaaacaaatgctggaggaagcggcggtatttgcagggacagttccggtgaaatatctcgtccctatgtggaaaaaaggaacacggtatctgtataccggaggctcggttcccatgcgtgatgctgccatctatgtacgcgaaaattcatgggacgacgcatacgaactttggaaccaggctttcgaaggtaccaaaaaccaaaagaagaagatgcgggcagctctcaacatagctgtttattatgaaatgaaggatagtctcgctaaagcggaagaatgggcggaaaaagcacagcaactagccaagaaaattgataaaaagaatatcacagatagtgttcaggccagcattgacgatgtgccgaattattatcttacgtccttgtatttagccgaattgaaggagagaaatgctcaattacctaagttaaaattacaaatgagccgatttaatgatgatttttaaggaaattgtgtatcaaatcttattttttttatacctttgaacttataaaaagaaggaacccatgaaactaagccaacaatcactatccattatcgaatcggctatccaaaaggcagtcgctaaatatacatgtaactgtgaacaaacagttgtaaccgacatccatctccaaccggaccagacatcgggacaacttaatatttacaatgatgatgatgaagaactggcgaacatcatggtcgaagaatgggctacgtatgaaggggatgatttccttgaaagtgtggaaccttctctacgcaacattctttgcagaatgaaagatgccggagacttcgacaaggtgactatcctgaagccttactctttcgttctggtggatgaagagaaagagaccatagcggaattgttactggtggacgatgatacgatcctggtgaacgatgaattgctgaaagggttggataaggaattggacgagttcttaaaagagttgttggaaaaataaaatacagcatttttaggatagagttcgttcaggattaatataaatatccgaaagcattatataaagagaatcggaagcaaacagggtatttcctgttgcttccgattatttttatagatactctttttatagatagccgagtaacgtttcatac

SEQ ID NO: 8235 - DNA, 23221 bp, Unknown
  gut microbiota DNA sequence
aaatatgcatcgaaaaaagctctcgaggtgttgaaacagaagcctatccgacttcctgcttgggatcctatgtttgctgaatagttctttttctttgcttctgtcttttgtttcggaacaaaagataaaagattacgtgcacgaacacgaaaggaattacggatatttttccgtaattcctttcttttttcctaccgaatcccaatcttatttattacttttgcggcaaatttatgaaaccattattttatatagcatggcaaatgtaataaagttacgtaaaggccttgacataaacctgaaaggaaaagctgctgaaacgtacgcaacagtaaaagaaccgggattctacgcacttgtacccgatgactttcctggagtgacgcctaaggtagttgtgaaagagcaggaatatgtaatggctggtggacccttgtttatcgacaagtatcatcctgaagtgaaatttgtttcgccggtgagcggcgtggtgacgagtgtagaacgtggtgctcgtcgtaaggtattgaacatcgtagtagaagctgctgcagagcaggactatgaagattttgggaaaaagaatgttgcttcgatggatgctgaagctgtgaaatccgctctgttagaagccggacttttcgcgtttatcaaacagcgtccttatgacatcattgcagatccgacggtaaccccgaaaggaatcttcatctccgcattcgataccaatccattggctccggatttcgagttcgccctcaaaggcgaagaagcaaacttccagacagggcttgatgctcttgccaaactggcaaaaacctacctgaacatcagtgtgaaacagaacgctgctgcactgacacaggctaagaacgttacaatcaccgcattcgacggaccgaaccctgcaggtaatgtaggcgttcagatcaaccacctcgaccccgtatccaagggcgaaacggtatggactattgatccgcaagccgtaatcttcatcggtcgcctcttcaatacaggccatgtagatttcacccgtacagtagctgtgacaggttccgaagtgttgaaacctgcatactgcaaactacaggtaggcgcattgctcaccaacgtgtttgccggcaatgtaacaaaagacaaagatttacgctacatcagcggtaacgtgctgacaggaaagcaagtatccccgaacggattcttgggcgcattccatagccaactgactgttatccccgaaggtgacgacattcacgaaatgcttggatggatcatgccgcgtttcaaccagttcagtgccaatcgttcttatttcagctggttgatgggtaagaaggaatatacgttggatgcccgtatcaaaggtggcgaacgtcacatgattatgtcgggtgaatacgatagagtattcccaatggacattctacccgaatatctgattaaagcaattatcgccggtgacatcgaccgtatggaagcactcggcatctatgaagtagctcccgaagacttcgccctttgcgaattcgtctgctcttcaaagatggaactgcaacgcatcgttcgtgtcggactcgatatgctccgttcagaaatggcgtaatcgaataagagattaaataataaaaattaaaataagcgatagttgaaatcttgcgaaacggctctctgtggatacagcataaacccagcacagccaattttcaactctcaactttcaattttcaattaaataaatgaaagcgttaagaaattatctcgataagataaagccgaactttgaggagggcggcaaattccacgcattccagtcggtatttgacggcttcgaaacattcctgttcgtgcctagcaagactgcgaaaacgggaacgcacatacatgacgcaatcgatagcaagcgcatcatgtcgattgtggttatttcgttaataccggctttgctgttcggtatgtacaacgtaggttaccagcatttcactcatacaggtgctactggcagcttcatcgaaatgtttatctacggattcctggcagtactgcctaaaataatcgtatcatacgtagtaggtcttggcattgagttcgtcgtagctcaatggaagaaagaagaaatccaggaaggattccttgtttccggtatcctgatcccgatgatcgttccggtagactgtccgttgtggattcttgccgtagctactgcattctctgttatcttcgcaaaagaagtattcggtggtacaggtatgaacgtattcaacgttgcgttgattactcgtgcattcctgttcttcgcatacccgaccaagatgtccggtgatgctgtttgggtgtcaggagacagcatcttcggtttaggacaaagcgtagacggactcaccgttgccactccactgggacaggctgctacaacaggtagtgttcctgcgttcaacatggatatgattacaggtctgattccgggttctattggtgaaaccagcgtaatcgctatcctgattggtgccgttatcctgctttggacaggtgttgcaagctggaagacaatgatttccgtattcgtcggtggcgcattcatggcatgggtattcaactcaatcggcatggaaaacaacacaatggctcaaatgccttggtacgaacacctcgttctcggtggtttctgtttcggtgccgtatttatggctactgaccctgtgacttccgcacgtacagaaagaggtaaatatatctttggattcctgatcggtgtgatggctatcgttatccgcgtactgaatccgggttatccggaaggtatgatgcttgccatcctgctgatgaacatcttcgctccgctgattgactactgtgtagtacaaagcaatatcagccgtcgcgagaaacgcactatcaagtctaaccaataaataccgaaagaaaatgaatacgaatagtaatagttatactatcatttatgcttcggtaatggttattatcgtagcattcctgctggcattcgttagttcttcactgaaatctacacaagacaagaatgtgcagttggacactaagaaacaaatcctcgctgcattgaacattaagaatgtggaagatgcggatgctgaatatcagaaatatgtgaaaggggatatgctgatgaacgtagacggtacgctgaccgaaaatacgggcgaatttgctaccaactacgagaaagaagcaaaagaacaacaacgtctgcacgtgtttgtatgcgaagtggacggtcagactaaatatgtagttcctgtttacggtgccggtctttggggcgctatctggggatatgttgcactgaacgaagataaagataccgtttacggtacttacttctcacacgctagtgaaactccggggctgggtgctgaaattgcaaccgaccatttccaaaatgaatttgtaggtaagaagactttggaaaatggagctatcactttgggagtcgtaaaaaatggcaaggtagagaaacctgattaccaagtggatggtatctccggtggtacaatcacttcagtaggtgtagatgccatgttgaagtcttgcctgaatagttacttgagttttttaactaaataataaggaggagaaagatagaatatgggacaactgttttcaaagaaaaataaagaagtattctctgctccgctgggaattgataatccggtaaccgtacaggtgctcggtatctgttctgcacttgctgttactgcaaagctggagcctgccatcgtgatgggactttcagtaacggtgattactgcatttgccaacgttgttatttcactgttgcgtaagacgattcctaaccgcatccgcatcatcgttcagttggttgtggtagctgctttggtaactatcgtaagtgaaatcctgaaagcgtttgcttacgacgtaagcgtacagctctctgtttatgtaggtttgattatcaccaactgtatcttgatgggacgtctggaagcatttgccatgcagaacggtccttgggagtctttcttggatggtgtaggtaatggtttaggctatgccaagattctgattatcgttgctttcttccgcgaactgtttggctcgggaacattgcttggtttcaatatcctgaattatgaaccgattcaaaatatcggatacgtaaacaacggcttgatgttgatgccgccgatggcattgattatcgtagcatgcattatctggtatcaacgtgcacgtcataaagaattgcaagaacaaagtaattaattatttctgatttctgaattatgatttatgtctagctttatagtcatagtcgcatgataagtctgctgaatcataaattataaatcataaatcataaatcaaaaagaattatggaacatttattaagtttattcgtccgctctatctttgtggacaacatgatattcgcattcttcttgggtatgtgttcatacttggctgtttcgaagaatgtgaagactgccgtaggactgggtatcgccgtgactttcgtgttgctggtgacgcttccggtcaactacctgttgcaaactaaggtgctggctgccaatgctatcattgaaggtgtcgaccttagcttcttgagttttattcttttcattgccgtaattgccggtatcgtgcaattggtggagatggtggtagaacgcttcactccgtcactgtacgcttcgctgggtatcttcctgccgttgattgccgttaactgtgcgatcatgggtgcctctctgtttatgcaacaacgtatcaatctgggtccgagtgatccgaaatacattggtgatatctgggatgctctctcttacgcattgggctccggtatcggttggttgctggctatcgtaggtctggctgctatccgcgagaaaatggcttactctgacgtacctgctccattgaagggcttgggtatcacatttatcacagtaggtctgatggcaatcgcgtttatgtgtttctctggtttgaacatctaaaaagaaaggaataagacaatggatatgaatttaatattagcgagcattggggtattccttgtggttattctgttgcttgttgtaatcttgttggttgccaagaatttcttggtgccatcaggaaacgtaaaactgacaatcaacggcgaaaaggaattggaagtggcttccggttctactttgctcaatacgctgtctgtaaatgggatattcctgtcatctgcttgtggtggtaagggatcttgcggacagtgcaaatgccaagtactcgaaggaggcggcgaaatcctgccttctgaggttcctcacttcagtcgcaaacagcagcaagaccactggcgtctgggctgtcaggtgaaagtgaaaggcgatatgtcaatcaagattgacgaatctgtacttggcgtgaaagagtgggagtgcgaagtaatctccaacaagaacgtggctacatttatcaaagagttcatcgttgctctgcctaaaggcgaacacatggactttatcccgggttcttacgcacagattaagattcctaaattctcaatggactatgacaaggacattgacaagagcttgattggtgacgaatatttgcctgcatgggagaaattcggtttgctgggtctgaagtgtaagaacgacgaggaaacaatccgtgcttactctatggccaactatcctgccgaaggtgaccgtatcatgttgacagtacgtatcgctactccgccgttcaaaccgaaagaacaaggtcctggatttatggacgtaatgccgggtatcgcttcttcttatatctttaccctgaaaccgggtgacaaggtaataatgagtggtccttacggagacttccacccaatctttgattctaagaaggaaatgatgtggattggtggtggtgccggtatggctccgttgcgtgcgcaaatcatgcacttgaccaagacattgcatactactgaccgtaagatgtcttacttctacggtgcccgtgcgttgaacgaagtgttctatctggaagatttcctgcaaatcgaaaaggacttcccgaatttcactttccatttggctctcgaccgtccggaccctgctgctgatgctgcaggcgtgaagtacactccgggattcgttcacaacgtaatttacgaaacttacctgaagaatcacgaagctcctgaagatattgaatactacatgtgtggtcctggtccgatgtcgaaagctgttgagaagatgctcgacgatcttggcgttccggcacagaacctgatgttcgacaacttcggaggataattcgcagaagagaacaaaccggtcggaacaatgaccggaaaggttacataaacacagagcgggaaatctgaaaagcagtaatgcttcttcgatttcccgcttttttttactattatctcataatgtctttccgttatggtttgtatctattttatgtctgttttaaagatagttctccttttttgtccatacttatctattatattcgtatatttggctacacaatagaattattaaagtacaataggttatggaatatcatcgtatatcttttattcacaatgatacagagtattcatttgtcaaagctatgagttcaagtttaacgggatatgccttagttacagcttgtagggcagaagtaaccatttacatgaaagagaataatctgaaaggttattatatattgaccggcatggctaaagtttgattgtatttttatctccgtactctttcctttttgtatctttgcccccatgttagagaaaaatgaaattatacagtcggctctccgcaatttgaagattgaggagctgaatccgatgcaggaagcatcacttgaacaagctaccggaagaaaagacgttatactgttgtcaccgacaggatcgggcaagacattggcctatctgttacctttactccttactctaaaaccgaacgatgacagcgtgcaggttttgattctcgttccttcgcgtgagctggccttacagatagattctgtattcaaagcaatggggacttcctggaaaacctgctgttgttacggtgggcatcctatcgccgaagaaaagaaaagtatattgggcaatcatcctgctatcatcatcggtactccgggacgtatcaccgaccatctgtctaaaggaactttcaatcccgaaaccattgaaactttaattatcgacgagttcgacaaatcgttggagtttggtttccacgatgaaatggcagagattatcacccagcttccgggattaaaaaaacgtatgttgctttcagctaccgatgccgaagagattcccgaatttacaggattgaaccgcacagttaagttgaacttcctttcggacgattctgaagaacaagagtcgcgcttgaaattgatgaaggtgctttcaccttccaaagataagattgatactttatataacctgctttgtacattggggagcagttcgagcatcgtgttttgtaatcatcgggatgcggtggaccgtgtacatcagttattggcggataaaaaactactcgcagaacgttttcatggtggtatggaacagccggaccgtgaacgtgcgctttacaagttccgtaatggcagttgtcatgtattgatttctaccgatctggcagcccgtggactggatattccggaagtcggacatatcatccattatcatttgccggtcaatgaagaagcctttacgcaccgcaacggacgtacagcgcgttgggatgcgaccggaacgtcttatctgattcttcatgccgaagagaaacttccttcttatatcccggaagaaatggaaacagtggcgttgcctgaaaaccctccccggcctccgaaatcgctctgggctactatatatataggtaaaggaaagaaggagaaacttagtcggatcgatattgccggattcttatataaaaaaggaaatctgactcgcgaagatgtcggagcgattgatgtcaaagaacattatgctttcgttgccgttcgccgggctaaggtgaagcaactcctgaatctgattcaaggagagaaaataaaaggaatgaagactattattgaggaagcgaagtaaaactctttttttgtaatatagaactcttaaaatcctcttttattatgtacaatcgtccctatgttcactagtcattgagcatagggatgattacattatttccaaagatgttttacttttcacttcattttcctgttaatctaagctgaattcactgttgcagtttataaatattcatttttattgcattaatcttttgttttatcatcaatatctccggttctatttcaatctcgacttttatcccatacttgacatctatagataacaatatggtgtatatatcctgtataaaccaataaaaagaaaggaaaatctgctttaaaacagtatttttataaggaaagatttgtgcgatgggaataaattcgtaaattcgcaaggtcaaaagacaaaagtaacgaaattgttaaaccaaaaacaaacttcaaatgaaaaagcataatttcaatgcaggaccttccattcttccgcgtgaggtgatagaggatacagcgaaggctattttagatttcaacggctctggtctctctttgatggaaatcagccaccgtgccaaagacttccaacctgtggttgacgaagcagaggcattattcaaggaattactcaatattcccgaaggctattcggtactgttcctgggtggaggtgctagtatggagttctgcatggttccttataacttcctggaaaaaaaagctgcttacctgaacactggtgtgtgggctaagaaagcaatgaaagaagctaaagggtttggtgaagttgtagaagttgcttcctctgctgaagctacatatacttatatcccaaaagattacacaatcccgacagacgcagattattttcacatcactactaacaacacgatttacggtacagaattgaagaaagacctcgattctccggttccgatggttgccgatatgtcttctgatattttctcacgtccgatcgacgtttctaaatatatctgtatttatggtggtgcacaaaagaatctggctcctgcaggtgttacattcgttattgttaagaatgatgctgtaggtaaggtttctcgttacattccgtcaatgctgaattatcagacacacattgataatggttctatgttcaatactcctccggtagtgcccatctatgctgcattgctgaaccttcgttggatcaaagcacaaggtggtgtgaaagaaatggaacgtcgtgccattgaaaaagcggatatgttgtatgctgaaatcgaccgcaacaaaatgttcgtgggtactgctgccaaagaagaccgttcacgcatgaacatctgtttcgtgatggctcccgaatacaaagaccttgaagctgactttttgaagtttgccactgaaagaggtatggtaggtatcaaaggacatcgttctgtgggtggtttccgtgcatcttgctacaatgctttaccgaaagaaagcgtacaagctttgattgactgcatgcaggaatttgaaaaacttcattaatatattattttcaccacagattacacgaattagcacagattcctaaattctataatctgtgaaaatctgcgtaatctgtggtgagtctttataaatagaattaaattatgaaagtacttgtagctacagaaaaaccgtttgctaaagttgcagtagacggtatccgtaaagaaatagaagcagctggattcgagcttgctttacttgagaaatatacagataaggctcaattgctggatgcagtgaaagatgctaatgctatcattatccgtagtgatattattgatgcagaggtgcttgatgctgccaaagaattgaaaatcgtagtacgtgccggtgcgggatatgacaacgttgacctggctgctgccactgctcacaacgtatgtgtgatgaacactccgggacaaaactctaatgctgttgccgaacttgctttgggtatgatggtatatgctgtccgtaatttctataacggaacttccggtacagaattgatgggcaaaaaactgggtattcatgcttatggaaacgtaggtcgtaatgtagcccgtgttgccaaaggtttcggaatggaagtgtatgcttacgacgcattctgcccgaaagaagtaatcgaaaaagatggtgtgaaagcacttgattcggcagaagaactgtataagacttgtcaggtggtatctcttcatataccggcaactgccgaaacgaaaaattctatcaattatgctttgttgaaagatatgccgaaaggtgctatgttggtaaacactgcccgtaaggaagttatcaacgaagcagaactgattaaattgatggaagagcgtgcagacttcaaatatatcacagatattatgcctgttgctaacgcagaatttgcagagaaatttgccggacgttatttctcaactccaaagaagatgggtgctcaaactgctgaagcaaatatcaatgccggtattgctgccgctcaacaaattgtaggcttcctgaaagatggttgcgagaaatttagagtaaacaaataagattcttttagaaataagtagtatatttgagccacagattttcaataagtctgtggctttaattttttacatataaaatactaatatcatggcaataattaaacctttcaagggtattcgtcctccgcaagacctcgtagaacaggtcgcttcacgtccttatgatgtattgaattcagaagaagcccgcgcagaagcggaaggtaacgaaaagtctctttatcatattattaaaccggaaatagatttccctgtcggtacggacgaacacgatgaacaagtgtatgctaaagctgccgagaatttccaactgttccaggacaaaggttggttggtgcaggataataaggaaaattattatatctatgcccaaacgatgaacgggaaaacacaatacggattggtagttggcgcatacgttcccgattatatgaatgggattatcaaaaaacatgagcttacccgtcgtgacaaggaagaagaccgtatgaagcatgtccgtgtgaacaacgctaacattgagcctgttttctttgcttatccggataatgagaagttggatgttattatcaagaagtatacggcaagcaagcctgtttatgacttcatcgctccgggggatggttttggacatactttctggattgtcgatcaagatgaggatattgctaccattactgctgaatttgctaaaatgccggctctttatattgccgacggacatcaccgttctgccgctgctgcactggtgggagcagagaaagcaaagcaaaatccgaatcatcggggtgatgaagaatataattacttcatggctgtttgcttccctgcaaaccagctaaccatcatcgattataatcgtgtagtgaaagatctcaatggtttgactcccgagcaattcctggctgcacttgataaaaactttatagtagaagagaagggtgcggatatctataaaccatccggcttacataacttctcactctatctgggtggtaaatggtacagtctgacagccaagacaggtacatacaatgataacgaccctattggtgtgcttgatgttaccatttcttccaacctgattttggatgaagttttgggcataaaggatttgcgttcggacaagcgtattgattttgtgggcggcatccgtggattgggagaactcaagaaacgtgtggatagcggtgaaatgaaagtggctctggctctttatcccgtatctatgaaacaattgatggatattgcagatacaggtaatatcatgccaccgaagacaacttggtttgaacctaaacttcgttcggggttggtaattcataaattggattaggaaattctatcggatgatgcaaaaaagacgttgctgatgtaagctatatcaataaatgtaacacccgattaagataaaaaaatagtgacggtatatgcacgggatagtgacggtatccttgtggtataccgtcactatttttattggatagcgtcactatcttgtagatgaaaatctgccaacaaagatttttatattcccagctacatctcattggtaagtggaacattaatatttccaaacgatagattgacttttcttattaaagccgtatctttgcagcatgactgctgaagatacttataaaaccatcattgaaccttccgaaggtatttatacggaaaaacgaagcaagttcattgctatagcccttcctgtgcgtactctcgatgagataaaaatacatcttgaaacgtatcagaaaaagtattatgatgcacgacacgtatgttatgcctatatgttgggagctgcacgaaaggattttcgtgccaatgacaatggagaaccttccggaacagcgggaaaacccattctcggacagataaattcaaatgaactgacggatatcctgattatagtagtccgttattttggaggaatcaagttagggacaagcggattgatcgtggcttacaaggctgccgctgctgaagctattgctgccgctacaattatagaaaagacagtagatgaagacgtgacggtaatgtttgaatatcctttcatgaatgacgtgatgcgcattgtgaaagaggaggaaccggaaattctcaatcagtcgtatgacatggattgtagtatgacgttacgtattcgtcgttcgatgatgcctaaattgcgtgctcgtttggaaaaggtggagacagctcggattcttgatgaggagaatgtattgtaaataagatatttaaaatattgcatgagaaataaatatcatataattttcaatttgtttttaagcttctttgctttgataagcgttcagacgcaagcacaagcacaggagactcaaaagctcgctcctaataatatccctgttccgtggtattcgcagaaaatcacaggatgtccttactcgcattgctctctggcttcttcgttaatggtctttgactactttaaaggcatgacgactgatacacaacgtacagcccaggatgcagaaaagaaactgattgagtatcaacgtaactactttctgaaaaaacgtgcccctttccgtcgtcgtacatcgatagggcagggaggatactattcttttgaaattgattctttgacacgttattatgaaaatatgataagtgccgaacattttcagcagaaagattaccgggtattgaaagattatattgatcgtggtatacctgtgcttgtgaatgtgagatatacaggagcagttcgtggtttgcgtcccggtccgagagggcactggatggtgcttcgtggcattgacgataaacatgtgtgggtaaatgaccccggacgttcgccggagatgcggagtaaaggagaaaatatctgctatccaataaagaaacagccgggcaatccttcctattttgatggttgctggacgggacgatttatcatagtcactcctaaagaatggattcgaaattccctgtttgcacaagtaggcaagcttcctcctttggaggagataactcatatagtacctcctgttgcgttgcctgcaaccttaccgcaggttattaatcagtaagcaattcattgtgaagatagaaatattcttagtaaaattaggataaaaagaacattagtaaaataaagaagaacaaagatatatggcattcgaagcaaccaaaaaagaatggtgcgaactctattctttctttcgtctcttgacagacggaaaagtagtgctaggcacagcagatgcaaaggcgggagaaacatcttggcctattgcaatgattcaacgggaagaacatgatggaacacgtcaatattatattgaggaagatatgattcgtatagaagcagagagcggaactaaatccatgcctcgcgaagactttggtattgtagctgatttgatattgcgggctgtgaaatcttcttcggaagatgacgtaacctctccggaaggagtagaagagtttttagatgaagcagccattttcgatttggaagcaaaaacagaagatcgtactgatttctccattgcattttggcatccggaagctccgttgagaggttttaatgttcgttcacggttgggtgtaatgaatccgttactggacggaggacgtgctgcaaatctaaaactggaacagagtggagtcaaatttgccactcccacagtgaataaaatcaatgctttgcctgaatcccccaatgaggttgccgagcgaatgatgatgatcgaacgattgggcggtgtacttaaatattctgatgtagccgaccgggtattccgtagcaatcttctaatgattgacctgcattttccacgtgttttgacagaaatggttcgtattatgcatttggatggtatctctcgcattagcgagctgacggaagctatcaaacaaatgaatccgttaaagattaaagatgaactgataaacaagcacaagttttatgagtttaagatgaagcagttcttgatggcattagctttaggtatgcgtcccgcaaagatttataatggattggattcggctgtggaaggtattctgttggtgggcggaagtggagaggtgctctgttatcataaatcagaaaagcaagtaatggaagactttttgtttcaaaatacccgtttggaaaaaggatctttggagaaggataaatacggatttttggagagagagaatggagtctattatttcaaactgaatgcaaagattgggctagttaaaaggtaaatgataaattagaattctgtggtgaaattttgattcgatatatataaaaaacttgttattcatgaaaacgaatgaagttttagagaacattaaagcacgtcgtagtgtacgggtttatactagtcagcaagtttcagaagaagatttgcaggctattctggaagctgcaacttatgcacccagtggaatgcatttggaaacatggcactttactgctattcaaaatgtagataaattgacagagctgaatgagcgcattaaaggagcttttgcaaaaagtgacgattcccgtttgcaagagcgtgggcatagcaagacctattgttgttattatcatgctccgactttggtgattgtatccaatgaaccgacacaatggtgggctggaatggattgcgcttgtgcaatagaaaatatgtttctggctgcccattctttaggaatcggctcttgctggatcaatcagttgggcacaacgtgtgatgatcctgaagtgcgtgaatatattacctctttaggtgttcctgccaatcataaggtctatggttgcgtagctttggggtatgctgattcgaagattccaatgaaagagaaaaaggtgaaagctgatacggtaacaattgtcaagtagaaaaaatattcagaattgtagttggattaacattccatatcacgaaatatgagccttggggatatttgatgcatccccagggcttttgtttattcagtcttgggctgataaaaataatcccggggcttacattcattgagccccgggattatttcttattgagatgcttctaaaaatcttttctaatgaattgatttctacaataaatcacctttattcaaaagtgccataacgagttggtagtaacttacggtcgcccaatgtattatctacacgagctacattgatccagaatttgttatcacgtacactttctatcggataagccgctttctcgcgtgtgtacgaatgttcccaacgatcactaacaatctcgtattccggatgcggagcattaatcaacacattatcatccttatcagcttcgccattcttcacttcctgaatctccttccagatattcagcatgacatctacgaaattgtccagttctgccaaactctcgctttctgtcggttcaatcatcaaggtaccgtgaacagggaaggagagggtaggagcatgataaccatagtccatcaaacgtttggcaatatcattttccgagatgcctgcttcttcatgtactttcctacactccagaatcatctcatgtcctacgaaaccattggctccccgatagacaactccatacgtatctttcagacaagcagccagataattagcattcaggatggcgattttagttgcctgcgtcaatccctctgcacccatcatgcggatatatccatacgtgataggcaaaatacctgcactaccgaatggggcagctgatacttgattctgcgaattgccgaagattccatgtccgggaaggaaaggaaccagatgttcggccacacagataggacctactcccggacctccgccaccatgaggggaagcgaatgttttatgaagattcaagtggcagacatccgcaccgatgaatcccggattggtcaatcccacttgggcattcatattggctccatccatatatacttgtgcgccacaggcatgaatgatgtcgcaaatttcctttatttctgtttcgaagataccatgtgtagaaggataagtaatcatcagcgctgccaattcatctctattttcttcagccttggcacgtaggtcatccatttctacatttccttgttcgtcacaggcacaggtgacggtcacaaatccagcctgtatagctgacgcaggatttgttccgtgagccgaagctggaatcaggactttgttccgatgtccctgaccgatactttcgagataagcacggattacacgaagccctgcatattctcccgcagcacccgaattgggttgcagactcacccctgcaaatccggtgataactttcagatcttcacttagattcttaattaattcccgatatccctctgcctgatcttccggaaccagcgggtgcatacccataaattcgggacgacttaaaggcaacatttccgcagctgcattcagcttcatggtgcatgaaccgagagaaatcatcgattgtgcaagagaaatatctttgcgatccaaacgtttgatataacgcatcatctctgtttccgtgtgatatttgctgaatacttcgtgcgtcaggaaaggagttgtccgtttcaaagccttgtcgatattgcttttttccgggatatcgtctaccttctgatagtcttttccggcagcgatggcaaagatagagagcaatacattggcagctgccacatctgttgtttcatcaatactgaaaccgacatcaccattttcataataacgcagatttacttctttactaagcgctatggtacggatttgttgtgccgaaacgtgttcgggcaactcaaaacgtaaggtatcaaaatattgaacgttgacttgtgtgtatccacatttcttcagttgcttttcaagaaatacagtgatactgtggatgcgcgacgcaattgtagtgataccctcctgaccgtgataaacagcgtaaaagcctgccatggtagctaataatgcttgtgcggtacaaatgtttgaagttgctttttcccgcttgatatgctgttcacgtgtctgcaaagccatccgatagcaaagtttgccatatttatctttagaccatccgatgattcgtcccggcatattccgtttgtattcgtctctggtagcaaagaaagcagccgacggaccaccatagaacattggagtacctaaacgttgtgtggttccgaatacaatatctgctccccattctcccggaggagtcagcagggcaagacttaaaatatcggcggcgacagctaccttgcaatctgcggcatgagctttttctgtaaattcggaataatcctctgcgtttccattcgagtttggatattgtagaacgcaggcaaacacttccggtgaaggttcaaaatccttatatttacctacacgcagttcgatgccttgcggcacggcgcgtgtagtcataacagccaatgtttgtgggaaaatattctcgtctacaaaaactacgttcgcattggctttctgttgcgcacgggaacgtatggcatacatcatgctcacggcttcggcagcggcagttgcttcgtccagaagtgaacagttggcaagtggcatggcagtaaggtcgcacacggctgtctggaaattcatcaacgcttccagacgtccttgcgacacttctgtctgataaggagtgtaagaagtgtaccataccgggttttcgaatacattccgctggataacagccggggtaatcgtgttgtaccatcccaaaccgatatacgtagtatatagtttatttttatttgccagttcggcgatatgttttccaaattcgtattccgtcagcggactagtcaatgccagcggctcttttagccgtatattggcgggaattgttttatcaatcagttcgtccagtgagttcacgccaattttgcggagcatgatggcagtatcttgttcattgatgccgatgtgacggctagctaacaaatcggttttcatgtcttaatgatttatgatttatgatttatgaattatgagttctgatttatgctttcttatgttttcccgatttataaacctcaatcagccgcaacacctacttcatccgcacggcaaatcataaatcataaatcagaattcataactcattaaatcttctcttatctaaaaaatgggttttcagctttctccattccgatcgtcgtaggagcaccgtgtccggggtaaacgacagtttcgttggggagaacaaacagacggctgcaaatgtgctctatcagttcatcgaagttgcctcctgtgagatcggcacgaccgatgctaccctgaaacaggacatcgccggagaacatgcagttgtcttccttgcaatagtacaccaagctaccgggtgaatgtccgggcacgtgtatcgcttccagtttggtatgtccgaaagtgataatatctccgtcatgcaggtatttgcccagtggtacaggctcttcctgcaactgaaaaccaaacattctgctttgtttcggtgcttcgtcaatccagtactcatccgctttgtttgcttctgccgataatccgaattctttcagcatgaacggatttccgaagatatgatccaggtgcagatgagtattcagcaaatgctttacattcagctcattggtaagaatgaactttttcagagcctgcttttcctcttcataaaaacagccgggatcgattacgactgcttctttagtgtcgtcccataatacgtagcagtttacgggaaacatattaaattcaaatctctttattttcatggtttctttatgatttatcatctatcagaacatatagtcttgtttaaatcggaacatataccacttttttggtttgaaagaactcttcttcgaaactatcgctcaagttatgaatgaccgttttatgcttgaacggcatcgtttcatgctccagttcgccacctttgagacagatcaatccgttgggtaatgcattctgttgttttgaagagatattctttttgataatcttaatcaaatccgccaaaggcattacggcacggctgacaacaaagtcgaacgttcgtttctcctcttctgcgcgggcatgacggaatgttacatttttcaatccgatagcgtttgccacttcggttgctacccgtacttttttgccgatactgtccacgaggtgaaatgttacttcgggaaataagatggctaaaggaataccggggaaacctcctcctgtacccaggtccataatgctggttccggggcgaaattggattgttttggcaatgcctaacgaatggagcacgtgatgctcatataaattctcgatgtccttgcgggagattacgttgattttagaattccagtcaatgtagaggtcgtatagagctgcaaactgtttgcgctgctcttccgtcagatcaggaaaatatttcagtatgatttccactgtttgagttttgagttataagttttgaatgatagatgtggatgaatatcctattctgtcacacgggagtgataacaataggatattcattggtgttcagctttttatgaaatttaatttttcagttctcccagaattgggttactgcctagtaaatgctccatcatagaaaatgggattgttacctttacaggtcccatagaataaggagtgatatcgtatacattataatagaaggtgattccttctttgcttagatagaaattttctgtcggagcgatgtccccggtggaagcatatcccatgtcttccaatgcttcgtgagtgttcactttgttgtccgccatgagctggttccagatcaggtcggtcaatgcgtctttgtagtctccgacaaaaatatcatcaagtcggagcggacgcatcagggtgaggtccatgttcaggaaagtagccatgtaaatgccatgtgcacctccggtatattcgttgtagtcgatacgatatacaagcaggtctttatcatacagttgtacgtggctctctatacctttataataagaataccaagcaccgatggaagattcgtcttctttgtctttctcgtcctcggcatacatcggttcgaggtcgcggcggtattcgctgatatagttctcggtatattgctttacaacttcttccggcttttcgccgatgtatttatcaccgaagcaggccgaaatgaaataagaattcaaactgtctttcagcatatcatccgatgattttaccggataagcaaaatttataatgatattgcaggccggtttggctgtatcattgaagaggtgtgctgtctcattcacttgaatgctatcaaactgtaacgcacctgtgtttttgttcatcttgtcatgacaagaaaacaaaaagccgctaaccgaaagaataattgcaagcagactgacatattgttttttcatacccgttttttctataaattcaacatttgttttatcattcactattgacaaatatagatgaaattcgtgaatcgggctaataaaaacagaaaaatttgcagctatttatcctctaaaacaggattaccggataccatccactcgtcaatgcttgcaaactttagtgatatctacggtgaatccatcttcagcaggcataaatttccctttcattttcagaaattcgatgagggtatctacgtccatttagaaactgtaacatatgtgacaaaactgcatattattcattggaagttaaaaacaaccatttcgctatgcgttcctattctgaaaggcgacccccaaagagacaatccggaagacacgtacacgtggctgtttccccattgacggtagccgtgactttgctcgaatatataatcagtcacccaattaataggccatacttgtccgtgatgtgtatgtccgctgaattgcaagtcgatgccggccgcttctgtttctttcaggttgaagggttgatgatccagcaagatgataggtttgcttttatcaacattcgccatcagttcttgcagggaacggcgtttgcggttgtgatggtcatcgcggcctatcagctgtatgccgttggggagtgtcactactgaatcacgcaaaagttgtatttgagtattctttatataccggatactttcatcgattccactaatgtattcgtgattaccaagaaccatgtagatgcccataggagctttcaactcggccagttcttccgccatattctctgtataaagaggtacaacactgttatcaatcaagtcgccactaatcagtatcaagtcgggatgctgtgcatttatcatttccacatacttcttcagtgaggcttttcctgtgccgtttcccagatgaacatcgcttatcgcgacgattttaactgcgtgagaagtatcttcattttgtttattagttaaaatactgacaacattagtttccggatgataatagttgtacaccccatatcccagcaatcccaacgtgaacacaaaagatagataaaaccgatatttgcagaccaccttgaataatttcaatatatcaaacaatagcaggaataatgccatgtatagggtaaatatcagccaactagttccaatgatgtacatcgaatgggagataaaaacaggcatttccaggttacgggctaacatcgtgccgaagaaagatagggcacatgtccaaaataaaacagttaagagtatttttactccaagcggttttactttcagagcctgcgtcgctctgataaatatataggtattccctgccagataaaaagtaataatgaggagtagatatgtaagcatagcgtttacttaaaaaaacagtgaatttatttgtggcaaagataggttttattgttgagtaaaaagagttaatagtgctgatatgaccctaaaatagccaaataatgaacgggaaatatgtctgcaatgaattggtattcaatatactggtgatggaatacgaggttatggggagaataaccggtaagaaatgcacgtaaatctaccgttttgaatgatgattgaatcttaattacgaaaatagataggaaaatctgtttttattcttatctttgtcctctgaaatgaaaagactagcctacataacagcactaatcctttctcttctgattatctattcaggaggcggagtctctattgtgcgttattgctgtgcccgttgtgagacagtgcagagctgctgtgatacaggctgtccgaagtgtaaaaagtctcatacttgcgattcaaagaaaaactgcaaagaaaaaggttgtacggctacgatttataagctcgacctgatgaaacactctaccgaactgaccgtatcagttttggcagtcgatcttttatgtgagcatttctgctatctgttgactccgacctatgcggataaaccggtagaatttgatagtctgacctctccgccacctctctgctcgaggcagatgctggcgttatattccacttacattatttagccactatttctttcttatttaatcctttgctttcaatagaacatgaaagtaaagcaacactgaatgcaactaagttgcatgagaaatgaattaattttgtatctcgaaagtaactttagaaagaatgaaatatatgataataggactgttcctgttatttgccggcaatatatatgcgcaagta

SEQ ID NO: 8236 - DNA, 8136 bp, Unknown
  gut microbiota DNA sequence
gacatttgtggttatcttcattattgctgcgctgtcgttcttcccggtacatgcattgagtacaattgctgaacatttaagtttgtaatactgaattagagaagatatgaaagataataaatcagcttctttgtttccaaaggagcaagttatagaaagtttgaaacagtcattcgtgaaactgaacccgcggatgatgataaagaacccgattatgtttacagtagaagtggctacagtggttatgctactcgtaacgctctactccattgtaaattcttcacaaggttcgtttgcttacaatattgctgtgtttatcattctgtttgtaaccttgttgtttgccaattttgccgaagctattgccgaagcgcgtggtaaagcacaggccgacagcttgcgtaagactcgtgaagagacaccggcaaagaaagtggaaggcaataaaattgttaccgtcagttcttcactgttgaagaaaggagatgtgtttgtttgtgaggccggagacgtaattccttccgatggtgagattattgaaggcttggcttctattgatgaaagtgctatcaccggcgagtctgctccggttattcgtgaggcaggtggcgacaagagttccgtaacgggtggcacgaaggtattgtccgatcatataaaagtactggtgactactcaaccgggagaaagtttccttgataagatgattgcattggtggaaggtgcttcccgtcagaaaaccccgaatgagattgcgttgactattctgctggcaggttttacgcttgttttcgtcatagtgtgtgttaccttgaaaccgtttgccgactatagtcatacggtcatcaccattgcttcgcttatttctttatttgtgtgtctgattccgacaactatcggtggacttctctctgccatcggtattgccggtatggaccgcgcgctccgtgccaacgtgattactaaatccggtaaagcagtagagactgctggtgatattgatacgttgttgctggataaaacgggtactatcaccatcggtaaccgtaaagcaactcatttccatacggctccgggtgtcaatttgcacgattttgtagagacttgtctattgtcttccttgtccgatgaaacgccggaaggtaagtctatcgtagaactgggacgcgagtcgggcatccgtatgcgtaacctgaatacaacgggagcacgaatgattaagtttacggctgaaaccaaatgttcgggagtagacctggcagatggaactcaaattcgtaaaggtgctttcgacgctatccgtaagatggtggaaggtgcaggaaatgaattcccaaaagaagtggaagaggtcatctcttctatctccagtaatggtggtacgccgttggtagtatgtgtaaacaagaaagtgaccggtgtcattgagttgcaggatattatcaaaccgggtattcaggaacgtttcgaacgtctgcgtaagatgggagtgaagacggtcatggtgacaggagataacccattaactgcaaaatatattgccgaaaaagccggtgtggatgattttatcgctgaagctaaaccggaagataagatggaatatatcaagaaggaacagcaggctggtaaattggttgcaatgatgggagacggaacgaacgatgctcctgctctggcacaagccaatgtaggtgtagccatgaatagtggtacacaggctgcgaaggaagccggtaatatggtcgatctggataacgatccgacgaaactgatcgagattgtggaaatcggtaaacaattgctgatgacacgcggcactctgaccactttctctatcgccaatgacgtagcgaagtattttgcgatcgttccggccttgtttatgattgctattcctgaactggcagctctgaatatcatgcatctgcatagtcctgaaagcgccattctttcagcggtcatttttaatgcgattattattccgattctgattccgctggctttgcgtggcgtgcaatacaaaccgataggtgcaagtgctttacttcgccgtaatctgttgatctatggtttgggtggtgtgattgttccttttgtgggaatcaagttgatagatttattggtaggtttattcttttaattaaaaaacaatagcaatgaaaactttattgaagtcattaaaaataacacttgctttttgtgtctttttctccgtgttctatatccttatcttgtggttgtttgcgcaggttgcaggtcctaataagggaaatgccgaggtagctacgctggatgggaaagtagtgggagcagctaatgtgggccagatgtttacaaaagatatttatttctggggacgcccgtcttctgccggtgacggatatgatgctacgagttctgcaggtagtaataaaggtcctacgaatcaggaatatctggatgaagtgaaagcgcgtattgatactttccttgtacatcatccttatttagaccgtgcggatgtgcctgccgaaatggttacagccagtgcttcggggctagatcctgatattactccccaatgtgcatacgtacaagtgaagagagtggcacaagcacgcggattaacagaagaacaagtaagagcgattgttgataaaagcatcgaaaaaccgttcctgggattgttgggaacagaaaaggtgaatgtgctgaaattgaatatagctcttgaagaaagtaataagtagatgaagatcaggagcagcgttcctgtccgaatcgtttgggtgataccagcggttcaaataaacagggggggatggggcgctgcttttttacaggaacataaaatagaattagataagaagtatgaaaagtttttttagtaaaaagagtattttaggaacaatggctgtagcggccgtatgtatgttgggaactggcaatgcacaagcacaagagtttactatacaaggtgatttggtaagttcgtatgtatggcgtggtatttatcaggggggggccgcttcttttcaaccgactttgggagttagcgtaggtaatttctcacttactgcatggggatcaaccagtttgagtgagagtaataaagaaattgacctcactgcagcttataagtttggtgaagcaggaccgacactttcagtagccagtctttggtggaacggacaagctgatgtagtcaatggagaactaacaaatgattatttccattttaagagtggcgacaccggacatcattttgaagcaggattagcttatacgcttcctgttgaaaaattcccgttgtctattgcatggtataccatgtttgccggtgctgacaggaagatgactgacaagggggaagaaaaacaggcatattcttcttacgtagaactgaattatccgttcagcgtaaaaggggtagacttgaatgctacctgtggagtggttccttatgaaactccgcagtataatgtgaatggttttgcagtgacgaaccttgctttgaaagcaacgaaagctatcaattttaatgataagttttcattgcctatatttgtgcaagctatatggaatccgcgtttggaggatgcccatctagtatttggcgtaactttaaggccataaaataaactcatgaatttttgtgaacccgtggtgatcgtgatgattgctacgggttaggatgtttaaaataacagagcaacataatggatgatagagaacaaagtgtacagcattttctggatctgataaagagatctcagcgaggtaagtttaaggtctatatcggtatgatagccggtgtgggaaagtcatatcgtatgcttcaggaggcacatgaactgttggaaaatggtgtggacgtgaaaatcggctatatcgagactcatggacgtgtcgggacggaagggatgctagaaggacttcctgtcattccgcgacgtaaaatcttctataagggaaaggaattggaagaaatggatttagattctattattcgccttcatcccgaaattgtgatagtggatgaattggcacataccaatgtggaaggaagtctgaatgagaaacgttggcaagatgtaatgacattgttggatgaaggaatcaatgtgatttcggcaatcaatattcagcacatcgaaagcgtgaatgaagaagtgcaggagattacggggattgaagtgaaagaacgggtgcccgacagtgtgcttcaggaagcggatgaggtggtgaatattgacttgacggcagaagaactgattgcccgtttgaaagcgggaaagatctatcgtccggaaaagattcagacagcattggataatttctttagaaccgagaatattcttcaattgcgtgagttggctctgaaggaagtggcgttgcgggtagaaaaaaaggtggagaatgaagtgatgatgggagtagccgtcggacttcggcatgagaagtttatggcttgtatcagtagtcacgagaaaacaccccggcgaattatcagaaaggcggcaaagttggcaacccggtataatacaacttttatagctttgtatgttcagactccgaaagagagtatggatcgaattgatttggccagtcaacggtatttgttgaatcattttaaactggtggcggaacttgggggagaagttgtccaggtgcagtcgaaagacattttggggagcatcgtcaaggtttgtaaagagaaacagatatcgacagtgtgtatgggaactcctaatttgaggctgccatacgctatttgttctatactgggatatagaaagtttttaaataatttgtcgcaagctaatgtagatttgattatacttgcataatattaatcgtatgaacgttatgaatattaaaacgaaactgattcttggcattgggatgttggcaggaatgattattttgttggtaacactttcagtagtgaatcttcaaactctgactgcgacagagcctgatagtcctgctgctatgcctgccttggaacgtgcattgctatggatctccataacagggggaatctgtatcttgaccggactgatattgctttattggttgcctcgttctatcagcaagccgattaaggagctgaaagaaggaattcttgaaatagccaatcataactatgagaagcgtctcgacatgagtgacaatgaagagttccgtgaagtggctgacagtttcaaccggatggcggagcgtttgactgaatatcgtgccagtactttgtcggatattctttctgctaaaaagtttatagaagctattgttaacagtattaacgacccgattatcggtctgaatacagaacgtgaggttttgtttatcaatgatgaagccttaagtattctgaatatgaaacgggagaatgtgattcgtaaatcggcagaggaactttctttgaagaatgacctgctccgccgactaattcgtgagttggtgacgccaagcgatcagaaagaggctttaaaaatttatgcggataataaggaaagttattttaaggtctcttatgtcccgattattaatacggaggctgaaaaaggggaacctcacaaactgggtgatgtcattttacttaagaatatcacggaattcaaagaactggattctgccaagactacatttatttcaacgatctctcatgaattgaaaactccgattgctgctattatgatgagtctacaactgcttgaggataagcgtgtcggtgcgctgaatgatgagcaggaacagctttcaaagagtatcaaggagaatagcgaacgtttgttaagtatcaccggagaattgcttaacatgacgcaggtggaagctggtaaattacagttgatgccgaagatcaccaaaccgattgaattgattgagtatgcgatcaaagctaatcaggtgcaagcggataagtttaatattcagatagaagtggagtatccggaggagaaaatcggtaaactgtttgtcgacagcgagaagattgcttgggtattgacgaatctgttaagtaacgctattcgttattcaaaagaaaacgggcatgtggttattggtgccaaacaggatgaaaactggattgaattgtatgtccaggactttggcaaaggcattgatccgcgttatcacaaaagtatcttcgaccgttatttccgtgtacccggaacgaaagtgcaaggcagtggtttgggattatctatttccaaggattttgtggaagctcatggcggtatgctgacggtagagagcgaattgggtaaggggagtcggtttgtgatgcggttgaaggcatagttttgaaggagtctatgaaagaattgggttattgctatctacttcctatgttgttttaattctttgttgaattgaatactataacagcaaaaaaacgcgactctgttctgaaactttagagaatcaatgtattatagtctctctaaaaatctttatatttgcagaccgtttggaaacgatagtgaataataaacaatacaataacttaaaaacaaccaaaatcagatgaagcaggatatgattgttatccttgacttgggtagtcatgagaatacggtgttggctcgcgccatccgtgcgttaggagtttatagtgagatttatcctcacgatatcacagtggaagaactgaaagcattgcccaatgtaaagggtattattattaatggtggaccgaataatgtaattgatggcgttgccattgatgtaaatccggctatctatactttggggattcctgtcatggctgcaggtcacgataaagcaacttgtgaagtgaagttggcagaatttgcggatgatattgaggctataaaggcggcagtgaaatcatttgttttcgatgtttgtaaagctgaagctaactggaacatgaagaactttgtcaatgatcagatagagttgattaagcgtcaggtgggcgataagaaagtattgttggctctgtcgggtggagttgatagttctgtggtagcagcgttacttctgaaggcaattggtaacaatctggtttgcgtacatgttaatcatggtttgatgcgtaagggagagtcagaagatgtggttgaggtattcagcaaccagttgaaagcaaatcttatttatgtagatgtaaccgatcgtttcctgaataaactggcaggtgtggaagatccggaacagaaacgtaaaattattggtggtgagtttattcgtgtgttcgaagaagaagcacgtaagctgaatggtattgacttcttggggcaagggactatttatccggatattgtggaaagtggaacgaaaactgctaaaatggtgaagtctcaccataatgtaggtgggctgcctgaagaccttaagttcgagcttgtagagccgttgcgccaattatttaaagatgaagttcgtgcttgtggcttggagttgggattgccttatgagatggtttaccgtcaacctttccctggtccaggtttgggcgtacgttgtttaggtgctataacgcgtgaccgtttggaggctgtacgtgagtccgatgctattttgcgtgaagagtttcagattgccggattggataaaaaggtatggcaatactttacagtagtacccgattttaaatctgttggtgtacgtgataatgcccgttcttttgattggccggtgattattcgcgctgtcaatacggtagatgctatgacggctactatcgaaccgatagaatggcctatcctgatgaagataacagaccgtatcctgaaagaagtgaagaatgtaaatcgcgtttgttatgatatgtctccgaaacctaatgcgactatagaatgggaatagagagactttttaagtgatatttcgatagcctcaattttttgtaagttgaggctatttttttatatgttgaaccttgccacattgaatttgacggatgtttaatctgattgatatatgatttgcgttggtgtaaaccatagtgtaaaccgccaccaattgatgtataaaagaaaaaggcacccaagagtggaagcctctcaaatgccttattcttatcaagtagcgggacccgggattgaaccggggacctcatgattatgaatcatgcgctctaaccagctgagctatcccgccatcgtttctcgattgcgggtg

SEQ ID NO: 8237 - DNA, 9936 bp, Unknown
  gut microbiota DNA sequence
aaataaatcttctcatcatacttacgttcaccatgctggacgatataggttccgtcggccatcgcttcaaaagaaggaaatccgtctttgtcaaatgtcggagtctccggccaaaaccagttgcctgccgcaaagtattcctttgccctgttggctgtacgggtaaatccgtacatattgtgtccgaaagcattctcaaactgatgccaacgaagcaaatcgaaatagcgtagattttcccatgcaaactccacacgacgctcacgacggagcactttgcgcaatgctgtctgatcggttgtcgtgatggacggatagtcgttggtttgtgtacgggtggtgccataagcacgggcacggacatcgttgatgcaagcaaggacagtagcgtcaatctctcccagttcaatcttagcttcggcatacatcaacaaaacatcggcataacgcatgagaataacggggttgtcgttatacaaagtagtacgccatgattcttgcgcgcctttgcgcaggcaacaaccattgtaagcacagttggaagcatccgaaccgcctttggaatctttgtttgtaatcatacgattttgcgtatagtccattacttcgagtgcgtttggcgcaggattccactcaataccatagatacggctgccgggagcagcaaatgtttccaggcaacggggatcgcggttggcaaatggatcgtgaggatcaaaaccgctgcccggttcatcaatcgtcttgccattcgtcatttcgtagacagcaagaagttcccacgaaggttgtgcgttatgtgtaccgcctgccgaacgggcaataaaggaaccgatagcctgtgtagtaggtttaccgttttcatccaactcaaggtcgcttgagtgagcaacagagaagataacttctttgcttcctcttgttttgtcgcggaaaagttctccataatcaggggccaagtcatatacttccagatctatacagtcttgcgcagcctttgcggcagtcccgtagtcgtgttgatagagagcggtacgagccttgtaagcataagccgttcctttgtccacacgggtggcgccgctattattatttgcggccggcaaattttctgcggcatagtcataatcgtcataaatttgtttcagaacgacagctttgtcggtacgccccatctcaaatgcttcctccggagtaatcgaagtcacgtagaaaggaacatctccccaaagagtaatcaaacgtgaataagcaaacgctctgaaaaaacgggcttcggcacgaagcgtattcagttcagtagtggaatatttgccttcaagtttgtcgagtgcctccaaaattcggttggcacgactaatgttcttgtacgtgtaactccaaacagtcttgatgttaggattacttgtagaagacgcattcagtgaacctgccgcaatggtataaatgttggttcgttgtgcccagtcatccgtattacggtccagcgtccaaccttcttctataacaaagaaggtactgcgataaaaatcgttcaacgagattcgaacttcctccggtgacgagaaccaattttcactggatgcggctgaaggaggattcagatcgaggttcacacaagaagttacagatagaagagctatcatgcaaatcaatacatgtatttttttcatattatgtaattttttcatactccattagaatttgatatccactccaaatgtataagtgcgtgtgatataggtagaagcgcctgcttcagggtcccatcccgaaagataactatcaaagcagtatggatcatcgatattgacgtacacccgaagtcccttgattccgactttagagacgatttttttaggaactgtatagccaacgttgatattctttatacgcatataggcactactcttgagccagtaatccgacattttgtagttgttgtattcaccgccctgatgactcaaacggggatagctggctgccgcgttctgctctgcagtgttatatacactccaataattacggctgccattgtcgttcagaaggactgacggagccggaagccattgtccctgcatggggcgaatcatactctcggtgaggcgtgaaagttgtttcccgacaccattgaagagtaaggagaaagagagacctttccagcccaaactaatagaacctccatatagatagtgtggcaatgagctgccaagcactacgcggtcgtatgtctcattgataattccatcaggagtgccgtccggaccgctgacatctacatatttcacatcacccggtttggtagaagccgaaagcagagcgctttcactgacttcctctgcggtctggaacaaacctgcagttttatatccgtaccaggagttatattctgcaccttcagtaataatggtaccatcgctgttaaactgctgcttgccgttaagattatctattatagacttgtaatcagagatattaaaacttaccgcataatttacatctccgatacggtcagaccagccgagtttcacttcccaaccgcgggtatgcattttacctacattcctgtcaggtgccgaataacctgtaaacgacgggattgccactgacaagagcatatctgttgtcttcttataataatagtctgcgctaaagtcaagacgattgttaaagaaagcggcatccacacctatatcccagctctgtgttttctcccaatggatattctcatacgcataatcctgttgagcggcagacatcgaagattggggcgtagaacctgcactgtcatacataatggcattattgaacgaaatgtatgtctgataaggataatttccaatccgctcgttaccgagcgtaccgatagaggcacggaacttcagatagtttatcggggttatgttttgcatgaacttctcgttagagatgacccaccccaccgatgcggacgggaagaatccccaacggtgatccttatgaaaacgtgaagatccgtcttcacgagcattgagctggaggtagtaacggctgtcgtaattatacatgacacggccaaaaaatgaacggtatgcattctgataagaattgccggctacggcaagagcattcttgttcgccaaatcaagataagggaaagaagacaaagacatatcgttggtcgatcccgacatcgtttcatacgtataactataatcttcataaccgaccatggcattgaagttatgtaccttgctaaaggtcttgtcgtatgtagcgatgaattgtttctccaatgatttgatgttacggcgttcttcacttaacgaattggaagtatatcccgaaacatatcccagcataacatcggtttcgtatgcatcgtaaacaggtatggctttcttcatctccttgatcgaaacagttccgacggtaggagtcagattggcagtaagggtcaaatcttttatgggcttatagctcaacgagaatttaccggtcattgtgttggatacggtcttcttctctccgccttccaataaggcggcaagcgtattgctaagactgccgtctttaccgggaccaacacggccatccggataaagtcccaaataaatggaaggatacatataagctgcacgaatcggactaccggaagtcgggtcatttttcgtggcataacgtaccgagaaatcgatagaaccggagagtttatcgctaatcttcagattattacgcgaacggatagagattctttcgtggtttgaacctttatagatagcgtcggcattttcgtaggtagcggaagtgtggctcttgattaccttgttgccatacgtcatggttaagttatgcttatggcgcatagcggtattcgaaagaatagcgtctttccaatcatagataggatattgaatgggatcatacctgttgttggtagcatagttgtcgatatagtcctgtgaatagttggcaaactcgcctcccgcaggattaccggcatcgttccacgaccattcattgtacattgtcatgtagtgataagggtctgtcaggaatttcggaaattcggtaggagaagacaacgaaatctctccgttataaccgatcgaaagctgtccctcggttgcctccttagtcgttatcaagataacaccggcagcagcacgggcaccatagatggatgcagaagctgcatctttaagtacagtaatctgctgtacgtcttcgcttgctatattgtcgaggctactgaccatcataccatcgacaaggataagcggactcgaatcagacattgttgtcacaccacgcacctgaaccgtagcactcgctcccggcatactgctcgaacgggtaaccgtcagtcccggaatcagtccttgcaaagattgtgaaagttgagacgtgctctgtttctcgataagcgaactgttgattacaccgaccgcacctgtaagatctttcttttttacagatccatagccgataacaactgtctcttcaagttgtacagcatcctctttaagttttatatttactacacttttaccatcccataccacagtctcggtcacataaccaagataacggaattctattgtatggcctgattcagcgccattgagcgcatactttcccgacatatcggaggtagtaccttttgcattgtctttatcgtggatcaccactccgacaagaggaccattggcatcgctaacgacacccttcattacattctgtgcaaaagccagattgatttgcaggaaacatgccaataacaggcttaatatactttttttcatactctttattctacgatttcaagcaatacatgttcgttatactctttgattgcctcacctgtttcagggttactcggatgttgcgctgaaaaacgtgtttggccacttgcgtgtgtgcagtcgatatacttgccagaatatttggcaccactaagacataaacggcctgcctgtccaaaccgtaacacaatctcatccatatccttagtcgtggtaaatattccttcggcagggatatatgcgccattgtttttttcatcgagcaacattcccgcaaagttgtaggtaatagttgccgaataattgataggtgcacccgacagtgtctctgtcgcactttcctgaagagtcgaagtcggaagagccggtttccattcttctccatccttgaactcgatcatccagtagttggaacacatcgttcctaatttggtcacaaaatagaagtgtatcttggtaccggcaggaatggtcgtacctttcatatccccatagacataccaataatcacccggaatagctcctgatacatacgggtcaccattagcacccacggcacggctgcatacgactttctgctctacataacctgtccggtcacatgcccaatactcaatcttaccacttccggcactcggagcaatatacttgccattggttcccgggaataccgattgtgcctcatcatcagcaaatgttccacttgtgttggcagttaaactattcaagtcccaatcagccaaaatgcccgagaaagcatcttgtacaagagtataggtatagtctgtatcatcctggatggttaccgttactttaattgtccttttggtaaatgtcttgttctccgggaaagtaagtttaatatcacattcgcctaccccatttgcaggagaaacggtcacatccgcatctgtacacacagccttccactctttatctccaaagactttgaacgaagattctgttgtagttgcgtcaatcgattcggtggtaggactgatacctttcggaacaatcatcttttgggtaataaccagctttagaggagttacatcatcgccaatgaaacgaatggcaccgacacgtgaactagtcgatgaattttcagagactttgattgtaaacttagtaatctcaccttgtgtctcatgcgaatcaacaactgcccaatggctatcgcttccatcagtctgacagtcgttattgactctgtaatagacattagatgaaaggtcaacagtgaaaagcccaccttctgcttctacatcaagtgtctttgtcgcgagtgtcatatacggatcatccgagttatgacaagatgcaaaaagcacaagcgacacacttgcaaacaataacatctttagattcatttgattagtatttagggttattaataattgactagctagacattttcagacgtcttgcatatataattctgtatatcacataagcaagtatcatggcaatcatcagtacgatacttcctatcacaattcctttgaccgcaagagtcttcggatcgccagcaataagcagacctatcagtaagagcgcaacgacaccaatggtaatacagaagcagttaacagccaaatgtgaatagattaataccgctttcttctcctttaatgtcggttcacgatcggcttcaggatcagtatattcacaaatggcttgataaccattatcttcatactttttacgtgccgaccaaacttccatgattgcaaggataagtacaggaagtacacaaccggcaactgactctataaggcttggactaataacggaggcgggaattatgacgcgagccataataccaacgagccaggtaagaatcattgcagaaataagttggttgcctgtcagccgcttcgagaacaatccccatatcgacggaatatataaaggacacatcaccatagtaagaagggttactaccaccttttcggcacctccggcaaacgggatgagcattgacaaagcgataatcacaagtccaaagacaaatgtgaagagacgtcctaccttgatacgctttttctcatctgcctgacggtttttctctttgtgtccccaaatatcataagtatatacattggcatatacattcaaaatgcccgaaacattactcaatgtagccgatagcatcgctgccaacatcatgccgaccattcctttcataagcacgagtttgctcatattcacataagcgtgttcgccgttgaaagtcattgtggttgcatccaaatcaagcgcaagtccgggttccatcacacgataaatcatggtaggaagataccagatgagaggagtgacgatataaagaattccgattaaataagtactcttttttgcgtctcttgcagtaggcacgcttatgtatcgctgtacaaacggccagtcgccgccaatcatggacacattgagaaatatccacagtaaaagccacccccatgtataggtcggagatgtgcccgagaagaatcccggtatctcactggccttatcgataaatgcacttacgcctcctaccgcgttaaatgaaagaggtatcataaatacaaccacggccagaagtactccgaactgaattacatcagtcattagtaccgcaagaaatcctccggcaatggtgtatccaagagcgatggcaccaagaataagaagcgcccaccaaatacttaggtaacccatcggtgaatcgcccatcatacctgtacttgcaaaaatactgccaccatcgactttgattaatgcacacatcacaaccgctaccgcatacagagacactgccgtatgcaccgcacgggctataattcctgaaattgtgtaaaaactcaccgtgcggtgtccgaaccggatggtaaggaactctcccggcgatttgatacgtagctcccgccatttgcccgagatccatttaccgacaataaacgatgctatgccaagacaaagtgcaacgactaccgcaacaagtcccgatttataagcaacgcctccccaaacgacaaaggtacttgccgagaagatagtcatgtaggaagagactcccgacagccaccacgaagaatttcgcccggcaataaacatatcttcggagtttttaattttccgggacatcacaacactcacggcaatcagtccgagaaagtagagtaaaataataatataatctaactgttccatattctggttcttctttatataattgctccaagtttcttcaattcctctatgagattgtgaatatcagccttttgtacggtcacacctgcctttatacattgtgcggctgctactcctgcggcttgtcctacccccatacaacttgcctgaacgcgaagtgacgcaaaggaagtcttatcagcactaatacagcgtcccgctacgagcagattcgggaaatcttcagcaataagagcacgataaggtacatacgccgcttttttaaggaaagttacgctctgttccgcacctgctgccacatggatatctataggatgtgcgccgcgtgatatgctatcaggatacttataagcattcacatattcttctgctgtaatggtatgtacacctttgatacgacgtgtctcacgaataccggcatgtacggcgacggtcgtcacataactgtttttaaactcttcaaagttctctttaaagattcgtgctattttaaatacatcttcccgtaagcgacattccgctgcggtaaaatttctattatcaatggcatttcctgcagtacgggtcatattaaccgttacttcgcccggacgaagagtggtgcaaaaccaaggaccgccgaactcggggatgccaagtgcctctttcattgctaaaagtttctcacgaactgcaatgcaatgacaattctgcccttgtttattatggtgcatggcatcaattatcatgggcgaatctgtatccacacctcctaatataaaataggtggaaagaggttgcagcggtttacattcatcagtttgcatcggaacacccgccatagcggcaaggtcaccatccccagtgcagtcgatatacatatcggcactgatggcttctgtcccattcttattctcaaagaggatacaagatattttgccgtcttttgcctggcaaccgcttaagtaagagtgcatatacatatccacaccggcttccagcatcatttgctggcataaaagtttgtaaagctccggatcaaaagctacattgccaagaggtttctcaatgatacagcctcccatcttctccagccgttcgataaactcccatggaataccgcctatcaccttttcattattataggtgaatacactcaaaggagtaacaagccccattgtagccattccacctaaaaacccatattgttccacaacagcagttttcgcaccactgcgagcagccgcaatggccgcaatgaaaccagcaggtccgccaccgcagacaactacatcatagttgcccacaattggaacccgtttcgaaatttctatacttcgtactttcttgtccatgaccgttttttatcctttaattattaccaattcaaatagatggtaaactttgatgtgctttcgaccgcacttataagaaaagaggtgtgttttcatagttctttttctttagttcgacatcatgttgatgtagcaaagataaagaacaagagcttgaaaaaaagttttttcctaactcttttgcctgcaaacgattgcgggaacgttcccaaaatctgcaaacgttacaaaagcattacacaaaggcaaatgggattcgtattttactccaatattaggatttattgtttgaaatcaatatctttgctttgatttaaacaatcattcagcatgaagtatataaccataaaagacatcgctcgacatttgtcaatatccgtctccactgtatctcgtgcattgggggatgacaagaatatccgtaaagaaacgaaagaaaaggtgatagaagcagctaaaagattgggatatagaccaaaccctgtagcaatcaaccttaaatacggacataccaataccgtgggggtgatcgttcctgaaatggttacgccgtttgcttcacgagtaataaacggcatacaagaagtgcttcacaccaaaaatataaaggtgattattgcagagtc

SEQ ID NO: 8238 - DNA, 14201 bp, Unknown
  gut microbiota DNA sequence
tgaatcatggaaagcatggcataaccgccaccgaagccaaagagcccgatcttgaaaaatgtatagaataactgtaggtaaatcatgtgattaataatttattatataataattttaggcatggattacacggatttcccggcttttagaattatgaatctgtaaaacaacagcgttaatccgcgccttctcaactctccattctcaactctcaacttttctaaatttcccccacaggaaacctcctacaccggccgcaataataatccagataggggagaagcccaacagccagattaatattgccgagacaacaggaatccacagattgtagcggttgatttttgcggatcgtcccatggtaaaggtcggcgccgcgatgagtgccaccactgccgggcgaattcctttaaaaatacgttccactatcggattgtctttgaaactatgaaagaacagggcgatagccaatataataatgaaagacggcaaaattgttcccaatgctgtgataatacttccccggattccacgcagcttatatcctataaagatagaaatattgactgccaaaattcccggtgcggattgggagatagccagcagatcgataaaatcttcctgcgcaatccatttccgtttggtgacaatttcattttcaatcagtggcaccattgcatatcctcctccaatagtaaaggcgcctattttaaaaaagattccaaatgcttcgagataaatgttcattctttcttttctcctccttccttactaactgcttttttctctttgccatattgactgggacttacattataatgcttcttaaatacttcgcggaagtacttggcgtcactgaatcccgtcatttctgcaatttctgttatgctatgtgtgtcttcttttagtaattgtacggcacgtttcagacgaatcagccggatataatctcccggtgcctgatcggttaatgcccttaatttattgtaaaaacttgtgcgactcattcccatcaggctgcataatacatctaccgtgagagcaggattgtcaatgttatcttccacgttctttttgacgtttgctatgaatttccagtcaatgtcttgcgaacagttgatgcagtcttcatcattttcctcatcattcagatctaaatttgcgaatttgctgcgcaatagtgcacggttagccagcagattggcaacattagctttcaatataccaatattgaatggcttcacaacgtattcatccgcaccaatctgaagtcccgagagaatatctttctcattattcaaagcagtcagcaggataacaggaatgtgggaggtttcgatattattcttgatagcttggcataattcatccccccgcatttcaggcatcataatgtctgaaataaccagctctggtttgtactcgggaataatcgtcaatgcttcttttccattggagcaaacctgtacgaaatactcctcggataacgtttgcgacagatagttgcgcaactcatcattatcttccacaatcaagatgcgacgatgattaatgttctctttcttttgtgcattttcgtaaatttcaggtgatggaggcggaacgttatcaatcgtattttctatacgctgtttgctcggagttgccagatgtgctttccggaagcgcttgctgtctttagggaatgttattttgataaccgatccctggttttcgatgcttgacagattaatctttcctttatgcaggcggactagcttccatacaagcatcagtccgataccacttcctgttactttggaattaatagcattgctgccacggaaatgaagtttgaacaatttcttttgttcattggccgggatgccgattcctgtgtctctgacttccacgctccatgagtcagatgtttctgaaacgaaaacctgtacatttccattttccggagtatatttcagtgcgttcgaaatgatgttcttaaagatagattccatcttttctttatcaaaccatacgttcatatacctgaaattactttcataagtgaagttgatatgtttgatgttggcgtactgctggaacgcgttgaatatttcattcataaacgtgtttagctcatgctctgaaatatataattcggaagaatatacgtccgctctttcaaagttgataagattggtggtaagacgtaatagggcatttacgtttcgtaatgccgtattcatgttcgaaataccttctttactcaactcctctttctcgcgtagttcttccaaaggtgctttgataagcgtcaatggggtacggatatcatgtgccgtattgataaagaagtgtattttctcatcggagactttgcgttgcttcctcaaaatcagtatacgcaataggacgatggcaatgagacaaaggatagctgtataaaccagcatggcccagaatgtcagccagaaaggttgggctatgataatatccatacttctttcttcaagcatgatgcgtttgtcttcattggagatggcacgtacccttagcgtatatttgcccggggcaagattggtgtaacgaatcgtgttctctgttccgggtttgctccatttatcatagaaaccttctagcctccaagagtaaagaatattggaaggatagtcatagttgatggaagaaacctgcaaagagaatctgttttgattgtattttaactttagtacctttgtatcattgatgcttgctttcaacggagaatcctcatcacccggatagattgtttgataaaaaagcttgaaatcgctgaaaatcattttagaagaataacttctgggcaatttcatatccttgtcaaattccactgctccgtcagaactgcctaaaatgaatttattgtttttccgtaacgtacctgatagcgcattgaaatgggtggtcatcaatcccatatctttggtccagttatagaattttttctcattgggataaaaacttgtcaatccgctttctgtactcatgattatatctttgtccgcatccgataatatggtatagatattattggatatcaaagcacagttttccgtgtggtaatgagtgaacagttttttattaatatcgtaaatcaatagtcccgacccgctggtacctatatacaatgaaccgttttttgcttggtacagggaatagatatagttcgactctaccggaagttttatgcgctcgaattttccggattctttatctaaaagacataggccggtggcactaccgatccacatacttttttcatctttctcaacgatggcggtaatggaatttaatccatcataaaaccgtacttcctgcgtcttcagattaatacgcttgaggttgtagaatcctcccgaccagatataaccctgcatatctgtacgaatatcacgtatatatttatccggtcgcttgtttgtatgaatgtacaaaggcggcatgaaatagctgacactgaacgttttcttatctatctggtaagcaccggaagagtacccgcctgcccagataattccgggagccacttcgcatatagtaagaaagatatggcttttattaccttgcgactcttcaaaagcactaagcaccgatcgccattgtccggtctttgaattaaaaaaactgatgccattgttcgttgcaaaccataaatctccctctctgtcttcaataatggcatttacttgatcgttgattaaagactgtttgttaccgatggagtgcttaatccatttgtagctcgtataacggttgttttgtatcgtgattccgatgggataattagccagccatatccgttcttcatcatccacaaaaatgtcattgatactgttaccgttcatgccacaattactgttataatcagccacaatttcgggtactatttgataagtatccatatttattttgtgtactcctccgccatcggtagctattaataactctttgtcatttagcggcttgaaccgtgtgatactgatatctttcaggttataatccggtcgtatgacggatttggtattcatatcataaaccataattccccgcaagaaagtgccgatgaatagtttccgaatctttttgtcgaagtgtaaatcgcttacttgggctttcacgctctccaacttatcgcaattgataagtttcaatgcgttgttttctaattgggcataatgaatccccatttccgtaccgatgaagaaatgcgattcgtctatttgttcaatatcagtgatttcttcacttatatcattctttatatgggtgacttgtttggtgtccgtattatagagaaagatagtatctttattgcatagccagatgtgtttgttctggtcgagccaggcataagtgaccgggtccggctgttcgctgaaactttccatcggtaatttatatacaagactgaagcagtcgtgaatctggtcataccggaatacttttccttttttcccgatttcccataagactccttcctgatcaatataaagccagtttagatttaacagagagttcacttctgcgtcaccatccattaacttatatcgtttaaactcttttccattgtatcgatcaataccttcgtgcgtgaggaaccacatgtatccggttttatctttttgaatgcagtaaacccgccggttacttaacccatcctccactccgagatatcgatacgtctgcgcgacacaaattagaggaaacaataagattagaaaaagccattttttcatacaaataggacttttaagggttattgaatcttttatgagggggaaagtttgacaaaattaagaagattttttgatattacaaaattttgatgaaagataacagcgctccaaaaatgaagaaaatagactattttataactatttgtatatactgtttgttttcggtattttggtatctatcagaagtcttccggtagaatggaaagttccgtaaaataagaggctggcactatttaaagtaccagcctctgtaaaatatggaaatgatttatttcattttcgcttccacccacttgcgggcattgacaaacgcttctatccatggagtaacctgatcgctgttcttgcggtcggccggatagcaaccgttctgccatgggaagatggaacgttccaagtgaggcatgatagccaagtggcgtccgtctgcgctggccagtgctgcgatagaataatcggaaccgttcggattgcccggatattcatcatagctatacttcgctactacattatatttatcttcgtcatatggcaaagagaattttccttctccgtgagctacccagatacccagtttgcttccacttaaagagccgaacatcacactgcggttagtcgggatagtaagaccaaggaagcgtgattcgaatttgtgtgaattgttatgtagcatttttcctttcttcttcagttccgggttgataagattgagttccatcatcagctggcaaccgttgcagacacccaatgacaatgtatcttcgcgtgcataaaatttatccaatgcttctttagctttcgggttgaacaggaatgcgcctgcccatcctttagcagaacccagtacatcggagttagagaaaccaccgcagtaaacgatcatgtttacgtcttccagtgtttcgcgtccgctgatgaggtcggtcattgtaacgtcttttacgtcgaaacctgccaaatagagtgagtaagccatttcgcgctcaccgtttgtacccttctcacggatgatagccgcacggataccgcttggggtacgacgatccggagtgataccgtattgagaaagcttacctttgaattccggcatgaaagcgaattcaacaggttgcatcttatagttttcaaaacgtgcttttgcgcaaccgttcatagattgtttgcggtcgagcaggtaagaagaagaataccatacgtcacgcatataatcgataccaaactggtaagtagcaccgtctttagataccaaaatgtggcgttcgtcagtcggtttacccagctttatatagcctacgcctgcatcttccagaatcttcttcacttcatccttatgcttgtcgctgatctggataacgatacccggattttcagcaaacagaatcttaacgatatcctgtcctttcatcttgtcgaggctgatttccataccgccttctacattagagaagcacatttcgagcaatgtagtgatcaaaccaccggcagagatatcgtgtcctgcaagaatcaatcctttgttgacaagttcctgtacggcaaggaaagcatcacggaaatattcggcatcttgtacgcaaggtacttcgtcaccaactttacccagagattgtgcaaaagccgaaccacccagtttcagttcatcgaagctgaagtcaatatgataaagcgtagtcttttcattgttaaccaataccggagataccactttcttcacgtcggaaacttcaccaccggcagaaacaatcacagttcccggagaaatcactttctcgccgttcggatacttctgtgtcatagatagagagtcttttccggtaggaacattgatctgcagcgcgcaacagaaatcgcttaaagcttttacagctgtgtaaagacgggcatcttcaccttcttgagagcggcaaggccacatccagttggcagacagtgaaatgctatccataccttccgccattggagcccaaacaagattggtcagcgcttcggatacagaaagaatagagccggcagccggatcagccaatgctgcttgcggagcatgtccgatagaggtagcgatacctttctcgccacggtagtcgagtgctacgacaccgcagtcgctcaacggcaactgaagttcaccctgacattgctgacgagccactttgcctgttaccgaacggtctaccttgtttgtcaaccagtctttgcaggctacagcttcaagctgcaatacattcgtcagatattcatgtagtttagacaattcgtatttcggcatttcataatgacgttctacggtcttgtctaccatataggttttgggagaagaaccgaacatctgttctacggcaaggtcgaacggacgtacaccgtcagcctgttggaaagcgaaacgatgatcaccggttgtttcaccgactacgtacattggagcgcgttcgcgttcggcaatcttacgtacatgttcaatagcctcttctttaatcagcagacccatacgttcctgactttcgttagcgatgatttctttggcagacaaagtcttgtcaccgataggcaacttgctcatatcgatcaaaccaccacattcttccacgagttcggacagacagtttacgtgtccggcagatccgtggtcatggatagaaaccaccggattcacctcttcttcacaaagagcgcgtactacgttattggcacgtttttgcatttctgcgttggcacgttgcacggcattcaactcgatgccactgctgtaacgaccggtatcaacagaagatacggaaccgccacccagtccgatacggtagttgtcaccaccgataaccactactttgtttccagcttccggtgtgcctttcaggcagtcgcgttgtgtaccgtaaccaacaccaccggcaagcatgattactttgtcgtaaccataaacttctttgttttctgtatgttcgaaagtcagtaccgaaccgcagatcagcggttggccgaacttgttaccgaagtcggaagcaccattggatgctttgattagaatctgttccggagtctggtatagccatttgcgtaccggaagaatctcttcccattcgcgtccttcttctgtgcgtggataagaagtcatgtagactgcagtacccgcaatcggccatgaacctttaccaccacccatacggtcgcggatttcaccgccggtaccggtagaagcaccattgaatggctcaacagtagtagggaagttatgagtttccgctttcagtgagataacactcttgatgtcctttacttggaagaaatcaggttttgaatgatctgccggagcaaactgttcaacaaccggaccttcggcaaaggctacattatctttataagcagagatgattttattcggattttcctgtgtcgtctttttaatcatctggaacagagaagactcctgttctacaccgtcgatgatgaacgttccgccgaagattttgtggcggcagtgttcggagttgatctgtgcgaaaccaaatacttcggagtcagtcagttttcgtccgagatcattttctactttcttcagatagtccatttcttctttagaaagagccagaccttcttgttcgttgtacacttcgagatcttcgatgtagatgatcggttccggctgacggtttgtcgtgaatacgttttggtcgagtcctttgtacatgcgttggagcatcgggtcgtagtctgcgttttcgtccttaacagggaagtactcctcgatgcggctgatgccttcgagccccatgttttgggtgatttctactgcgtttgtactccagggagtgatcatttcgcggcgtgggccaacgaaacagcctttcaggttttcttcactttccatcacggcttcgccaaaaagccagcagagtttattactttcgtcaggggtgagctgatggttgctctctacggcaatcacgctcttggaaggggttctgaaaaaaagaatcatgttgtatatttacgattttacgatttacgattttacgattgaagttcctgcaggagaaactcttctctttttctgtggcgcaaagataatcaatttcgttggtggtaggaaaaaaatagagaataaattcctataccttatttaatatgtttatttttgatgtacgttttacttattatcgctatatatagtgattcttgtgtggaaaaaacgttaatatactatccccatatcacaaaaaagtgcgatatttgcgacatgattcagatagagacaatattcgatatattagtgaaaggctttattattggcgttgttgtgtccgcacccctcggtccggtgggcgtattatgcatccagaggactctgaataaagggcgttggtacggatttgtaacaggtctgggagcttcgttgagcgatatagcatacgctttgctcaccggttatgggatgagttttgtgttcgattatatcaataagaatattttctatctgcagttattggggagtgtcatgctactcctttttggtatatatacctttcgtagcaatccggtacaatccattcgtccggcttcgtccagcaaaggctcttatttccataattttattaccgcctttttcgtcactctatccaaccccttgataatcttcctgtttatcggactttttgcccgctttgcctttgtgcagccgggagtgctggtctttgaagagatcacgggatatcttgcaattgctataggagcattgacctggtggttgggtatcacttattttgtgaataaggtgcgcactaaattcaatttacgtggtatctggatactgaatcgtgttgtaggaagtatcgtaatgctggtatctgttgccggattgatttatactttgttgggagagtcactttattaagagataacataatgaatcagatagcacaacaactgaaagagaagaatattgccgaataccttatatatatgtggcaagaggaagacttgatccgtgccaatcattgtgaaccggaagagatggaggcaaatgtaattgcccgctatccggaagaacagcggcctgctatgcgagaatggtataccaacctgattacgatgatgggcgaggaaggagtacgggaaaagggtcatctgcagattaataaaaatgtgattatcaatctgacagagttgcacaacgcattgtcctcttctcctaaatttcctttttacagtgctgcttatttcaaggcattaccgtttatcgtagaattacggaataaaaacggcaagaaagatgaacccgaactggaaacctgttttgaagcgttgtatggagtgcttctgcttcgtcttcaaaagaagtctatcagcgaaggaactgccaaggcagtggaagctatcactagtttcctttctatgttggcaaattattatgataaagaccgtaaaggtgaattaaaactggatgaataaatgagaattttagtaacgggtgccaatggtcagcttggcaatgagatgcaggtgcttgcgaaagagaacccgcaacatacgtattatttcacagatgtgcaggaacttgacatctgcgacaagcaagctgtgtggacttatatggcagagaagcagattgagcttgttgttaattgtgctgcttatacagctgtagataaagctgaagataatcaagaattagcatacaaattgaattgtgaagcaccgaaacaactggcaagtgcggcccaagccaatggtgctgccatgatacaagtatctactgactatgtatttgacggtactgcgcatactccatacacggaagactgcgatccttgcccggattctgtatacggcaccactaaactggaaggagaaaaggaggtaatgaatcactgcgagcaagcagtcgttatccgtaccgcatggctctattctacttttggcaataatttcgtaaagacgatgattcgtcttggaaaagagcgtgacagcctgggagttgttttcgaccagatcggaactccgacgtatgccaatgacctggcacgggccatctatgctattattaataaaggtatcgttcgcggtatctaccatttcagtaatgagggagtttgttcctggtatgatttcacagtagctattcatcgtctggcaggaataactacctgcaaagtgaaacctttgcatacagccgaatatcctgcgaaagcaaaccgcccggcatattccgtgcttgataaaacgaaaataaaaacaacgttcgatatagagattcctcattgggaggagagcctcaaacaatgcttgataaaattaggaatgaaaaatgaagaatgaagaatttcgatgcggctttatagatagcgtaacaattcttctttcatcattcatcattcatcattcttcattcttcattcatattaatatatggcagataatacagaaattttgagacggcggacgttcgccattattgcgcatccggatgctggtaagacatctttgacggaaaagttattgcttttcggaggtcagatacaggtggcaggtgcggtaaagagtaataagattaaaaagacggctacgtccgactggatggaaatcgagaaacaacgtggtatttcggtaacgacttccgtgatggaattcgactatcgggactataagattaacattctcgatactcccggtcaccaggactttgccgaagatacataccgcacactgacagctgtagacagtgttatcatcgttgtagatggtgcgaaaggtgtggaaacgcagacgcgtaaactgatggaggtgtgccgtatgagaaagactccggtaattatcttcgtcaacaaaatggaccgtgaaggaaaagacccgttcgatttgctcgatgagctcgaagaagaactgatgattcaggttcgtcccttgtcctggccgatagagcagggagcacgttttaaaggggtatacaatatctatgaacagaaactggacttgtatcagccatccaaacagatggtaacagagaaagtggcagtcgatattcatacggaagaactggatcagcagattggtaagtcgttggcagacaaactgcgtggcgatttggaactgattgagggtgtttatccggaatttgattcggaatcctatttggcaggagactgtgcacctgtattctttggatcggcgttgaacaacttcggtgtgcaagagttgctgaactgtttcgttgagatagctcccagccctcgtcctgtacaggcagaagagcgtgaagtgaaacctgacgaaccgaaattcaccggcttcatctttaagataactgccaatatcgatcctaaccatcgttcttgtgtggcattctgtaagatttgctctggtaagtttgtccgcaacgctccatatacacacgtccgtcatggaaaaacagtgcgtttttcatcgcctacccagtttatggcacagcgcaaaacgacgattgacgaagcatacgcaggagatattatcggtctgccggataatggtacctttaagattggcgatacattgacagagggtgaactgcttcatttccgcggattgccgagcttctcaccggagatgttcaagtatatcgagaatgccgatccgatgaaacagaaacagttggcaaaaggtatcgaccagttgatggatgaaggtgtggcacagctgtttgtcaatcaattcaatggccgtaagattattggtacggtaggacagttgcagtttgaggtcattcagtatcgtttgttgaatgaatacaatgcatcctgtcgctgggagccggtaagcctttataaggcctgctgggtagaaagcgatgatccggcggagctggaagccttcaagaaacgtaaataccagtacatggcaaaggatagagaaggacgcgatgtgtttttggcggactccagttatgtacttcagatggctcaaatagactttaaacacataaaattccactttacaagtgagttttagaacatattcgtacgattttaactaaaaaatcaggtaaaaaaaggaaaaacatatctcatataaatgagtgaagagaaatgaagacactatcctgggataaaattcagcaaggggatgaagaggcattccggcagctttatgagcaatatgcagacttactgtatggatatggcatgaagatagccggtgatgatacgctggtgaccgaggcgatacagtcgttgtttgtttacatctttgagaaaagagaaacttgcgcggcgcctcaatccatacccgcttacttgtgtgtttcgttgagacacatgatagtgaacgaactgaaaaaagagaatagtggatcattcaaatcactggatgaagtaggcacaaacgaatatcagtttgatctggagatcgatattgaaactgctattatccattcagagttggaaaaagaacagctggaagttttgcagaaagagctgaacaatttgacaaagcaacagcgggaggtattgtatcttaagtactataagaagatgagtccggaagaaatagcccaggtgatgggactcacttcgcgtacagtttataatactactcatatggctatatccagtctacgggagcgcatgagcaaatctttcttgttactggtggcagctaatttgtggatttttaattgaggtgagatatggaaaagtggacagaatctttagaacaatacctggaggaaggtaagcttcctctagtgggcgaaatattttcccgtaagaaagaaataggcgataaattaaagttgcagcgcgaagaaagccataagattatcttaagccggaaaagaaaacaaagtgtcggaaaaagcttctccttctcttggggagtggcagctgcggtcgttcttcttttgggagtaggtagttacttcctggcagaggaaaaggtggtgacggataacactgcaatgaattatgaattgcctgatggcagtagtgtgcaggtgatggaaaactcacgtctgacttacaatcatatcacatggctttgggagcgtaagttgcaattgttgggcaaagcctctttcaatgtaaccaaaggcaggacattcaccgtcagcactgaagccggcgacgtgacggtactcggtactaaattcctggtcgatcagcagggaaagaagatgttcgtaaactgtgaggaaggaagcgtgaaagttgagactgccgtaggtaagcgtacattgcttgctggtgaaagtgtgcgttgcgatgaaagcaagattgtgccagtagaaaaaaaggcggaagaatcggaattccctgaagtgctagggtatgaagacgatccgctgataaatgtagtggcagatattgagcatatatttgaggtaacagtcgtcgggcatgagaaatgcgaggggctgacctacaacgggacggtcttaacgaaagacctgaacgccacactggaaaaagtcttcgggtcgtgtgg

SEQ ID NO: 8239 - DNA, 18989 bp, Unknown
  gut microbiota DNA sequence
aacaatacctccagctccacaataaatgctgattttaagtaatttatgagatttgcaccccgctttacatcctaataatgtaaagcggggtgcttttgttttatttaatatttctattttctgtgatatttatctgttcgtcaatgctcgggtcgaatcggtcgttgtataggtggcagacggcttaaatgtcaagactgtcaaaacgggactgatcggattacttttcgtctttcttgttatcgagtagctgtgataattcttcctccacttcctcgatacttggcaaggcggatttcagattttcgggaatggctttgcttagttggtagtcgcttactcctatgggctgtgcatagcccgtcaaggcatattgtgctactacttcatccttgcctttgcagagcaacaatcctattgtcttgttgtcgttttcacctctcaactggtcgtctacgatgttaatgtagaaattcaattgccctgcatattctggcttgaatggagtagcctttaattctacgactatataggcgtgaagttttatggagtataggataaggtctgcataaaaatcgctgtccccgacttggaaatgtttctgtttggctacaaaggcgaagccgttccccatttccaatagataccttgtgacgtgttctacaagctgtttttcaatatccctttcatctgccagttcttttgtacctgctacatcgaatatatacgggtctttcagcaaatagttggctaagtcactttgaggggcgggcaaggtctttgtgaaattgttgactttctgtgtttctatctgccgtttgaacagattagtctcaatctgtatctttaatacgttgctgctccatccgttttcaacggactgtttcatgtaccaatatttgtttcctaagggtaatgagctatccaatagtatcacatgactggtccagtttatttttgaaatgggggaacaaacaaaatccttttcaatatcatcaatggatgtttgcagcattgcggagattgtcttgtctatcttttgaatttgcgcaagaggctcttgcgtaaattcttttgattgaaatatatttgtctgaaattgcgcaagaggttcttgcgtaattggtaaacagttcagttcatcagtcaaggatagcatattggggattgttggcgttcccaataccttgtcacaagaaagcattctttgtaatatctctagtgggtatgttcgggcaaactgacacatataggtaaggcttctcgctgaatatcctttcttttcgggatagtgcatcttgatagcctttgaaatctgacttatggcttttggatagcctctttttattatggagtcataaatgaagcactcccacctcgcgaaccatttatttttatatctgtgtcaggtaataatcttttgatacgttctatcccttctttagtaatctttccatataaactcaacgatccgatttttatttttgatatttcgtccggtatatcaattgtatcgataaactgaatatccaacctttttatttctttgagctccaacagtacagccggaaattcttttactctgatattgatgccgcttccccaaccatccttttgagcatcagcacttaatttactttttaatccctccttattaacgtctttcttcctgaccatccaaccaatttgcggtcgcagagcaaaagtcttgctgttttgctctaatccaatgaaacctgcccaaaattctaatggagtttctttgacagcgtcaccatatacttcctgatactttacatctaccttcactatctcatcagggagacaatttttgccttccagctgtttcagattatttcttttcctttccttatcataagggaaaaacttcacgatccatccatcaataatgtttggggctccgtatcgtttctgtgaatgatatttaaacatgttgcgccaaaagtccttattaacttctcctttggatgctttgacaaattcttccaaaagaggttccaattctgaaatccaccaatcgagtttgtattctttcaagcctctggctttgtgcagtagtttttcccagtcctccggtgttccttcgagagttatttcaggtataccacagacaatgcgtatgattataaactcaaaataaggttttacagcttccatgattgttatttcggaagcaactttctctaaagaggtagtcgttgaaaaattgcaggtgagcagttcggtcagatgattaccggcgtattgggatatttgttctgtaaattgcggaaagattttctcccatgaaagagtagggtcctccaattttttgtcttctctgacaattaaggatagtttgccggagaaatcaacaagttcatttctcatagattcctgattggcattgatatggcgtgcaaatccctggctgattaatagccaaattatgtccggggacaacacgaatggcctgtgatccgcataagcctgatacataccgttgaaaaaagaattaggaccaaaagaaacgagactgtcgggagattcgctctttgcaatgatatgataaggaaccttgatattcttcttttttatctcataaggctctatgttcatatctgataatataagattttcgtaaatttcattcggggagtgtagatgaagtaattcttcaggctttgaaagcttttcgaccttaaaagtgattccattttgagcgaatgtggaaacactgcaaaatatgaataagcaaaataatgtgtttttcataatcttaaagagttgtatggtggcacaaacttattaactacctctatattttgaatagacgatatgcaaatataatattataagaactgtctttgacaagatattgaatgttttttgacttatatctataaaaatcataagcatattatttcttgaaccgataagcaggatttattcgggaatttatagtaagtttgctctgctaatcctaaacaatgacacagagaaagattatacatatcgacatggatgctttctatgcctctgtagaacagcgtgataatccagaacttcgtggcaagcctttagcggtaggtcatgcagaagagaggggagttgtggctgctgctagctatgaagcccggcgttacggtgtccgttccgccatggcttcgcaaaaggcgaaacgtctttgtccccaactcatttttgtacctggcaggatggatgtttataaatccgtttcccgtcagatacatgagattttccacgaatatacggatatcatcgaacctctgtctctggatgaagcttttctggatgtcacagaaaataaaaaagatatttccctggctgtggatatagcaaaggaaataaagcagaagattcgggagcagctcaaccttgttgcgtctgccggagtttcttataataagtttctggctaaaatagcttcggactatcgcaaaccggatggcttatgtaccattcatccggaacaggcccttgattttatcgcccgtcttcctatcgaatctttttggggagtgggtccggtgactgcaaagaagatgcatttacttggcatccacaatggacttcaactacggaaatgctctcttgaaatgctgacagcccatttcgggaaagccggcgcactgtattatgagtgctcacgaggaattgacgaacgccctgtcgaagcaattcgtatccgtaaatccattggctgcgaacgtacattggaacgtgatatttcagcccgttcatcggtcattatcgaactataccatgtggcggtagagctgattgaacgtcttcagcgaaaagacttcaaaggcaacacgcttaccctgaaaatcaagtttcatgattttagccagataacccgaagccttactcaatcgcaggaactcaccaccttagaccgggtactcccacttgcaaaagaattgcttaaaagtgtcgaatttgagcaacatccaatccggctcatcggtctttccgtctccaatccaaaagaggaagccgatgaacaacacggtgtttgggaacagttgagttttgaatttagcgattgggattgaaggcgaagaggaagaaatagaggaatgaagaggaaagaataggggatgaaaaagaagagaattaaagaatgaaaaaagaaagaggatagaatatccaaacagatactttgtctgaagtaaaacagatactctatttgaaataaaatagagcctttatttgacctaaacagagcctctgtttggaataaatagaacctctattttctccaaaggaagcctctgttttctaaaactgcatctttgtttttccgaaatgaaaacccggtttccgtgtgacttaaattgtttttatagtgacttaaattgtttctacaatgacctaatttgcttttataatgacttaaaagcctaaaatatagcaattaaaagtactatttttgaagtatgtacttttttgtcatcaggttcgtatgatttactcacctcattttttatcagatacgttatctttgcaatacttaaatgaatgaaaataccatgaatcgaatgaaacatttattttgtgttcttttactagcagctttgggaagtttttctttcaaggcaaacgcttacaccgaacgcaatatgctgcaaaaagcggcagacgaaactacgttgaaaaacgtgttggtaatgaaacaagcatgggtgccttatcctgcttatacagatcgtgccgcctgggattctttgatgggccccaataagcaacgcctcatcgaagccggcgaaaaactcctcgactataaatggcaactgatacctgccaccgcttatctggaatatgaacgtagcggtaaccgtaaaataatggaagttccttatgacgccaaccgccaggcacttaacgccttgatgctcgccgaactggccgaagggaaaggacgttttatcgaccaattactgaacggagcatatatgagctgtgaaatgaattcatgggttctatccgcacacttgccccgccagagcagcaaacgttcacttcccgacttccgcgaacagattatcgacctcggttcaggcggatacggagctttaatggcctgggtacactatttcttccgcaaaccattcgacaaaatcaatcctgtggtatctttgcaaatgcgtaaagcaatcaaagaacgtattctcgatccgtatatgaatgacgacgaaatgtggtggatggcttttaactggaaaccgggagaaatcatcaacaactggaatccctggtgtaactccaatgccctgcaatgtttcttactgatggagaacaataaggataagttggcgaaagctgtttatcgctccatgcagtcagtcgataagtttatcaacttcgtgaaatccgatggtgcctgtgaggagggaacctcttactggggacatgctgccggaaagctctacgactatttgcagatactctctgatggcacaggcggtaaactgtctctgttcaatgaaccgatgattcgccggatgggagaatatatgtcccgctcatacgtgggcaatggctgggtggtgaattttgctgatgcatcggcacaaggcggaggcgatcctttgttaatctatcggtacggtaaagctgtaaacagcgatgagatgatgcattttgccgcatacctgttgaaaggaagaaaaccgtatgctaccatgggtaacgatgcttttcgttcgcttcaatctctactttgctgtaatgagctggcaaaagcaactccgaaacatgatatgccggatgtaacctggtatcccgaaacggaattctgttatatgaagaataagaacggtatgtttgttgccgctaaaggcggatttaataacgaaagccataaccacaacgatgtaggaaccttctctttatatgtaaatacaattcctgtgattattgatgccggtgtaggtacatataccaaacagacgttcggcaaggaccgctataccatctggaccatgcagagcaactatcataacttgccgatgattaacggagtaccgcagaaattcgggcaggagtataaagctaccaataccgtttgcaatgagaagaaacggatgttctctacggatatagctactgcttatccggcagaagcgaaagtgaaaagctgggttcgctcttatgctcttgatgataaaaaactcattattggtgatatttatacgttggatgaggctatagctcctaatcaaatgaactttttaacttggggcaatgtgactttcccgtcagccggaaaaatccgcatcgaagtaaagggacaaaaggtggaaatgaactatccatcacagtttaaggccgaactggaaacaatcaaactggatgatccgcgcctgtctaacgtatggggcaaagagatttaccgcatcacactaaagactgaagaaaagaaagtgactggtaaatatggatttgttattcaacaagtgaagtaggatgaaatagatttttaaagctagaaaaaataaagtataaacaattaaatcacagtaagatgaaaaaagtattatttgccgggcttttggtccttgcaggagtaagcgtaagtgcgcagaacctgataaaaaacgaaaaattcgccactgaagtaaagactaaagtgactaatgccaacaaagctaccgcaggagagtggtttatcatgaataatgaagctgacggtgtaactactattgcttgggaagaaacaggagatgccaaatatccgaatgcaatgaaattggataactccggtgctgaaaagaatctctcttggtataaagctttcctgggacaacgtattaccgatggtttggacaaaggtatctatgttcttactttctatgcaaaagctaaagaagcaggaactccggtcagtgtatacatcaaacagaccaatgaggaaaagaatgataatggtaagtacaatactactttcttcatgcgtagagactatgacgcagatgctcaaccaaatgcttcgggcgcacagtacaattttaaaattaaagatgccggtaaatggactaaagtagtggtttactatgatatgggacaagtggttaatgctattagcagcaagaaagcaaatgctaacttggaagtgtctgatacagacgatgatgctgctattctgaaagattgttatgtggctattctttcccagaacaaaggcggcgttgtagaaatcagcgacgtgacattgaagaagaaataaagagcaaaggatttaatatagtaggttaacaaaaaaatagggcagtgaagtagtgatacttcgttgccctatttcttttgttaatatgaatataatggagagttccgattaaataaatatatgaaacagtcaatctccctttgggactgatttcatgcgatttattgaataccgagtttcttcttcagttccttaggcagagaatctttgtgtaccatcacgcagattgttttagcacgtacatagctttcagacatattcagataacctccggatttgttgctttccgctccccaggaattcttggtgatataatatttagtaccattctgatcttttacaatgccggtgatgtgcatcaagtggtcgtcagttgtcacaaacttctcgtaaccatcctgacggatttccggtgttacgttgatttccggataaggatgctcaaacttgaacacttcatccattcgttgatatttgggcattttctcaaaacgggcacggtcggtagtcgagtaatctttcacatcctccacttgcgggttaatggcgattccgttcttgaaagagaaaccctgttcgcttacgtcaccgtcccaacatacggtatatcctttgttcagtgcatagtcgatagccccgatcagttcgtccaacggaagattatacattggctggttttcccagttgtcgggaacttcaggtgagaatgtctcataataaggcttgtgagtgaagctggtcagttcaacataatcatccatattcaatcccagactttctgtgaaagattgaggagtatattcttttcctttataagtgaatttttcgggaagcttacccagataaatatcgaacagattattaataagcgcatcaaattgcggagtgcgctttttagattcaatatttgcgtctaccaatgctttgaggtagcgtgacaatgcaccgtgattgtggtctttgttatcgcctagcaatccggtgtacacttcttccggaacgattcccgctttcttataagcgtttttgaaagtgtgtgccaaacttccttcaccgatacttcctttaccacgacggagataattgtcctccatctgattcatgtacttttggcggacgataaacatttccgagagatcatattctccttttcccattcggagcagttccgactccatgaaagaagcggtggcaaagcaccaacaggttcctgtggaaccttgatctttaacaggcgttgcttggtgggacacaacggttgtgaactcataaccaggtgtttgtgcaaaagaggttacgaccaataagaggagcgcaaccgacataaatagctttttcataatgtgttttattatctttcttctgcaaatgtataaaaaaagcgaggatactcgaaagttcctcgctctatttattataattagtgtgtttatttacatggcaacctgctgtgacagcagtttttgaagtttaccgtttaatgtttggcacatggcaccatttcccattgcttgataacgtttaatacggtactgtaacatcataattttttcatttgcattctttttcataatttgtttcctctttttttgccctccacgttttgaagagcggttttacatcttgttttctctaataacactgcaaagatacaaattgttttcgaattatatgctgtaaaacataaaaatcttcttttccttttgaattttctttttataagggttcgaacacggtctatattacaaacctgttacaaaattcccggattttcccatcaatgacaatattattcttatctatcacatttttatgtacttatctaggtattcagaaaatattcttctatttttgtcagtcagcaaccttattaatagaataaaccaaacacttatatgaaaacattcacccatcttttgtgcgtcctgattttgtcgattgtactgtttgcttgtaacaatgttcacttcctcaaagaagaatcctaccggaatcaagtagctcaagactttgagcagaaaaaacaggcacttcctcatggagatttatttgcaatctttggtgattccgctctgtcagtgtacgagcgcgaagcattgatgtttctctacgcttatatgccgataggggatgtgacggactatccgggagattattacttggagaatgtccggctgtcgaagcagacacgtggcgagatgccttggggcaaagagattcccgatgaagtgttccgtcattttgttctgccgatccgggtgaataacgagaatctggatgattcccgtcgtgtgttttatgatgaactaaaagacagggtgaagggactgccgatgaaagacgcgatattagaggtgaaccactggtgtcacgagaaagtggtctatcgtccgagtgatgcgcgcaccagctcaccattggcatctgtcaaaacagcgtatggacgttgtggcgaagagtctacatttacggtggctgcgctccgggcagtcggtattccggcacggcaagtgtatacgccccgctgggcgcatacggatgacaatcatgcttgggtggaagcatgggcggatggacattggtacttctttggagcttgtgaaccggaaccggttttgaacctgggatggtttaattcccctgccagtcggggaatgttgatgcatactaaggttttcggacgttacaatggtccggaagagattatgcttgagacacccaattacacagaaattaatgtgattgataattatgcccctactgccaaagctatcgtaacggtgacggatgccgacggtcaaccggtagcagatgccaaagtcgaatttaagatatacaattatgcggagttctatacagtagccacgaaatatacagatgcagaggggaaagccagcctgactgccggtaaaggagatatgttggtttgggcatcccgcaacggacaatttggttatgccaaaatctcatttggaaaagatgatgcattgcaactctctttaaataggaaagaaggtgaagcctattccttgccaatggatcttgtacctccggtggaaggagcgaatattcccgaagtcactcccgaacaacgggcggaaaatgatcggcggatggcgcaggaagattcaatccgcaatgcgtatgtagcaacaatgatgacggaaaaacaggccaaagagtggatagatcaactatatggaaataccttacaatcggaaaagaaagaaaaattagtaaacttcctggttgcttcgcgaggaaaccaccaaaccttgaaagacttcctttcagctatccgaaaagagaaagacgctatttcatgggaagaaatacgggctatatggatattagagagtctttcggctaaagatctccgtgatgtaactctggatgtattgaatgatcatctgctgactaatatctcggattgggagaagatagagactgatttatttaaaagaatgtacctcaatcctcctcgtatagccaatgagatgttgactccttataaaaaggaacttcgtgaagccattgaaaaaacagtgtaccagtctgtgcccgatagcatgaaacgtgatcccaaagtattaatagaatggtgtagaaaagagattaaaatcaataatgaactgaattctcaacagattcctatctctccgatgggagtatggaaagcacgggtggctgatgaaaagtcgcgtgatatattctttgtggcagcttaccggagcatgggatgggcgtccgctgcctggattgatgaagtgaccggaaaggtgcagattctaaatgaagaatttgcaaaggaagatgtcaacttcgatacggcagaagctgcacagtctcgaaagggagtattgcaagctacttatactcctatccgctctgtggaagatcctaaatattattcgcatttcactctttccaagtttaaaaacggcacattccagttgcttaattatgacgaaggagagacggatatgggggatggaactacctggcgtaatttattaaaatatgggagagagcttgatgaaggctattatatgatggtgaccggaactcggttggcaagtggcgcggtgctttccaacagtacattttttactatagaacccggtaagacaaccaccgttgaccttgtgatgcgtgaaagcaaagatcaggtgcaagtgatcggcaattttaattcggaagcgacctatcgtccggttgacagcactgaacaacggagtattctgcaaacctgtggacgtggatattttgtagtagctgtgcttggagtggggcaggaacctaccaatcatgcactaagagatatagccgctttgggcaatgacttcgaacaatgggggcgtaagatggtctttcttttcccttcggaagaacaatacaagaaatttaatgccgacgaattcaaaggacttccgtctaccatcacctacggtattgatgtcgatgacagcatccgcaaagaaattgtacaggctatgaatttaaacaattctattctgccggtgtttatcattgcagatacatttaatagggtagtctttgtttctcaaggatatacaatcggtttgggtgagcaattgatgaaagttgtacatgggttgtagaaaagaggaggtatgcaataatcgttaattcttgcccttaatgcgttttttcggaaaagaatgattacgtttgcagcaaattatgactaagtacattttttgcatattagcatgtgcatttctggtattgggatttagtaatgtttccaataaagaattgcagggatttcagaaaaaaactgaaacctcgtctaatgacatgcgatatgaagcagtgtcatgctgttgcgtttcttctgccggcttcgacaagccaggtaaagattctcattcgcagtttgttgacgagacatccaattgcaaagttagtgactgcatttttgacaatatctcttttccgaggagcattgttcctttcaagaacctgaagttcaataccaatactgtcattatacagatattgagctctctgaatgttatgcttccggagaatcgtttggggcataccggccttgatgtcaattacactaaatattcgtgtaagtattacgtctatacattggcgcatattctcatttagactatattcttatctttgggtaaggtgaggtgcctattcagctcctccatctaccatcatttcctttatttattatcttagttttattcatgttaacatggaaaacaaagaatgtatttcctatgacttggaacaaaggacggatattgatgtgcctgtctttaaggattaaaatattgtgttcccgttgtgaaacgggagttacgtcgtataaaagcaaggatatataccgaagtggtttcaggcaagtgttatccgccgattgcttctatatggtgatgaggaaggcccaatgggattaactttcatgtgtgtctaaattttgtaatggttttaccattgggcgcctcttctttttttgaataagattatacaacctaattttttatattactatgattcatttattactatctactcttgcgatgatggggcttacgttcctcatcggtttttttgtcgctgcggtcattaagttgattgcctatgcggccgattcatttgatttttatagttctcaccgtttggagctactccgtttgcgacgctggcgtcagcatcggcaaaaggtggagagattagtccgacagattcccattgcagatgaagatgctttgggagatttccgtgaagattacagtaaggggatcgacagaaactttactggctattccggctattatcatggcgtgagtccgggagcttctgaaaataatctgatgaattattattattcacaggatacccgcgaattctttcttcgggaagaagagcaggcacatgtcaataagaagaactcaaagaaacttactaacaacaaacaataaaagaaaactaatttatggaaaatatagattttgctaccttgtttcaaggtattggtacaatgatagcaagcggatgggtgcttgcttctgcaagagtttttttagtacttctcggtttgttactgatctatttaggctggaaaggtatactcgaaccgatggtaatgattccgatgggactgggaatggtagctatcaactgcggaaccctcattatgcccgacggtacactgggtaatctctttctcgatccgatgctttcagatacggatcaattaatgaatactatgcagatagatttcctgcaacctgtttataccctgacgtttagtaacgggttgatagcttgttttgtctttatgggtatcgggacgcttctggatgtcggcttcctgcttcagaaaccatttgcaagtatattcctggctttgtgcgcagagctgggcactttcctgacagtacctattgcttctgctcttggtctgactctgaaagaaagtgcatctgtggctatggtgggtggagccgacggaccaatggtgttgtttacttcgttggcattggcaaaacatctctttgttcctattacggtggttgcctatctttatttgggcttgacgtatggaggctatccttacttggtaaaactgttggttcccaaacgcttccgcgctattaagatggtgacaaagaaagctccgaagaattacgatgctaaagtgaaactggctttctctgctgttctttgtgctattctctgtttcttgttcccggtagcttctcctttgtttttctctttgttcctgggtgttgctgttcgtgagtcgggtatgaaacatatctatgattttgtgagtggtccgttgctttatggttccacttttatgttgggcgtactgctcggtgtactttgtgatgcacatctgttgctcgatccgaagattttgaaactactagtattaggtattgttgcattattactttccggtatcggaggaataatcggaggatatatcatgtatattattaaacggggtaattacaatccggtaatcggtattgcagctgttagctgtgtacccactaccgcgaaggttgcacaaaagattgtaagcaaagataatccggactcatttgttctgggagatgccttgggagctaatatctcgggcgtaattacttcggctattattactggtatttatattacgataattccatatttataaataaaagtataacagtttcttgagatactgttagtaatgatgcaaaaaagaaatggtgaacaaaaggcttaaaagctgtatgttcaccatttctgtcttgtattagtactattatgagacgatatctcatcccttgctgccatatttatccatgtaaagcggcatcaatcgtttcttttactcttcgtatggaagttacatttcgttcgtagtcgttgatgtgtaccgtgcctcccatagagacggcttcatttctgaatttcatctcactttgaatgttttcgcgtgccgagaaatgaaactcgttgattccggtttctgcggcaatgcgtgcgatattattttcatttactccgcatccggcgagtaatgtgattcttccggcggcctgtttctgtaactcttttaaaagggggattccctgttcagccgtaggttgctgaccggaagtcagaatacggttacatcccagtttgatgatctgttccaatgctctctgcgggttacggcatacatcaaatgcccggtgaaaagtcacagatagcccttgagccgctttcattagtttctgcattgctggcaagtctacttcaccctctgctgtcaggcaaccgaatactactccgtctgcccctaatttccgtgccatttcaatatctttcagcattgtccggatttcgatatccgaatacagaaaatctcctccacgaggccggataataacgtgcaggcgggtatgagtcagtacttcccttgcgatggcgatctcaccataggagggcgttgttccaccttccggtattccggcacacagttccacacggtctgcaccacctttctgtgcggccaggcaactttccactgaattggtacaaatctcaaattgatactttcccatagtcgtgtattaaaaaagggcgaatttcttcgcccttatatgaatcttcttttgaatcgttacgttatttagcgaaacttaccgcacgtgtttcacggatgacggtaatcttcacttgtcccggataagtcatttcatcctggatcttcttggcgatttcacctgacaggctttctgtctgcttgtcgtcaatcttatctgcaccgacaataacgcggagttcgcgtcctgcctggatagcatacgtctttgttacacccggataagccattgccagctgttcgagatcgttcagacgcttgatataagcctctacgatttcgcggcgtgcccccggacgtgcaccggagatggcatcacatacttgtacgataggagccagcagactggtcatttctgtttcgtcatggtgagcaccgatagcgttgcagatatccggtttttctttgtatttctcggcaagtttcatacccagcaatgcgtgtggcaattctggttcttcatcaggcactttaccaatatcatgcagcaaacctgcacgttttgctttcttcgggttcagtcccagttccgatgccatcacagcacaaaggttggctgtttcgcgtgcatgctgcaacaagttctgaccgtatgaagaacgatatttcatcttaccgatgatacggatcaattcaggatgtagaccgtggatacccaggtcgatggtagtacgtttacccgtttcgataatttcttcttccacctgtttgcgtactttagctaccacttcctcgatacgggccggatggatacgtccgtcagtcacaagctgatgcagggccaaacgggcaatttcacggcgaaccgggtcgaaggcagaaagaacaattgcttccggggtatcgtctacaacgatttcaacaccggtagcagcttccagagcacggatattacgtccttcacgtccgataatacgtcctttgatttcatccgattcgatatggaatactgtaacagagttttcaatggcagtttccgtagccacccgttggatagactggataacgatacgtttggcttctttgctggcagttaatttagcatcatccataatgtcgttgatgaatgattgtgcctgcgttttagcttcttccttcagtgattctaccaggcgttctttggcctcttcggcagacaatccggagattgcttccagtttatcgatttcctgctgttgcagtttatcgagttcttcttttttcttatcaacaatgacaagttgcgcttccagattctcttttaccgcttcggcttccatctttttacgttggatttcttcctgacgctggctaagtaccatttcacgttgcttcaacttgttttccgcttgctgaatcttctgattccgcaatgctacctccttttcaagatccgctttcttattcaggaatttctccttcacttccagcagcttgtttttcttaattacttccgcttccgtctccgcttctttcaggacattatcgtatttggatttcagtacataccggaatagtatatatgaaaggactcctcctacgatgaagcaagcaattgctgttgctattattgctatcattctacatttaatttaagtatataaataaaaacgcaccgccaaatatcaaagcaattatttttgcttggatattgtgcagtgcgtggttgttttatctcttatcagcgaatagccggtcgggatttattcttccttaaaataatcctccagcaattctgtcagttcttttaccttctccacataggggctggtatcattacgttgcatcaattgcagtctctctaacgagaactgataggctaccatggcaataattttttcgggttccagatttttatagacttcccgatacttattaagcctgatatttacctgcttggcggcttcccgtaccatttgttcttcctcacggttgatggttaacgggtagtttgagtctgctatctgcaggtttatctttattttatcgttcatacatcttcttcttattcattcaacaaagcgatgcatttatcgacttcacgcactaattttgacaatcgcagcttcgtctcttttacgtcgctgccgttaaggctgattgccgtagctgtttttaggtttgtatagctgacttccaattcatcgtattgagcttgtaccttctcgtttttcagcttttcattttcgagaagcttcttcaactcggcattttcacgcttaagttcatcgtgcaaataaatcaaatgccgtagttgcgtttcaaaggaattcaataactttttttcttcttctgtcatcactacaccaaaattgtacacaaaaatacgattaactctgatattacaaaaacttttcgggagaaaatgttctttttagcctaaattagctatgaacggaggggaaagtagagtattgcataggaagcaaatacagactgcttataatattatggtatattttaaattaatgcgaattagtaattgaaaatgaattgtcattcatttttgtacgattctgaatcattacaaaatcgattaaatttttctactgggtatttattttcaatctttctatttcttctttcaccttttctctgtctcttcgatgaataaggagtttgcgggtgaagagtaacaatttcaccatctcttcacctgtagcgagtagtttcaaaaatagtttcaaggcttgaaacaatctgtttcacaccgagaaacacttcgtttcgctacttgaaacaaagtgtttcccgccttgaaacttttagtttcaaacaaggttgaaactaattacgaaatagctttactaattttactcaatggtggaatctggaggctgcaatttgatttgattcacgatgaagagcaggtgaaggggcggttattcacctacaaacagcttgtttatcggccatacagaagaaaagtgaaggagctggaagaattggacgtattatagagaaagagcattgaatgattcaaaactgtataaatctgaattcttctttttttgttggtatcgtataagattactattcagcaaacttttgtaacttcggtatgtttttctggaaagtattaagatataatatctgatagataagtcattaatatacctccaaacgtggcgtcgatgcacgcattttgatttccgcatccaacacgattgaatgattgggagatgccggatctttgattttctctaaaataaattcggcagcttttttccccatctggtacaaaggcggttctactgtagtcaatttgggatagactatgttggaaagttcggttcctgaaaaactggctacggcgatttcttcgggtattttttttccaagttctctcaatctgttcatggctccaatagccaatgtttccgtaaaagcgaaaatagcattgaaaggaatatttctttccactaatatatccgctgcttttttcccttcctcaaaagtcataccggtttttatcagcatattattcttatcaaaaggaatcccgaatttagccaaagcgtctttgtatcctctgacacgttctatggagttgtaaatatcgtccggtccctgtatatgaacaatctgtttgcgtccgcttcggatcagactttctac

SEQ ID NO: 8240 - DNA, 7733 bp, Unknown
  gut microbiota DNA sequence
acccttgcattaagagagtattctcaatcttaaaatagtaagtagtaaatcgtaaaatagtaaatgaaattatgttttctggaatcgtagaagaatatgctactttggtagcactggtgaaagaccaggagaatatacactttacatttaagtgttcgtttgtgaatgagttgaaaatcgaccagagtatttctcacaatggtgtgtgtctgacagtggtgactctgacagatgatacgtatacggtgactgccatgaaagaaacattggaacgctctaatctcggtctgctgaaagtgggggataaggtgaatgttgaacgtagcatgatgatgaatggccggttggacggacatattgttcagggacatgtagaccagaccgctacttgtattgatattaaggatgcggaaggtagttggtattttaccttccaatatgcgtttgataaggaaatggcgaaacgtggatatatcacggtggataaaggttcggtaactgtgaacggtgttagtctgacggtatgtaatccgaccgatgatactttccaggtagctatcattccttatacgtatgagcatacaaacttccatacgtttgagattggcagtgtggtaaatattgaattcgatattatcggtaagtatatcagtcggatgattcagtataaatagttggctgtcgcaaaagcgaatttcaatcgtaaattgtaaatcataaaatcgcaaccttatggattttcttcaattggtacaggctcgtcaaagcgaccgttcgtatgataaggagcgtccggtggagccggaaaagttggaacggatacttgaagctgctcgtttagcgccttcggcctgtaatgcgcagccttggaagtttgtagtcatcacggataaggaactggctcaaaaagcggggaaagctgctgctggtttggggatgaataagtttgctaaagatgctcccgtgcatattctggtggtagaggaatctgctaatattacctctctgcttggtggaaaggtgaaaggcaagcattttccattgatcgacattggaatagttgctgctcatattgctttggcggctgaagccgaagggctgggctcttgtattctgggttggtttgatgaaaaagaaatgaaacagcttgccggtattcctgcctcgaaacgtttattgttggatattgtcattggctatccggcaaaggaaaaacgcaaaaagatgaggaagccgaaagaaaaggtgatttcatacaaccgttattgattgaaaaataattatattcttagttctttaggataagcatataacagaaagcatcgttggttttaaaggaagagtacgttccttttaaaccaacgatgctttccttttaaaggaacggactgtttgtttaaaaccaaaagtgtttcctctaaagtgttgatatataacttattattaatgccgctgaataagcggcattaataatgtagtatttatttcttttttgacaaatccttcagcaaatagtctactgccgctttcagttgggcgtcttctcctttcaggctggcttcggacttattatagataagaatatcaggttgtaaagtctgattttcgagatcgttgcactgcttgcttccttttccttataaatctttcagtaatactttacttgcttttttatagtattcttctctggattcggtcagcactttccattcgtcgttgaattcttcgtctttgtcaattttgaaattctcggaaccgtatgtatccaaacgatccaataagatggctacattcaattgattgatatccattgacggttgatagccgatctcttcgcttttttcgtcggtgactacctcgtgaatcaattctatttcctgcaactgataaagtacctggttggttagtcggatgggaatctgatgctcttccgagatttctgcagccgtatagggaggttcgttcttctcaaaccgtttggctatgagcgacataatcaggatggatataaagtcccggtatcgtctgctgatattccgggtatcctggtcaaaactaaaactacggatattttgcccggcatacgtcaattcggctccgaataaacagattgtccaagatatttgtaaccaaagcagaaataagggaagtgcggcaaaactaccgtaaatggcgttgtactttgacacccacaactggctgttgatatacaggaactgaaaagcttgataagcagaccccgccagaatgcctgcaatgagcgcgtgtttgaattttacttttgtattcggcatgaagatatacagccctgtgaacatcagccatgtcaggacgaaagggataagtcgtatcatgaatttcataataggagcaagcaggacgaaatcatccatctgtttgagaatggtgctcataaacagagaaagccctccggacactacgattagaatcggcatcaacaggaacatagaaaagtaatccgtaatcttgcgatacatggaccgtgcttttttcacttcccaaatacggttgaaggtgatttcaatattgctgaccagattgataaccgtccataacaacatgaccaaaccaactccaatgaaaatacctcctttggtttgtgaaagataggagttgacaaatgagagaatggcctctgttgtttctatatttcctccgaaaccattgcggaactgatgttccatcaggttgtcgaatccaaaacctcgtgccacggcaaacaggatggcaagtatcggtacaatagcgagcaatgtgctatatgtcagtgcggaagctttattagccatccggtctttggtaaaccggttgatacaaagatagatggtctttataatattgtagagtgagaacttggttcgggtcacttcatcttccgtaatgcgccagatgtcatacgtaagaaacttccatatatcggtgattttcttcttcatagttcaacggataattaaaagaaaaagcagtcagcctataagccgagttctgtaccttatataaaacaaggtgcctgtcatttatctgagtggcgtgtcaccacgacactttagcggtctaccctccgacatggagcgagcaactctcataacgccggtttacatgaccttacaactcctaagacgtacagcccgacatgtcaccatgcggctggtgggctcttaccccaccttctcacccttacctctccccgaaaggagcggcggttgttttcttctacgttactctaccctcacggacagctttctgttaggaagtaggatgctctatgttgcccggactttcctcctgcacgaaacgtgcacgcgacagaccggccaactgctttagactgcaaaaatacgtcatttattttgttttagccaaagaaagtaccacaaatagaaataatttctacctttgctattattaaaatgaattttaatgaagaagaatatcctccttttctcttgttttctggtgattgcggcagtcagcctgaaagcacaggaaatacgtcccatgcctgccgattcagcttatggggtagtgcatatctctgtttgcaatttgcgcgaagaaggcaaatttacttccggcatgagtacacaggcattgttggggatgccggtcaaagtacttcaatataccggttggtacgagatacaaacgccggatgattataccggatgggtacaccggatggtgattacccccatgtcgaaggaacgttatgatgagtggaaccgggcggaaaagatagtggttacttcgcactacggatttgcgtatgaaaaaccggatgaaagttctcaacctgtgtccgacgtggttgcaggcaatcgtctgaagtgggagggaagcaaaggtcatttctacaaagtatcttatcccgacggtcggaaagcatacatctctaaatctatttctcaaccggaaacaaaatggagggcttcattgaaacaagatgttgaaagtatcattgcgactgcttattcgatgatgggggttccttatctgtgggcaggaacctcttccaaaggagtagattgtagcggcttggtacgtaccgtgctttttatgcatgatattattattccgagagatgcgtctcaacaggcttatgtgggcgaacatattgagattgctcctgattttgccaatgtacaacggggggatctagtgtttttcggtcgtaaagcaactgcggagcgtaaagaaggaatctctcacgttggtatttaccttggtaataaacagtttatccacgctttgggcgatgtacacgtcagtagtatgaaccccgcggataagaactatgacgagttcaacacgaaacgtctgctttttgccgttcgcttcctaccttatattaataaggagaagggaatgaatactacggataataatccttattataaatagttgataaatgatgtttgatagttattgtgagtattttgtataaatatctatcatctattatctgttacctgtcatttatcacttatcatttgtaatttatcatctattaaagcatgcagaacagaagagattttttgaaaacagcgactttggctgctttgggttcagggttggttgtccgtcagacattagccggagaatcatcgctttctaacgtctatataaataagctcggtttgggaggaaagatgaaaatgagctttttcccttatgaattgaagttgaagcatgtgtttacggttgccacatattcacgcacaacgactcctgatgtacaggtggaaatagaatatgaagggataacggggtacggagaggcctctatgcctccttatttgggagagacggtagaatcggtaatgagttttctggggaaagtgaatctggaacagtttagtgatccttttcagctagatgacattttgtcatacgttgacagcctctcgccaaaagacacggcggcgaaagctgcggtagatattgcccttcatgatttggtgggaaaactgttggatgctccctggtataagatatggggattgaacaaagaaaagacgccttctaccaccttcacgataggtattgatacacctgatgtggtaagggagaaaacgaaagagtgtgccgatcagtttaatatattaaaggtaaagctgggacgggacaatgataaggagatgattgaaaccatccgctcggtaacgaatctaccgatagcgatagatgccaaccaaggctggaaagaccgtcaatacgcgcttgatatgattcattggctgaaagaaaaaggtattgtgatgatagaacagcctatgccgaaggagaagctagacgacattgcctggataacacaacaaagtccattgccgatatttgcagatgaatcgttgcagcgtttgggagatgtagctgccttgaaagacgctttcacgggaattaatattaaactgatgaaatgtaccggtatgcgtgaagcatggaagatggtaacactggctcatgcgctcggtatgcgtgtgatggtgggttgtatgacagagacctcgtgtgctatttcagcagcttcacagttctcaccattagtcgattttgccgacctggatggtaacttgcttatttctaatgatcgatttaaaggggtagaagtggtgaatggaaagatcaccctgaatgatttgcccggaatcggtgtcatgaaaatctgactttactgaatgaatgtcagagtgttaaagccatctgacatacaacgaatgtaaatttgtcaggtgttgtcgttaaccgctgttaagctctaaatattctctgttaaaagtggacaaaaaagagtgacaagtagaataagtgaacgatatttgttattattttaacgtcgtaaaagttaaaacaatgtcgaatattaacaatttaaagaattataaatcatgaaacagacaacaaagaacattctgggagtaggagcaatcattcttcttagctcaggagttgcaggattgacaacttacaaattgttgcaatctaacgaagctgctaaagagacatcttttaatgagatgttcaagcagaatcccaatgtcaaattggctgcttttgacgctgtgaacgctcaacctgttgacctgactcaggctgcggagaattcgcttcatgctgtcgtacatataaggtctactcaagaagctaaaacaagaacagttcagcaagcgccggacatcttcgatttcttttttggtgatggacgcggacagcagcgtcaggtacagtctcaacctcgtgtaggttttggttcgggagtaatcatctcgaaagatggatatatcgtaacgaataatcacgtgattgaaggtgcggatgaaatcagtgtgaaactgaatgataatcgtgagtttaaaggacgcgtgattggtactgaccccagcaccgaccttgcattagtaaaaatagaaggtgatgatttcccgactattccggtaggagattccgaagcgttgaaagtaggagagtgggtattggcggtaggtaacccgttcaatctgaactctactgtaactgccggtatcgtaagtgcgaaagcccgttctctgggtgtatataatggtggtatagaatcattcatccaaacggatgctgctatcaatcaggggaatagtggcggtgcgctggtaaatgccaaaggtgaactggtaggtatcaattcggtgctttcttctccgacaggtgcttatgcaggatatggtttcgctatcccgaccagcattatgacgaaggtaattgccgacctgaaacaatacggaacagtacaacgtgcattgctcggtattcgtggtggttctatcggtagcagtttgatggacgaccgtcaaccgattgataaatccggtaagacactggcagataaagctaaagaattgggtgttgtagaaggagtgtgggtttctgaaatcgtagaaaatggttctgctgcaggagctgacattaaagtggatgacgtaattatcggtgtggataataagaaagtatccaatatggccgacttgcaggaagctcttgcgaaacatcgtccgggtgataaagtgaaagtgaaactgatgcgcgataagaaggaaaagaccgttgaagtaacgttgaagaacgaacaaggtactaccaaaatcgtgaaagatgcaggtatggaaatcttgggagctgctttcaaagaattgccggatgatttgaagaaacaattgaatctgggttacggtttgcaggtgacaggggtttcttctggtaagatgtcagatgcaggagttcgtaaaggtttcattatcctaaaagctaatgaccagccgatgcgcaaagtcagcgatctggaagaggtgatgaaagctgctgttaagtctccgaatcaggtattgttcctgaccggtgtgttcccatccggtaaacgcggatacttcgctgtcgatcttactcaagagtaatatataaaataaggtaagaagattataggataagctaatgaaatagaaaaaggatgccgccaatcaacttgtcggcatctctttttgttttattagttgaaaaatatagtgtaaaagttacttaattttgtatgttaacaaattatttgtcgtaactttgcactccaaatctgtttttaaagaatgagacaactaaagattaccaaaagtatcactaacagagagagcgcttctcttgataagtatttgcaggaaatcggccgtgaagacctgattactgtcgaggaagaa

SEQ ID NO: 8241 - DNA, 9005 bp, Unknown
  gut microbiota DNA sequence
tttaggaatgtctccattttggatttcaatgaataatgaacggtgaacaaatctatgcatatagcatagttgttcaccgtccattgtttatagtttaccgtttataaaaacgttcttgattacagttttgcacggattgctttagattcttcttcataccccggtttgtccagcaacgcaaacatattctttttgtatgcttccacacccggttggttgaatggattcacgcctagcaagtaaccgctgataccgcaagccttttcgaagaaatagagcagaccaccgatgttgtattcgctcaattccggaagtacgatacgcatattaggtacaccaccgtctacgtgagccaactgtgttcccaattcggccatcttgttcacttcgtccacacgtttgccggctaagaaattcaagccgtccagatttgcttcatcagaaggaacttccagtttgtggttaaccttctctactgaaatcaccgtttcaaagatagaacgttcgccttcctgaatccattgacccatagagtggaggtctgttgagaaatctaccgatgcagggaagatacctttattgtcttttccttcagattctccgtaaagctgtttccaccattcgcttacatagtgcagttttgggcagaagttaacgaggatttcgatcttcttaccatttctgtacaactcattgcgggtagcagcgtagatagcagcagggttttcagcaaatgcaacgtccgaaccacatactttttccatgtcggcagcaccggcaaccagtttgtcgatatcgaatccggccactgcaataggcagcaaaccaaccggagtcaggacagagaaacgtccgcctacgttatcggggatgatgaatgttttgtatccttctttatcggctgtaacacgggcggcacctttcttggcatccgtcacggcaacgattactttctttgcagtttctttgccgcgctgatcttcacattgctttttcagcaaacggaaagcaagcgctgtttcagtagtagttcctgatttggagatattgatgacaccgaatttcttgtctttcagatattcagtcagttcatacaaataatcttcgctgatattgtgtcctgcatagatcatgacaggagctgttttcttttcctgcaaccaaatgaagctgttagacaaagcttcgatgacggcacgggcacccagatagctaccaccgataccggctacgattactacttcacaattgtctcttaatacttttgcagtagcgttcaggtcggccaggtgttctttagtgatagaagaaggcaaatgcaaccatcctaaaaagtcgttacctttgcctgtacctttttcaagcatttcctgtgcggcttttacttcagcttcgtaagcaaaaaccttttctttggagatgaatccaaatgttttttcaatgtttaaactaatcatatattttaagtattaagttttaagtattaagtattagtcatcaagtatggattgtcaagtatgagtacctgctggtaatacttaaatgcctaatacttaatacttaatatttttttatctaaaagagtcagtcaacagtttaatctcgatcattggtgagatacgttcgtacagaatgttgtacactgcgtccagtatcggcatattgacatgatgatgtttattgatttctttgatacatttcgtaccatagtaaccttccgcaatcatttccatttcaatttgcgcactcttaacggaataccctttacctatcatcgttccgaaagttcggttgcggctgaagttggagtaaccggtcaccaataaatcccctagataaacagattcatccacgtttctgttcaacggatgtaccgtattcaagaaacggttcatttcctgaatggcgttggagatcagtacagcctggaagttgtcgccatatttcagaccgctacagataccggcagcgatggcatatacgtttttaagtaccgaactgtattcgatacccgctacatcatcactgacagatgttttgatgaagctgcttcccagacgacgtgcgaagatacgtgctttatctttgtcagggcaggcgatagtcaggtaggagaggcgttccaaggctacttcttctgcgtggcagggacctgcaaggactgctatattttctggtggtacaccatattcttttgtgaagtattccgatacaataacgttgtcatcgggtacgattcctttgatagcggtgatgataaacttatcttttatcttggttttcagtttttttagatgcgccttcagataaggagagggagtgacgaaaatcagtgtatccgattctttcaccacatcgttgatgttggaactgaacgtgatgcgtcttgtatcgaatttcactcctgtcagataagccggattgtgccctaatcgtttaaaatcggcaatgcggtcgtctcgccgcatataccaattgatagagtcttcctgggccagacacatctttgcgatggctgtagcccaacttcctccgcccattatcgctatcttgccgggtaatttcatttgtatggatttggatgaagaacttattaaattttctgtatccactcagttacgtcgtttaccgacggattggtcagttctaatttatatttcttgttaatgccacagatgtcctggtgcaacttctgcggattgacatctttcatgtcagctacagtgttgtaaccggctttttggatcaccggaacccagtcttctgcgattcccaattccatatatttagcggcagcgtcttttttcactactttttccggacgcatttgcgggaagaataatacttcctgaatagtggtctgtccggtcattaacattaccagacggtcgataccgataccgatacccgatgtaggaggcataccatattgtaaagcgcgcaagaagtcctgatcgataatcatcgcttcatcgtctcccttgtcggccaaacgcatctgctctttgaaacgttcttcttgatccagcgggtcattcaattccgagtaagcattagccagctctttaccgttcaccattaactcgaaacgttcggtcagtcccggtttagaacgatgcatcttggtcagcggagacatttcaaccggataatcggtgatgaaagtcggctggatatacgtaccttcgcagaattctccgaagatttcatcaatcagcttgcctttacccattgtctcgtcgatttcctccattttcagttccttgcaaacttggcggatttcttcttcgctcttgccgttcaggtcgtatcctgtcttttctttgatagcatccaggataggcaggcggcggtaaggagctttgaaactgatagtttttccgtcaacaacgctttccgtacagccgtttacagcaatacagatacgttccagcagtttttcggtgaaattcatcatccagttgtaatccttgtactgaacataaagttccatacaggtaaattccggattgtgagttttatccatgccctcgttacggaagttcttacctatttcatatacaccttcaaaaccacctacgatcagtcgtttcagataaagctctgttgcgatacgtaggtaaaggtctatatccaatgagttatggtgagtgatgaacgggcgtgcactggctccaccggcaatagattgcaggataggagtttccacttccgtgtaaccagcctcatccaaaacgttgcgcaatgttttcactacagtggcgcgtttcaggaatgtttctttgatgccgtcatttactaccaagtccacatagcgttggcgataacggagttcgggatcttcaaaagagtcgtaagctactccgtctttgtatttaacgattggcaacggtttaatagactttgccagtacagtcagtttctttgcatggatactgatttcacccatttgtgtgcggaacacgaaaccttcgataccgataaagtcacctaagtcgagcaggcgtttgaatacagcgttgtacagttctttgtcttctcccggacagatatcatcgcgggtgatatacacctggatgcgacctttagagtcctgtaattcgatgaaagatgctttacccatcacgcggcggctcatgatacgaccggctacggaaacctggcgtggctcttcgtcgtctttaaattcagctttaatatctgtagagaaagcattggttacatactctgctgcagggtatggatcaatacccattgcacgaagctcattcagactgttacgtcgaataatttcctgttcacttagttctaatatattcatttcgttacgtattaactcaattttgtgggcaaaaatacgaaacttttcttatatatcctgtaatccgtctcttttttgtatctttgcaccctcaaactaataggtatgacaggacaaaagacacccactgcgttgggtacggaaaagattggaaagcttttaatgcagtatgccattccggcaattatcgccatgacggcgtcttctctttataatatggtagatagtattttcattggtcatggagtaggggcgatggctatctccgggttggcattaacctttccgctaatgaatcttgccgcggctttcggctctttggtgggggtaggtgcggctacattgatttctgtgaagttgggccagaaagattatgataccgcacagcgggttttgggaaatgtgtttgtattaaaccttattataggtatctcttttacgctggtcgttctgccttttcttgatccgatactttattttttcggcggaagtgatgagactgtcaaatatgcccgcgaatttatgcaggttattctgctgggaaatgtggtaactcatttatatttggggctgaatgcagtgcttcgtgcctcgggacatccgcagaaagcgatggtggcaaccatcacgaccgtgttaatcaatgtattacttgcacctttgtttatttttgtattcgactggggaattcgcggggcggccacagctacggtttgtgcgcagttgatcgccttggtctggcagcttcatctgttctgtcgcaaagacgaactgatacgattgaaaaaaggtattttccgtttgaaacggaagatcgtgttggattcattggctatcggtatgtctcccttcctgatgaatatggcgtcttgctttattgtgattttgattaatcagggattaaaagagcatggaggtgatttggcgatcggtgcattcggtattgttaatcgtattgtttttgtctttattatgattgtattgggactgaaccaggggatgcagcccattgcgggatataattttggtgcgaagctttatcctcgtgtgacggaagtactgaaagtaaccatttattgtgcaactgtagtgacaacgattggtttcctgataggtatgtttattccggaaatcgtatcttccatttttacttcggacgcagaattaatcagtatcgcttctaaaggatttcgtgtagtggtgttcttctatccgattgtaggttttcagatggtagcttccaatttcttccagagtatcggaatggcaagtaaagccatttttttgtcgctgacccgacagatgttattcttagtgccctgtttattgattctacctcattattatggacaaatgggtgtttgggccagtatgcctgtggcagatttggcggctagtcttatatccggaggtatgttgtggtggcagttccggcagtttaagaaagttactgtttgataagtttgttccgatattctttaggagatataccgacatactgcttgaaatatttcccgaagaatgattgtgtggggaagttgagcttggtcgctatttccttaatacttaaatcggtattatcgagcagatatttggcttctgtaatgacattctgtataatccactgcaaagcactactccctgatttctccttgatgacagaagaaaaatatcgggcggacagacattgcttgtttgcatagaaagtaacatcccgttcctgatgataatatcgatagagggtaatcatgaaattttggaaaatcttatcctttttatcctgtggtagtggtgtttgcggttcgttgttgaaatagatgtttaataactcatagcatatcacttgtccccaggatttgattaattcagaaattaaatgttgtttctgtcgggaactgttacagatattctccctgttaattcgtttttctacagatttgagcaagttctctacaaatgtatattgctcttcggaaagcgacagacagggattttcccgcaaataaagcaagttttccgagttggctactttgtttactatcggtatgacataatccagatcgacctctatcatgattccttccaggtctgcgcttctttggcgtatctgtagaaggttggctgcagtatatatgaaaagattccttttgttaatctgatatggtctacctcccagcaggatttccgcctgtcctttctggcagaggaaaagtccgcattggttgaattcggaaataatgcatccttctttcatggaagtatcttccggagatattataacatacttgaatggcatcagtggttccatattccttttcgttgaaatgaatttccttacaaagtaacaaacaaataaatataaatagcaaactatttcggctttttatcttaggtaacgtacaaatagaacaatgtttcgtctaaatcaacctttctcctcatgtttgcttgggatacttttgtgacaactaactaataagtgaaaatatgagacgattagacttcttattaacaggatttttagcagttctgttgacttcgtgtgggcaacgtgtacaaaacacagacagtaagccggcagtgaagattgataccgtactttctgccgacagacaaatagctttgcagtttccgggacgggtgaaagcggcacaggacataagtctgtctttccgggtgagtggtactattcagtatatgcatgtaaatgacggtgcctatgtgcgtaaagggcaattattggcagaattagatccgacagactatcagattcagctggatgcggcagaagcagaatatcaaagtgtgaaagcggaggcggaacgggtgatggcactttataaggaaaatgtgacaacaccggatgctaacgataaggccgtgtacggattgagacagattaccgccaaatataaccatgctaaagaccagttggcatacacccgtttgtatgctccttttaacggatgtgtgcagaaacgtctttttgattcccatgagacggtagctgccggtatgcccgtcgtttccatcatcagtgagggaagcccggaggtggagattaatcttccggcagtggaatatattcgtcgacagcagtttacccgctactattgtacattcgatatttatcctcatcaaagatatgctttggaactgattagtgtcacccctaaggcaaatgccaatcagttgtacactatgcggcttcaactgaaaaaagaagataaacaggcagttccatcgcccggcatgaatacaatggtaactatcgaatgtagtgaaggagatgtgtgtaacctgtcggttcccggtggagcgattcttcgtgagaacgggcgtacgagtatctttctttatgatgcttccagtcacgctattcgccgttgtgatgtgaccgtcacccgtctgcttagcgacggcagatgcctgattacttcagacggagcgaatcccggtgatttggttgtcgcttcgggggtgcatcatgtaaaagagggagaacaggtggaaccgcttcttccggctgctgaaaccaatgtgggaggactgctatgattgatattagtaaatgggcatttgagaacaagaagttaatctacttcctgattgccgtactgattgtaggaggagcttattccagttatgaaatgagtaaactggaagacccagaaataacggtaaagcttgccatggtagtcaccacctatcccggtgcgtctgcgcatcaggtagaattagaggtgacggatgtactggagaagaatattcgctccatggggaatatagataatgtggaaagttattcctacaacgatctctccctgattcaggtagaactgaaaacgactgtcaaagagacggacgtagaacaatgctgggatctgttgcgtcgtaaagtggcgaacgcacaggcagaacttcccgaaggtgccagtccttctattgtaaaagatgattttggaaatgtttacggaatgtttttcgctttgacgggtgacggactttccgacagggaactgtctgattattcagaactggtgaaacgtgaagtcagcgaactggatggggtggaacgcgtcgacttatacggtaaacgtcccgaatgtattaatatctctcttttgcaagaccggatggctaacttgggtgtgaaacccgccgaagtgctagccacattgaacggacagaaccaaacgacttatactggttactatgataatggcgataatcgtatccgggtgacagtcagtgacaagtttaagacggtggaggatatcggtcgtatgctgattcagggacatgatgccgatcagttgcggttgagtgatatagcccgtattgagaaagattatgaagatcctacccgcaacgaattgttttatgaccgtcagcgtgcgataggaataatggtggccgcttcttcggatgccgacattatcaaagtggggcatcaagtggaaaagaaattggagcaactgaaagtcgaacgccttccagcgggggtagagtgccataaagttttctatcagccggaacgtgtaggcagttcgttggggacgttcattcttaatctgatagaatctgtgattatcgtagttgttattctgatgattgctatgggatttaagagcggggtgattatcggtatcagtttggtagtgacggtattcggttcctttct

SEQ ID NO: 8242 - DNA, 4070 bp, Unknown
  gut microbiota DNA sequence
agtttatctctaatacatcagagctcatttattaaagggctaaaaacaaattccttacttgccaacacacaagttcccgccttccggaagagtgaaagagatagtaaatcacccctccgttacttaatatttcttactttcttcctcattatccttacaaatcactatctttgcgacctcataatttgtttttaacgaataaactacgatagtgctaatgaaacagtacagaaccgtaaacaaccttatgggttggcttacattcatcattgcggcaaccgtctactgcctgacaatagaaccgaccgcaagtttctgggattgcccggagttcataaccaccggctataaactggaagtcggacacccgcccggcgcgcctttcttcatgctagtggcgaatctgttttctcaatttgcttccgacgtaacaactgttgctaaaatggtgaattacatgagtgccctcatgagtggcgcctgtatcctgttccttttctggagcatcacccacctggtacgcaaactggttatcactgacgaaaacaatatcaccaaaggacagcttatcacagtgatgggtagcggactgatcggtgcactggtttatacattcagtgacacattctggttctcggccgtggaaggtgaagtatatgccttctcctccctctttaccgctgttgttttctggttgattctgaaatgggaagacgtagccgaccagccgcacagcgaccgttggattatcctcatcgcctatctgaccggattgagtatcggtgtgcacttattgaacttgctttgtctgcctgccatcgtattggtatactactacaaaaaaacgccgaatgctaccgccaaaggttcgttaatagcgctattaggttcaatggtgctcgttgcagccgtgctttacggcatcgtaccgggtatcgtgaaagtaggcggctggtttgaactgttgttcgtcaacggactcggaatgtcattcaattcgggcgtagtggtttatatcattctgcttgcggccgctttgatttggggtgtatacgaaagttacaccgaaaagaacaaagcgcgcatggctatctcctttatcctgacgatcgctttgctgggtatccccttctacggacacggagccagcagtatcatcatcggtattttggttattgccgcactgggactttatcttgctccgagtgtacaggctaaaatcaaagagagatggcgtatcaccgcccgcaccatgaacacagccttgctgtgcaccatgatgatcgtaatcgggtattcttcttacgcactgatcgttatccgttctactgccaacactccgatggatcaaaattcaccggaggatatattcaccctgggcgaatacctcggccgtgaacaatacggaacccgtccgctcttctacggtcctgctttctcttcgaaagtggcactcgacgtaaaagacggctattgtattccgcgccagtcggaagcaggaagcaagtttgtccgcaaggaaaagacttctcccgacgaaaaagactcttatatcgaacttcccggacgtgtggaatacgaatatgcgcaaaatatgtttttcccgcgtatgtacagctcgtcacacgcaccactctacaagcaatgggtagacatcaaaggacacgacgttccttacgaccaatgcggagaaatggttatggtgaacatgcctaaccaatgggaaaatatcaaattcttcttctcctaccagttgaacttcatgtactggcgttatttcatgtggaactttgccggacggcagaacgacatacagggtagcggagaaattgaacatggcaactggatcaccggtattccgtttatcgacaacttgctggtaggtaatcaggacctgcttccgcaggatctcaaaaacaataaaggacacaatgtattctactgtctgccgctgattctcggcttaatcggactcttctggcaggcttatcatagccagcggggtatccagcaattctgggtggtcttcttcctgttcttcatgacaggtatcgctatcgtgctctaccttaaccaaacccctgcacaaccccgtgaacgagattacgcgtatgccggttcgttctacgcctttgccatctgggtaggtatgggagtggcaggtatcatccgtatgctacgagaatactgcaagatgcaggaacttccggcagccgtactggcttcagtgctctgtttgttcgtccccatccaaatggcgggacagacttgggatgaccacgaccgtagcggacgcttcgttgcccgcgacttcggacagaactacctgatgaccttacaggaaaaaggaaatccgattatctataccaatggtgataatgatactttcccattgtggtacaaccaggaaacagaaggcttccgtacagatgcccgcacctgtaacctaagttacttgcaaacagactggtatatcgaccaaatgaaacgcccggcctacgattccccgtcgcttcctatcacttgggaccgtgtggaatatgtggaaggacaaaatgaatatatccctatccgtacggaaatgaaggccttcatcgacagctatttcaaacaggcaaacgaactggctgcacagggagacactaccatattatcactcgttcactccattttcggtgagaatccatacgaattgaaggaaatcatcaaccgttggatgctcggtaagaacgaccagttgaaagagcttctcaaaaagactggaaaagatatccaactgccgcttatccctacggacagcatcgtaatgaaggtggacaaagaagccgtacgccgctccggcatgaagataccggaagctctgggcgactctatccccgaatacatgacaatcacccttagagacgccaacggcaacccgaaacgcgccctctacaagagtgaactgatgatgcttgaaatgcttgccaatgccaactgggaacgtcctatctatatggcaatcaccgtaggaagcgaaaaccatctgggcatgggcaaccactttatgcaggaaggtcttgcctatcgtttcacaccgttcaatacggacaaactggacagcaagatagacagcgaaaagatgtacgacaacctgatgaacaagttcaagttcggcggtatcgacaaaccgggtatctatatcgatgagaacgtgatgcgtatgtgctacacgcaccgccgtatcttcacgcaactcgtaggccagcttatcaaagaaggcaagaaggataaggcactcgccgcactcgactacgccgaaaagatgattccgtcatacaacgtaccgtacgactgggcaaacggcgccttccaaatggcagaatcttattaccaactgggacagaacgagaaagctaacaagatcattgacgagcttgccaacaaatcgctcgaatacatgatctggtatcttagcctgaacgataaccagcttgccatcgccggcgaaaacttcgtgtacaacgccagcttgcttgacgccgaagtccgcttaatggaaaaatacaaatcagaagaactcgcgaaacattactccacgcagctcgaccaactttataacgagtacgtgacaagaatgaaagggaaataaatagtaagtattaagtatcaggtattaagtattaccatagcttccgatatgttttccgcatggataatacttaatacttattacttaatacttgtttaacacagactctcatgtttatagaacaaccaccttggcttttccgggcgttgtatccacaagctatcttccggatggatccgaatgaacgggcagtctatctgacttttgacgacggtcccatccctgaagtaactccctgggtactggaagtattggaaaagcatcatattaaagctaccttctttatggtaggcgacaatatacgcaagcacccggatgaataccggatggtggtagaacacggacaccgcatcggtaaccataccttcaaccacatccgtggatttgaatattctaatccggattacctcgcaaacgccagaaaggtagacgaaattat

SEQ ID NO: 8243 - DNA, 2152 bp, Unknown
  gut microbiota DNA sequence
cgggcacagcattgacggcttggctgtcctttgaatatgagtggaaatatgtgtattactttatgatggggattcttttgatctctattttgctcctgtttattaccatgccgaattataagtttcccggaaggtttcctattaatttccgtaagttcggcaatgtcactgcattttgcatctcgctgacttgtctcacgtatgtgctggtttatggaaaagtactcgactggtatgatgacgaatctatccgttgggcgacagctgtaagtattctttttgcgggaatttttctatatatggacgtaacgcgccggtcgccttatgttttgctggatgcgttcaaactgcgtactatacgtatgggagcattactttacttattattaatggtgataaactccagtgctatgtttgtcaatgtatttgcaggagtggggatgcatctcgataatctgcaaaatgcttcattaggtaattggtgtatggtaggttatgctattggcgccgtgattgctatggtgttgggaggtaaagggttacattttaagtatctgtttgcgatgggattcttcttcctgtctttatcagctgttttcatgtatttcgaggtacagacagcaggagtttacgagcgtctgaaatatgcagttatcatccgtgccacaggcatgatgattctgtatgcgctgacggctgcttatgccaatcaacgtatgccttttaaatatctttccacctggatctgtattatgcttactgtgcgtatggttgtgggaccgagtattggcggagcaatttatacaaatgttttgcaggagcgccaacaacactatataacccgttatgcgcaaaatgtggacctgcttaatccggatgcttccacttccttccttggtacggtacaaggtatgaaatatcagggaaagagtgagacggaagcccgtaacatggctgctatatctaccaaagggcgtattcaggtgcaggccacgctctctgcactcaaagagatggcgggatggacaatttatggtgggttaatttgtatgatatttgtgctcgttgttccttatcctaaacgaaaattgctaacttagcgtcgtttttgataatgatctgttaatatattagtatgatggatagcggacaagatcgtttattgcagtttgatcgcgatttgttaagtgggaaaaatatatgtagctccgaagggatatttgtaaattttccaccctcactgaagaaacctttccaaatgaaaggactggggctggttatttgccgccagggtaatttccagttttcgcttaatcagaaaaagcatttcgctgaagcgggcgaaagtttgtttattcccgaagatggcgagtttcaggttttgcaagaatcggaagacatggaggtgcagattttgatctatcagatagaacctatccgggatattatggggaatctggttgtttccatgtatatgtattcccgccttactcccgaagaaccttcttgtgtctggtctactggtgaggaagaagaaatagtaaagtatatgtctttattggacaatgtgttgcagtcggaggagaattcatttaaactttatgagcagaaattacttctacttgcattgacgtacaggatttgttccatttataaccgcaaactcgttaatgacgggcgggaagtgggaggacgcaaaaacgaagtctttattcatttgatccagttgatcgaaaaatattatatgcaggaacgcggcgttgagttttatgcggataaattgtgtttgtctcctaaatatctttctgccgtttctaagagtatttgcggatataccgtgcaggaacttgtattcaaagcgatcattcgtaagagtatttcgttacttaaaaatacgcagaaggatattcaggagatttcaaatgccttcggcttccccaatgcctcttatttcggtacgttctttaagaaacaggttggggtttcaccgcagcaatatcggaagaatctttaagcgtttattctttttcaccataggcaaggtcgcctgcgtcacccaatcccggaacaatataagaatgttcattgatttccggatcaatggcagcgcaccaaatggttgtcttgtcttcaggaaatacattctttatat
